United States Patent Application Publication US 2008/0114160 A1 - sequence listing, part 51

SEQ ID NO: 15669 - DNA, 20015 bp, Oryza sativa
tagcaatagggggtaagtacaaaattaccatcacatcgagatgcagaggggctatatgcaaaatgctacatacgtggagcggtcaactctggccaaatagtggtgtggaccagctatggttgattaaaacatgatcatgaagttcaatgtgcactttcaagtttatagacataagtgacaccttcgctcaagttgaaggaccaaccataaattttactcttgatagagaattaaatgatcttccacaaaatctgtatggaattcggaagcttaaaaaggtatagatcatggatatgtatttggaaattgaatggttttagatgcattgctctaaacttaacacagataagattgataggtattggcaaccttgaatgaaccaagtatcgttgattcaaattttaccacatttattgaaaggtataattattcttgtgcttcaaggtactggttgccaaataaacaggaggggctcgtgttgctagaagtggaagcctctagcatatatctgtttgatttgcaatgttgccttccatgtttcagttttggaggcatgggaatgttaacaaaccaacataagccgtgtgacactattttttcctatcttgagtagaacattattttatcttggacaatagggccgaatggttaatacagtttccacctgaatttcgatattcaagttcgagttttgccgccaagctttctagttggacccttgaccaatatgaaatcatgtgtgtttccagtagaacacagccagcaccgtaacctagtatgaaattttgatgattgcaacgtgcagggtaatataatctcagtagaattttcaaaaaaaaaatgattatgagatgaaattgttagttacagtatactagcataatacccgtgtgttgcaacggattctaaataacattcatcgacataaattaatattctgaaccacatatcaatattggacagaaagaagtatgattaaattaaaatcctaaccatatatcacaattggactgaaggaaatataatcatggaaataacaacatgaaactacaaataactttccagaatcataattcaatatcaggaaaattatgtaactaaatatgccattttttacatttagctgtaaataattcaatattataagttacaacaatttttaatagatcaaatagtgctaaaattaataatgtaaatggaaaaacaactaaaattagcagaaactaaaaatttattttagcacatagatgaaaatttgatccattaattctgaacaggtacccttttaattgacataaattagatttttttctatacataatcctatggtctcaatattaagtaaatggtctagtagcatggttaggctaaaccagaaaagaatagtgcattagttcatagatgttggaggttgataacaaagaaaatcagaacatcatgaacgcggttggcaacgatgtggtaccgatagagagagaaacagtaacggtaagatctggcagtgaacgcgactggatgagtgcgtcaaaacacgttccaggataagaaggttccgttttccttgaacatgcaggagaacgaaagatggagaaaaaatgactaacaatattcatcgtcttccctaaccaaaacaagaaatagaagaggagggaagatgggccccggtccactggcgaccaaatggtgctaagatggccagacgtgtcccaatgtgactatgtcaatagatggtggcggttggcaatgaagaaaaccaaaatagtgggaacaacaatgacgtggtcccaacagagagagaaatggacaattgcgagctcgggtgagtgcgtcaaaacgcattttcggccgacggggttccgttttcattgaatgcgcaggagggaggaaatgcagaggagaaaagggacgctgggaggacaaggcgacggggaggagggggcgacaccacgacgggaaggagaggggcccgcgggggaagggggagtgcgtgcagtggggctggagagatggatgtcgccgggaggaaaggagggagggggatcaggaggaaggaggaatcacgccgccttagccgacatgaggggggacggacgaaaatacacccggaagccttacatcttttttaattagatatagaattgatcagctaccacatacaaggatctgatgttgaactggattttttttgttaatgcagagacttgagaaaactagactagtgccattccaaagtgatgatgggattcaaataaatgtagatagatgttcaatttgatagtttagactttagaatattgttggatggtcagtccagaccatgtgtgcttgatgttgtaaagctgctaacactggcgtttaattgatctgtacccaattttgttttacattaaagcagcgcacaaaataaataggagtctgtttggcttgtggttgcttctcttcatcattcatgctccctctctctgagagctctattaaagtttggtttgggaggcatatggaattttaccaccccttcatttttcttatcgtccaaatgttttattctatttaaatttacaaggattatcaaaggctacaaaaacatttgcaactcatatattttctattgtgagtaatggacgtgaaccactagaagggcctgaaagcttggatttttcttcattagggatgacaggatacattccggtttcatgaccaaacacttgatttggacccttgccatgcataagttatcgaaattagagacctgccgtagagagatgagatgcaggtagacattgttaaagacttaaagtgaaccgttatatatgtatcaagctgcataatcttgtaaggtgactgatgttttgaggaagaatattctttaaataaataagataagcatgttcccaaaagcttgatctacccacggaaaacaacaatgcaatggaacagacttattattatattacagtggagttgtccttctgtcaaaaaaaaatcccgggaaagaatctggacaaacagattcattgtctggtttagacttggatttttatggtacattgtactgtaagaatatactatcagtatatttgatcatcggggcatttgcaaatttgccaccggttatttcaatattgcaaggatgccactcgaatgacagttctagtggtatttttgtaattttctagtggcagttttgcaataacgatttaaagtagtggtaaatttgcaattgccccttgatctaggggctaatggtgcagattcatttgatcttcctcccaattatcatgcagtataaattgaatagggtatatttgtcttttcatctttttgcgtggggataattttgtaaattcgagtttcttcacttagtcagatccgttcaagcgaaatccagtaggagccaatattttctcgaagctgcgcgcatgggcgaccgccgtcgctgaccacctctgcgagcatctcccaccttcctagcttgaaggactcgggatggcggcgctagggccggaggcaagtattccgtgagtcaaggacgccgggggatacgcgatttatccagaagaagcactatcatgaacggatgacgtgatccagacaaactaccacctatggaaataaatctcaatttcaaatgactaaacagctattttcagatttttaatgaataccaaatctacccttgcatatactgcaagtatatacttcaagtagaatgtaccgtaaaagttctcgacttagtatttttacggacaggatagaacgagtatgttgctggtaataatcttaccacaaactccacctttgcatatatttttgtgtttcagcgaacaatgattcgcctcatctaaactctgcatcagataattacgttgctattattgtggactaaatactgaaaaaaattacctctaaattattaatgtaataaatcttgcattcatatgggtttatgtattcatcaaataatacaaattttactacatgacacctaaattttatgtaatttgacatcgaaaaaatatgtcactgctaaaagacacataaaaaactggtaaatttgctagaaggcactttcagctcaattggagagataaactcttaagaaagacgagaatgtccctatgaccacatgcttcaaacatagcattaaagtgaaaatttagcaattatgcaactataaatttaccatcacctcaaatacatcactaggatacattgaattccatcttcactctagtattagctcaaaagcttttgaccctagggacattctcgtctttttaaataatttctctcacgagccgaaaaaatccacaacaaattaccaatttttttaggatgtcttttatttatgacacgtttttgcgatgtctactagcaaattacataaattttaagtgtcatggagcaaattttaccatcaaataaagatgcttttgatatcccatttatggcaataagaaatgagaattcttgcactatgccgtgaaaggactaattttttttctctgcaattataatgccttaaggatagcatgattgctgaagaatgaggctattgatttttacaatattacaactccccctagttaatatttattcttgattagctgagatgtttttggctgtcacttttgtaagtcgtaacgcgtgactgaagcaacaaaaagaatatttttatactcctataattttttaagtgttacggaagtacattattaaaacaaagaagcaattccaaatatttttttaataatggtttaagaatctggcttctacaccaacgcaattccaaatctattatcatggaaatgttggtaagtgaatagtagttgtgatgcattactgtgaacagacagtacatatattggtaggtatttgcaaccttgaatgaaataagtattgttgattcaaatcttgccatactaattaaaagattacaattattcatgtcatggaagatactgggtaccaaataaataggaggccggggctgatgttgctagaagctagaagcctgaacatataccttcgtttttgttttgcaatgttaatgcccttggttccgatatcttcatgtcccagtttaggttcgggagacattggcaatgaaaaagtacaatttagttgtgtgtatctacctttttcctttttgtggtagactaatgttctaaaccttgaattcatatgggtttatgtacacaatcaaagaaagatgctttatgatgacccatttgtagaatcaatgagttgatttatattttgtgatgaaaatattggtggtttgctaatgtttatttggagattttataagacggttgattttgtgaagtggatgttttcggttgaccctagcggtcagaccagctgaatgacgccggtcagaccgtaggtgttgcggcgatctgaccggccggcccgatagtctgaccggcaggatcctgatcgatgtcggtttcgggttgttttgttgtatttggatatttccttcggggatttggcttctagatggtttctatgtgtatggatactgttgttatactaatgtgagtaaagttgggatgaacttgggctcggaatatggtttcttagttgttgcatgtgcaggtgttgcttgaggcctcgggagagtgttgccggtgatagatcggagtcaacttgggagaagttgatgtccagggatcaagagatcatgcgggatactaaaggctagaggacaatgcacgtggtgatgaagaaatccatatggtatacaagagggattgtgtatgtatggaaagaggagtcgaatttggaagggagtccgaattcgggaagtttgattaagataaggaaagagatgagttgtatacttgcaagagagggtttcctatgtgagttaggagtcctaagttgtgttattgcatagcctacctcatgtataagtagagagggagggtgaggcctcccggtatcggttttagagagactagagttgagagaaagtgtttttgtaggatcgaatcacaacaactaagccaaccagaggggggtgaatggttggtatacccaaaaaccaaaacttttacggaaataaaacttaccctcaaattcgacggatcgcggtctgaccgaagtagatgcgctggtctgaccgcctggaacacgtcggtctgaccgatgtagatcaatcggtcgaaccgcccaaatcgcctgcctgtggctgtagccgccgccagtccgaccacaggtcacccgtcagtctgaccgcccccttgccaccggttggaccatcggtttgccactggttagaccgtcgaaacccggtgaaacacaaatcgaagaactcttaaagtggatgacggctttattgattctctctgtgtttacaaagtgcaccaacagcactccttacaaaaatctcgactaaactcgaaaccctaactaaactatcaactcaattgctctcaaaagcaatatcgggaagcctcacactccctctctatttatatccaaggtaggcagcctaaagttacgaaccaaactcatactagaagtcctaatctccataggaaaccctctagtacaagaaacaaactttacataactaatcataccaaatttggactcctcccaaattcgactccgcatcccatacgcatacaatatctctatcatatgtcatatggaatcttcaccaaccacgtgcattgactctagccttagtatcccgcatgatctctaaccaccacagacatcgtcttatccccaagccgactcccggtccttcaccgcaaattctctcccggcatctcgagtcacctacacatagaacaaacaaagaaaccatattccgagaccaagctatccccaacttgactcattagtagcaaacgacagtattacatacgcatagtgtccatctagaagtcataatcatgaaacaatcacgcatatccaaacaaacaacccgaaaccgaaaccgacacagagtcggccggtcagaccacgggctgtgccggtctgaccgcgcaatacacgccggtctgaccggcagcacctgcccagtctgaccgaaccacatccagcagtactgtagattcacatgtgaactccaatcatctccaaaaccacttcgcaaataaattccaaatatcaaaaacaataatctccaatgccaattgttcatcacagaataataatcaaaaacacctttgattttacagtttcgagtttagttcgagattttggtgaggagtgttgttggtgcactttgtaaacactagttgatgcaataaagtcgaaaagtttcaatctacatcttcgaatttgtcatctaccggtgtttctgggtctcgacagtctaaccacaggtgtgcgcgcggtctgaccagtgggatagcggcggtctgaccgcaggtgttcgggcggtctgaccacaactgcggtcagaccggcgaagctacggtggtctgaccggcgacaggagggcagtttgactggcggcgactggatttaatcatcgacttcgttcgagggtaatctttaattccgcaaaagatttttgggtttttggttttccctaccattcacccccctggtaggtttgtttgatcttttgcgatcctacaccatttgtagcattaaaggaaacgagaaattcttccattatgcaccaaaaggactatttttctctctgcaactataatgctttcaggagagcaggatatctgaagcatgagtcaattgattcttacaatctaatggtctactagaacagaaatattacaacatactctcgcatacaaaattacaatgtctgtcttttcaaatgaaagcactggaccggtaaactcatcaacttcaggacaatataagcaaattgatactcatacattaaaatatgatagctataacatttttatacatgggaataatggtacctcaatctcggctgatagcgaaatcatgccaaataaaaaaaagtgtgtcatggaaataacattggtatgattcctgctaaaagtaatagcatacaaattatgaattctctgataacctgcttggagaattatccatattcaaaccgatacacatgtttcgcatgtcttaccatgtcatgtcaggaatacgctgttcaaaaatgcgtatccagcaactaccccaccttcgttcagtgaggcagccttggttctcatcaaataaccacactggtcatttataatgaccctgtctttgttcctgaaattcagaggccaaaatttgaggtatatccaatacataatatggcttcttacttcagttttacgatttattaccgcaggtaggctccaaaaattccaaattcagaaaccgcattttcccgaatgcatgtgccatctcggactagatagcagagtgatgctggtggaaagatcctctgcattaggatgtaggctgcaagttcattgcttccatccttcttcagacttatcagtgtttcacgcagattgtccccataaatgttgtttcctgaatgaaacacaagagtttctcattagataccaatgcagataatttgaaggcaaagtatataagatagcagggtacctccaccctctctttgtggcttcagaacaaacaattctggtgattcaatagcagacatgactatactgtcattctccaagctccatagccctgcaaagcatttccgaactttttctatgtcggctttgttgtcaagaaacctatagtaggaattgtagtaagttcacacaaaatcagattaactgacatgttaaaaatatgagcctttgttaggcataaaaaactatagattttaaagaatatcatgttccccaatgtaaattacctttcgagcacattttcttttgccaattcttgttgaatctttttggttccaacaagatggtgtgctattgatgggcacttaatagcagaggaacactcaatcaagagtcttgctctccattccttagaaaaaatacagagagaagtgagagataggaaggttaatttctggataagtaaaatgaacggatgaagatgattaataacataccgcttctgaagggtaatcatttggtgtataacctgctctgaagtacacaacagcaactggcaatccatctctacatgagaaaataaatcatgttcgatagtctgaaatcgtgtaacgtgacattatatccaaatttctgcaggagaatccttacattgttagtgtaccgtcaggacggagctctccttctgcatctattgcagccattgttttgcgaattgtcgtcaccccatacgtgaaacgaagttaagggaaactattttttgtttaattgctgggtggatattttggttaaatacatggttaaaccagtaaacactgaagcatttttcagctatcaaatcagctttgcccactcaaggatgtcacaaaattggacagttacaaaatttcagaaatcagcaatagttaacagtttctttgattcttgaaagcacccaaggatatatttctctcaaggcgacagttatccaatattggtcatacatgtacctttcttctggttgaacaaccaccagaactactgaactggatgaccaaaactttagttagtaaagagtagtcatgcataagaaaggtcatgcataacagcttacaacctttgattgttgaactcagcccatgctccagctaatgcttcagcatgctgagcaattgctgtgttcccaacaacactctctggatccaaaccgagctccctctcatgctgcctaatcaggtttctgcacattacatccaggttgttctttgttatataaattttggtgtcagtaatttattatacaataatacaataaaagtgggcaaaaggataaatagcatgccaagaatacaacttaagttgccaaacttattaaactacttcgatatattaaattaaatttctttctgcatgcaaaatcgagcaaactggctggtctatatatacatatttgaagtcatgacgcctaaaaatcatagaataatctgggaaaatatgtattggaaacttaaaaactaccataagattacaaaaatggacttctgagatttatccatcacaaatctcaaatgttcatttttgaatgctacaggagtttctaggttttccctaaatatatggtttatactatatattttccatataacccatgggtgcataagaaatgaggaagctactttttcatgactctgaacttccaatcttaacgatgtgtccagattctgttcagggcagcaaacttatatttcaatgttttagcttgtctgaaaaatgtgtgaatgcatggttaataagaagaatcaaatacatttggtgtccatctgtgttttagcttgtctaacctgtgaagttcacatacaccgcaagcaagaccgttggatgatgttgaaatggtgttgagttcaacttgaagaagctggtcagtggccccatcaatcatgtaatctgacctagtaagacccaacctaacatcctgaaagatataatacagttcaattttttttttcaaaaaaattaataaaatcaatgctataataattatcagagtgttgaattcctcattgattagtatatttcaaaataagctgcgtggtcacctctttcttgtttagtttcatcatctttgcatggatatcaagaagccttccagtgaatgaatccacctctttcgttctggaaaatgataaactaaaactgttacaagaataacacgatgaaaacacaaagtactcaagaattgaaaccgatggttcagaacttcaagactagggtaatctgtagtttctaaataatgtagttataacttttttggtgaacttaggtaatataatttttttgttagtatggtttttcccgagagtttgaaaacatataattttatttatgtcaattatttaagaaatcaccttgccaaagtctcctgcaaaaaatccccatccaaactaacacgatcaacaagctcattgaaaaggggagccaattcaaccgcctgatcccagtaaactttcgaaaatgacattggcagtagagcaaatggggcatggagcaaaccaacaccgggagcttttcctgatctctgcagatcacgagatgtacctatgagtgaatttcttcttgacacgatgaaaaaaactatgtgcatttcaattccagagttgcaattcataaaaatgatataaaaatcaaactacaggtaaataaaacaacagctaattaagaactagaaaaatactcagagacgatagcattgaaaatgactttcattgccagtggtaaatccaagaaatgaaatcaggggctgtaaagaagcaacttaaatgatgttacaaattctgatggattatcatcaaattacataaattaaactgatttcttgtattagagggatattcaaatggacatgttacataccactccagctagcgcaaaaaaggtagaaggttggaacttatggtgtgtttaagaggaggggaaaggagaaaattgagaagacacgtaaagtactaaacctactatatatatttattttgatagtatatttattttctatttgtaatactgctacatgtttttctataaatttagtggaacttttaaaaatttgttaatgaaaattagtcaacacactttacattatgaaatggaggagtagaagatgaatatattttttgcttttgatgtcaatctagcctagaactgctgggaaagtttgcccaatgaggctctaccgcgatgacaagaacgaagcccacgcttaaaagctttgtattaagcttggcaaaaactaggtaaaccaaataacgagcattgccttggtgggctacagcccaaattaaatgaggctgggggctggctagatatagataaggaggtggttaaggatcaaatcagacttctttttttttttcatgttgaagacttctttttaagacggctagttaattagtcactttcgtcctttctatttctgtcaacagtgaaagcagctgcttgtatgaaccacgcatgtgctcttgcttttgtgatatgggtgggccatactccaactgttttgagtcctgagtatatatctattttatttttatgatgtggctaatactgatccctacgtcctaatataaatgcacctaaggttgaatgtggtatttcatattacaataaatatggacagtccaatcctagatgcacttattttaggattgagggagtaaccaataagctgatttataagtaaaaaaaaccaatcataaacaaacaaacaacattttatttagatttttaaatccataaaccactcttatcctgttaagccaagcgctaggaatgttgtttaattatgtgaagacgaggtaggactcctctacaaaggcttaaaagccaatgacttttataaatcatataagccaaaaatcgaattaaaacaaagagggcttaagtgtgctactaataatacaaaggcctttgggattggtttttgctggacatcttttacagtttgttactgtatttattttaagtggttttttaccaatagactcctaacaaaagttttactaaatattgggcataattaagcagaaagtcgtgacacttaattagcgactttatagcaaagttgtcacatggtaaatttcgaacttcagttcctgtttgttctttctcaccgaaagagatcaagttgttccctctataaagaaagggccagtaggcgccactcgtgcagaacgtgttgatttgtttttgcatatttgcatatactatattgtttgaaaggcatgtttatatatattttgtctagtttcgtgcatattggcgaccttcagtcccactatctggtcaccccaaccaaatctggccccacttacataatcagtatggttgagctggctgtttccggttgggtcaattaagatgggacagcatctatatataggatgattggatttgtagtttaattaaatctccaaatagcaaaagtggatgctccacaattattggggaagatataatggtcaaataattgtgataaaatattatatcaataaaataaattgaaaaccctgtataatgtgtcacaggaaattaattagctttggttagaggtaattaattttaatgtcgataactagcactgttgcttgctagttcagtctcgagccccattgcatggttgccctagtaagctaaagcaaagctaaattttaaatttttaaacttaattttgaagttgatttaaagatattttctacgtggttattttttagcatgggtttttatgttgctaagaacacatatatgagcaaccgatgagtgcctcgatttctcgggatcaaaccttcaataatcataatttcttcggacttgccataaacttcgtaggcaaattttggccaatatcaccttaattacttgtgacgagatttcttcattaacttttatgtagttcacacattcaatcgattaaaaaagtgacacaaatttcttttacataatttctacttaagtaaaaatctacagaatgttgcaatttgatgggatacgtatgcatgattttcccagcagctagctagctggttctaccaaatgatatggaataattttaatttttaagcctaggaaaaacccggtaaatttaataggagtatccggtagttgcaattgatgggatacatatgtctttgacgaacactaaagtaaatcttaaaaaaaatcactgaaatatgttcatgttaaaaggacaggaagaatctgcacgaataattcatgtgaaaaatatagtacgtaggtcacacattgagctagtcacttcaccgggtggttcttgtcgccaacgacgaggccgtgctgcgacgaccacaccagcgccttctcgaccagctcatccaccagccgcgccggcgccaccgccagctgcccctgctccgacgaccgccgtccgccgccctccaccttgggcgccgccgtcccgacgggggcggcgcacctcgccggagcgagcagcggtgacggcctcggggcacgggccggccgacgcaccaccacgactggaagaaccctgcaccgcccgagcgaggaggcgaacgatggcgaatgcgccccggaacgggcgccggcgccgcccatggtcaattggcctgttcgatcggagttggtggaggtcgcaaggtttcttgataatatgagaaggtgatgaaaggagcaagctaagctagttataaagggaacgagacttcgacatagactagctcggattagtaaggtcaacgtgttttcccctcaaacttccaacttttccatcacatcaaatatttgacacatgcattgagtattaaatgtagacaaaaaaaaccaactgcacagtttgcttgtaaattgcgagacaaatctttcgagcctaattacgccatgatttgacaatgtggtgctacagtaaacatttgctaatgatggattaattaggcttaatagattcgtctcgcaatttacatgcagaatctgtaatttgttttgttactagtctatatttaataattcaaatgtgtgatcgtatacataaaaaaaaatttatcaaaacaactaaacacggcctaagtatgggtatttgggcacaaagagaaaaactattagcattataataaattaagtttaattattttgaattttttaaaataatttatatgatattttaaagtgtagaaagtttttatatagaatgcaccgattaataattttataaacatgctaataaaatctgtgccttaatcagaccctagtccttgcaaattagaaatcgatcccaaccgttggatgataccgtcggttgaatggtcgacgacattcacgcaccggcagcgtataccactaaagatatgttctgtgtgtctgtggatcaccggtgcctgttgatcgtgacgtgaggttgaggttgtcgaggaaatatccctgtgaaaaacctaaaatgcccgtaaatgaagatactccctcaatcctaaaatataaatatttttataattgaatatggttattagttattaagaaagtaggtaaaattaaatgatgagagattatgattggataagaggagggaaaattgaatggtgaagggttgttattggttaggaagaaaatgttaatgcataagttgttatattttagaataaattttaaaggttagaagtttttctattttaagacggatggagtatatttattaatcactaaggatatatgtgcaattgaaccgtagtcgccagtaccgatttaacaaaaccggcattgatgatgttcctgctccacaaaacactcttgcgctatctagagaagatattagtgccaagtcatattaagaaccggtactttggcggataatcagtgccggttataagaatacccggaactaatgattaaccaatcaatgccggtttaggtggattggagcggggtgccagttttagccgattggagtgggaaggttgacctattgatcggttgattggaaaattcatctgtgaccctgaccatattagggcatgttcaatggtagagacgagtatggtctcttaagcaatacaagattatttagagaccgaatctttacaatagtagagacgacaaagtctctaatcattaactcaaaaaatattccttttgttaatattctttccattttttttaccctcatgcaaccatatttctatattatattgattaagagtcgttgttaagctgttgttatgcatgacaacgatgttttatctctcctctttctatttcttccatgtcaacaagtattccaaattaacatcactaagagaccactattgacaaccattgtatatgcccttagcgctaattacggatatatgaacatactcccttcgtcccaaatatagtaactagaaccggatgggacttattctagtaatatgaatttgggcatgccccttgtcagatttatagtactaggatgtgtcccatccagtcctaggttgctatattctgagatgggtgagtaatttttttatatgtactcagattgtgataaagtttatatgaaaatcgtagctcttaatgagatatataattttatagttgataactttttcatttaaattcttttaggtacttgaatccatgattcaaatatcggttaggaacgctcgtaaggaaaaagatgtgcatgtgagggagggatctctagtttgaattcacaagaattatattcgatttttctaggccacatctgtgttgggtccatttctatcaattatactagttacgaatcagcacaatgtctccacaaaatttttcaagttcaaaacgtctaaggatcgtctttctcaacaacatgtgtagcacaatattatatattagtccagatatactagcaccaaaccttttgtgttcaaaacatccaaggaacatgccatgtgttgccttgctctggcggaacttgaagccatcatcactcccacgacatacccatcaccccttctgttcggagcggataattctgagatagttcggacacggatacatatttttttctcatatatgaatatgaatatggtatcgaagttttcgacagatatgaataataatacgtgtatccgatggatactatttggatatccgctaaaggtatgaaacatatacctcatttctttttaactttagaccttacaaccctaatccacactggattatttaattgaaatcgatccgcactgagtcaactcactcccgttctaaatatgtatccttgagatataatagggttgtttgtttttgttgtgacttataacttaattttgaatttaaagagggggggtgtgggtttgggttgtttccattattttttatttgcctttgggccgaagagtaggagtataaaaaattgtactctcagaacttgtttttcgtatatgtctatggtttataagtcactgttcaaaaaattgctttccgtgaaagcctgttatacaatgtcatgaaaccactaagaaaagtatggcatttctataatccaaatgggaatttcatactctccattgtaccttttctcaacaatcaacagccatttttcaatacattcgtcacaaccatacgcggccattcgctgaaccacacaagagggtttaataaaaatgccaaatcccattgcatatccgatactgtgaaatttgttcacaatgattcttcttaatataaagttccttaaataaaatggtcatgttactgttttgacctttatgataagatggataagaacagtaaatcaatgacatgaaaaataccctttactgtagcgtcaatattcctaggatctgcgaaagaggactccatgctgtagtacttactataccgattttatctaaaataatatgtaagacggtatagtatgtaatgcgacacatcttaatacaacgaatttgaacagtctattcagattcattgtactgtaggatgtatcacatcttgtactaagttttttttttatggacggagggagtagatagttctcctttccgtatatacagtactgcaaagttcattcgtgataaataagaattatatcaatcaatcagtctttccaataactcaatttgcaaaagtaataataatctatgcggcatatgccactagccgtaggccagccactacattcatttgcaagtgaagtcctgtgaatcatcattcacgattcattttctatgattctggagatgatatggaaaagatctttgagtgttagtttatgatacctcatggtacgttaaattataaagtaaaggttgcagtagaaaatgtgatgcctcctggcatacttttaggagtgtaaaaatatagagaattcacatatcatagtcatcttgttttccagcattatgtaaaggaaccagtagacctttaggaccgtaaaaattatgaaaagaaaatggagtgattttgacagcattagtcataaaacggacacagcaagataagaaccacaaaatatttgatgcatagaaaattggatcggtcctacattggaaaggatgacattgtcgttagtatgcattgactaagtttagtagaaaatacaacacatcattttcagcaattgagtaactaaggaaaatatccaattatgtggtgaaatggaactggaaaactgatgaaatatgtgtagctgaccatggattgctgtacccaagtgttcagagattggaatacacaacagcaacatacaaacaactatgtatatgtagagcagcatgaatgaacctgagaaaagggttgcatgggctaagcaagcacatcacacaattctcagagattgagagacacaaaaatgaaatgaatcttgttgaagtaaacaacgtcccgcatcaggatggagaatcttcatcttcaacacccttcatgacaacggagcaaagaacctgctttgagatgtgggactcaagctctcttgacacctctgcaagtctcagatcgaagttgctccggtgtctctgtggtttcggagatggtgaaccggagaatcgtcttcttgggcttgacagccttgctgtcggggatcctgacaaccagctcttggtgaaaacaggaacaatctccttccctgtcatgatgtgctttctctcttggttcagaggacctctctttgtctccaccggtaatggtttcatcggtgaggttgttgttgatggcagcttgttcctgattcgctcacgggcacgctcagcggctgccatagccttctccttgctcatcttgatcaacgtccatgggttgatctggatgtcatctttccttcttgttccatcactgggctcattttcaatcctgatggatagctttcgggtactctgtcatgtatgaaatggtattgtcatcaccaagttagattaactgaaactagtactactggcctagtgctgcaatttgtatgtacttacttcacttaattcatcttttctgcagaagatccttgacagaaaggatggcctttctggtgaatcgaagtcgatactctcatcagacgacgaatcagagtcatcgaaagggtcaaatgcttgtgctgcttctctcatagcaaggatgtaatcatatgtcctcattccctgaagtaacaacagttcacaaaaaaaattagctgacatgatttatatcatctttatcctgcacaaaagtatttgttcagcaaagtgcacacctttctaataagcacaacatggaagaagaagagctgacccagtgctacagtactgtataaggtgaagatcacaaaaaccatctgcccagaatatcataatgaacaatgtagccttatgagtattgtacagcagtaatgatgcgtgcctaattgcttattgagagagatgatatgttcttcttggttacatactgataacgctgcatgtgctccttttgggagcctgatgtgaagcctgtgttccatttccattttcaaccctttgctgtcggtaaagcagcgaacgaagatcgcgattgctgttcctccctcaataacaagctgatacagaagatttgcatgctatttagttgtagtaaaagaaatgatttcttggacatagaaagaaaaatgatgcaagccgagagacaaaaaatattggcatttagcacccaccatgagcaggacaaagaacatgagcagaataaatgatgcatagttccttcttccaatgcaattgttcagccactgtgtgaaaaagatagaaaaactcagtcacttgatcattgaaagatcaaccattgatttgggagtgaaaagaatgcacatagcttgggtgcttaccctgcagtggtgatcaaatccatcaacacagcgatcacaggtcttgcagtgcttgctgcgcaatttcacctgcaattcgtacataatcgtttcagattgtttcatcttgacctctgactgactccacattaatgaatttcacaaaccaaaaacgttgaaattcagttgaatttatcctcttctattct

SEQ ID NO: 15670 - DNA, 5689 bp, Oryza sativa
cagagcagtggacctcgcaatcacagacggggcagtaggagatgtcgtggccggcggcggcgtgcggcgagacgatgtcgtcgaggctggtgaaggcgaaggggagcatggggtcgagctggacgctggagttccactgctcgaggtagctccgccgcacccaccggttcatcacgcggacctccacccgccggagcagccgcacgacgtaccgccacaggatgtacccgtacctcagcctcggcaacctcccccctcctccgccgccgcggcggcctgcgcgggccctcgccagctgccgccgcctcttcatcttcttcgcgtgcgtccggtccgacgggtccaccgccgtgcaccgcacgtagagcgccgccgcgcccgccgcctggtgtttgatcccgtcaccgtcagcaaccaacaacgcgacgcgaggagaagccagccaagaaggttaccgtaccgaggaggagaagagggcgaggagggtgttccccgcgacggtgctgccgaggtacggcccgaggacgacgtagaacgcggcgacgaggacggcgaacaccgccatgcccaccagctgcatcgcatatccaaccacacaccgtcacctcaaagaatccaatccggggggaagaaaggtgggagagaagcggcggggggacctggagagggtggagggggagctgccagccgtggcggcggcgccagcgcggccacgccatcgtcgccgccgccgccgccgtggattcgccgctgcccatcggtggcggtagaaagatctgcggctcgatgcggacgcgtcgttcaactctgctgctgtgtgactcgaacgcgagagtgaagcgaagcggcggtggggttgtctgacaggtggggtaggggaggcagccaacggtcggctcgagccaacggcttttccatccaccgctttgtcgttccccggctgtttgaatttcgaatcggcggttgggcgctcgaggccgagtcctcgagcgcatctgctccgtcggatggcataccgtcggccagatcggaaacaagagtggggcatccactccctagcccccaaggcctattgacctaatgccatcttcggtgtattttcttagtcccataaaaaaacaaatcaaatcaacggcgtcgagttaaattgctactccctccatctatgtttgatagtcatatttcatcttggcacacagaccaatgataagtaattctacttatcatctatttaaacatgctactagtcatttctcgtaaacaagcgattcattaatatttacatttttcaatgcccatgtagccaatcatgtgtggaagaatgaagagtcatgcattaaatccgagaaagtcattaagatgataggttgttggattgaaatatgcctatcaaaaataattttttcagatttggaaatatgactatcaaaagcagatggagggactactgtttaatgaaaaattatagtactaccatattttcgagtggaatcatctgaattggaaattattttattgtctttttctttcttgaaattattctattaatgatgtctgtctattagactctgctccatctgaataagaaatgaaatttttactccctccatcacaaaatataaagaatttaggttggataggacatattatagtactacgaatctagactaagagtttatccagattcgtagtactaggagtaggagtatgtcttagtagtatattttaggatgaagatagtagttcttttttccttgtcattgtgtcccatgatcaatttatacattgtttgtctcgacttgtggtgaatacttcgattgcacattagagttggactatggctaagggtatccatacttcaggccccgttcacaacacacgtaaaaaaaacatttcaaaattaataaactgttgcagtaatactcgagtgaatatttcatgccattttctcggtgtgcacgattcacaggtattatctttgtatcccttatagcaatgtagcaattgcgtgtcgtagaaatatcagaaaattcaataatgttcgcaatcaagtgtgaacatgaacatgataattagctctcatttgaactttccacgtacccgatcaacttgataattgtaattagtaaaacagagtatatttaagctggcttgtgtgctgtacaaataccataaattcaaacaagcatggtgttattgaattctcacatatagagagaattcgactaagcaaagcaagctgccaaaccataaaccaacataaatatttataaaatttaggtatactccgttacagatagcgtttcaggaattcatcaatgcgggtgtactgaacctctgggtacagtatagttgcttcggctccattgtcaccaatgtcaaagtttgttaagcaaccctcgtagaaaatgtggtagaaatgtgttattcccacttgaaaagcaaattgcatatctgcttgcattaaaaaaattgcatatcaatgatagttaggtcaataattgtttgaaattgaaccccatgagtaatggtatttaaaaaaaagaaaatagctaaaagtgcacattatcaatttggtaatcaatggaaaacaacatcattggtggggtgctgaagctgtaattgtacggctccaaccatcaagagcacttaaatcaagtacgtcttggtgttcatgattagatgtgtgtgtatatatatatatatatatatatatatatatatatatatcggtaagcagtttatttttacctttcattggagccaaaaattcttcagcaggtatgtggaatttcgtaagactttttccagagagtttttcccacattgcgatcagctcgttatgagtgaggcaattatcttgtggtcttatgtatattgtcttgttcaaggtgcgaggatcatcgattgatttgattgtatatgttcccacatcatcttcatccacaaaaaacgctgcatataacattgcagcttaattggttagtatagttgaaaatcaaaactgattgtaatattactgaagaatggttttcaatgccctaaattatttcctatagtttcatcaaataatgagtagtgaaaaggaaggtgtacaaattgatgtattattatttttcacagaaaatcatgcaaaaatatcttaataagacatgatattttcactagctagctacacataaaaaacataactatttacaatagagtaaattgcgctagtggtaaacgaacttggcatgtgtatacaatttattacaagaacttaaaaaatgatcgtctgggtgcaacaacttatctacttcgtacgttttctagaaaaaaaatactaccaaagattttgtttgttgatatacacgaatgattcatccaagcgaggatagggtgtttggtaaacatactagtatggctgtatccacatgccattacccaagttgctatactaccagcatgtcggtttttgaatgattcattttttaggtgtttggttttggtatagatgaaattggatgaactctgaaagaaaatattcccctaaaattcagattagcttggtatctcaaaaattggtggaccaattaaacctattttcctctttctctgaacccttaaaaaatagaaccatgtcttttctcatgccgaatggacggttgtgaccatctcatcctaaatttggatgagtccaacccatctcatcccgtcatcaaaccaaacaaatgttaactactctcttcatttcattcatttcatattataagtcgttttgacttttctaatgttaaactccttgaaagtttgactaagttatagaaaaaatatagcaacatatatttatctatacaaatcgattttattgaatctaaattaaattattttgataatgttggaggcatgtcatgagaaccttcggctagactgtcgaaacaactatcaaatcgcgtagccgacaccgaaggacgtaggtcgcaggaaacgccgaaggcgagcgaggggagtacctacgcgaggacggcggcaagcaccttcgccaagcatgtagcaagagggcttcgaaaagacgaagaaggttgagcccctctgtggggccttcgcccagcaagctccgacaaatagcccagtaagggcctctttagagcccatgagccagtaagatgggccataagacaattattaccccctattttaatgctaactaagtcgatttcgagtaaacaatacccctagggttgtaatgggatctaatttttgagaaattaatactccctccattccaaaatataaggcacaaccactcttaatccaaagaccaagaaaataattattatcatcttgtagtttggatcatcctaataaatataatgcatgcatccaataggattagatagtggaggatttaaaaacgtaataatttaatggagaagatgtcatagttaattgcatgcttgcatgtatgccttatattatggaacatataagaaaagtggttgtgccttatattatggaatgaagggagtacgattttactactttactttcaacctgccgagtgaagcatgcctttcggcagaaacatttgtcaatcgataacatatactttctttctttcttttttgaaaatattgctatattttttttataaatttagtccaatctaaccaagtttaaattaaaaaaaatgtcaaagcgacttataaaataaaaaacagaggtagtacattacacctgtacaccaagttcttggaacatgagcgtaatttactctttatagcaagaaaagttaccaaggggaaaaaagatgaatggattaaatggtggagaaacaaaagacgctcatcaggaatcttgtcatgctctaataaattggtacattaaaatatggataaattatatttttaaaatgaaaagtcgatagatgaacagacacgtgcaactgaacatgcctgaggaaaaaaaaggaaatgccaatcatgaaaaattgaaggtaggggatttgcagttttgtaccacagaatctgtatcgaatgggaccactgaccatgattaaaaaaaagctggacgcatgcttggatccaaagataaatctcaattttataaatagagagaaaaataactacaaatctatcttttcaggagaaaaagacaagccatctcctaaaaattaaagcaatgaagcaacaacttagctaactactccctccgtccaaaagaaccaacctcatactcgaagataacacatcatagttcaataaatctagacatactagtataataaatatacttcctctgtcccaaaatataaacatttttagtatagtgacaagtcaaacatttttaactttgaccattaataaaataaataaataaataaataactatcataatatgcaactctttttatttaaaacatcttacttttatatcttacttttatatatattgttgatcaaagtaatatcttggagaccgtaacatagtccaaacatgcttatattttgggatggaaggaatagtatgtctagattcgttgaattaggatatgtcacatcttagtagtaatttttggaacaaggagtaattaacttttttacctttgacgttaccatccccatacacattaactctctctttgggagggaggaaggaggtcagctggctgagattaggacagaagtaagcagcaaagcagttggaa

SEQ ID NO: 15671 - DNA, 15927 bp, Oryza sativa
aaaaaaatcgaacggattagtgttgtttagtaggacgtatgtatctattgaaatcttattgtgctgctcattggaaatggaattgaataacttgtttttatgtctgtcgttttattactatacagaagataaaaccttttactcctgtcgttcacatttattgatttatatcataaagatcagtaaaaattgccataattttactcaagttattatatatatatatatatatatatatatatatatatatatatatatagtaaatttgtttggtgctccatggtgcccgggcaccattgttgaaattgagtatatacccaattcaaatgagtatgaatctttttcaattacttaggtattaacattaaccactttactaactagttcaaagcaagtttgaactgaatttgaacttgtttttgttagattttgattctaggtatatagcatccatacatatatttagctaggtatgtaatcatggattgtgaaataaagttaaatttgagttgttttgttgataggtataggtatgaatcgaattattataactaggtatatactcataatttgaaaattttgaaaaatttgagtgattttttgcatttgataccatggtgcccgggcaccatggtgccccatatgagtgtcctatatatatatatatatatatatatatatatatatatatgtatgtatatatatacataagttataatatatatatatatatataccaaattttttatttttcaagataatggacagaaataagatatacacagccaaatcaagttcttttaattatgtactaatttgtggagctgattgaaaaataaattaccttgacatttccagcttctttgatggcctcgacaagcttgagctggagcatgaggttgtggctgcggaggtggacgccggacatggcggagacgacgacgtccacctgccggaccgcggcgacgaggccatcgtggtcgtcgagcgacgcctcgaggagccgcgcgccttgcgccttgaaggccagcagtatctggagcttgtcgatgtcgaggccgatctccggccggagcaggacgaaggtggggtggccctccgccaagctcgccgccacgatccgccggccgatgtagccggtgccgccgacgatgaggacccggctcttctccatggccatgtatggctctgctcgatctgatgagtcacacaacggacgacgctatcgtgcacttcacaaagcttactgcgatttgtggcctatatgaacgagcgcgtcgtcctgttctactgttgtcgtaccaagggtctcaatcgtactccaataaataatcactgttgactgggtaagggctacttctcggtaaaaagaaacaaaatataagtagtactgaacatgacattgatatatctcagtagaacaaatctgcacagacgatatgtcacatccaggacgatatgtcacatccagtttctagcatcgttgtttgagatggagggagtaggtaaagaacaatgtttgatacatcatcttttcgcttatgtttatacttatcagccaaaatttgaattttgaacctaaaatttggagttgattttggtgttttttaatatttttcagtctttgcttttagatcgctaagaacacgtatataaaagttttattcacaaattattttttatttgtgaatatgctggggccgttggatttgcatggccgatgaggctcttttaacttatataagataaaagtgtgtctatgtgagagtatcactaagtacatcctaaaattttatccccaaacttttagttttacgaatcctaaacaaaatttgaagtgttaaaattttcattcctccaaaagattagctaaaataggcttcctaaatattaaaaggtgggcccctaggaaacttccaaccccaccctcccgcgagatcatgttcgcccgctcgaccctgccctcaccgctcggtcatctctagatctgtaatcacttgctttctcactgattggcagagccaatggctggcctgaaaactctgtttcttttgccacaacaatttgttacataactttctttattatctactgaattttcccctaattgccctaaatactaacatcagagaacaaactaaattgttgctttgcagtaatagaatttgaattacctcatcttttaatagttcctcctaaacacaatcgctaagaaactcgaagagacaagcttttcattctcaatttaatataacagaaagaggaccaagaaccgtaatagctatatctagctagatgcacccaacaaaatttgccacacaaacaaatctgaaaactacaatcatcattagtcactggatggtgaagatgtcctttgctttttctttacacatttacagagcttggatgaatcatgttctgtaaaagatgttgatcaaaggcctttggtcgcccatatcaatgggatcacacgcattgctaaaactatcttcaacacaaagagcttctatcgaataagtgttgtaactacaaaagtaaatgcaaaatttgctacaggacactcaaagattgtggcatttgctgtgagacacccaaaaattgtgtatttgcttgtggacactgtaaaaatatggtaattagctgctggacactcgaggcattattttattattttcggtgaaaacagagagagaaagagtgttgaaagtaccaaaatgcccctgacactgttcttctttcttctctctttcctgcccctgacacgggtcgcgttcttcgctgcaggtggcggcgccatgcgggaggtgctgctcacgcggtgggaggggcgggacgaccaggtgctgctgtacggtctcctcccggcaggggtggaccacggcgagctcatgggcagagcgcggttctgcctgtgcccgaccggtgacaaccagggcgcggccgcggcgagccgccgcgtcgtggaggccatcacggtgggttgctgcgctgtggacagcgccgtctccttcctgcgccgccgtcaccggtgagctccaaggccaaagccttcttcccctcgcgccactgcctctctctctcttccccaattccggccaatgccgtccgttgccgcagcgccacctccacgccatcacagagccccgtgccgtgccaccgggttcgcctccatctcctcttgccgacgccgacgctcgtcgcagcagccatgcgctgtcaccgacgaacgccgccgcgccgccgccatggcagagcacggccagggagccatggctgctctgccttggagccatggccggacctggtcggcttatacaaatggcccacgggcaaaattgtcttttatgaaagtttctctcaccgtttcagccggaaataataaaataatgggaggagtgtccaccagcaaattaccacattttttcggtgtccaagagcaaatacacgatcttcgggtgtctcacagcaaagaccacaatctttaagtgtcctgtagcaaattttgctaaaagtaaattacctcagctttgtctaagcttccaagcctcttcccagttgttagattagttatgactacagacacccgtgcggcgggaggggcggtggctgacggcccatgcggcgggagggcagtggccggtgacacccacgcggcggggcgacgcccgcgcagcgggagtgcggtggccggcgccactgcacggcgtgacgaaggctggacgacggcgcgtggccggagggcggcaggatggcgcgttcggtcggaggacggtgggacgatggctcgcgcggcaggagggcggcgggatgccggcgcgggactgcaggccggtggcgcgcagaggctgctcgcgtggagaggatgcgggagaaggaaaggggattgaaactttagttaggattggcatgggcattttggtattttctaaaaatactaacaatacaacacacggtttgagtaacatatctaacggaaacctatcgggaggggcatggaagggatcaaagcgaaatttcaggggtacacaggggattgggtaaaattcgagggtatagaaggcattaggtgagtttttatggtacacaagggattttctctacattatttgtctgacattgtacttaaatagtttgattatacattagagatggacaacggctaagggtaaccatacttcaggccccgttcacaacacacgaaaaaaaacatttcaacattacacaaactgtacagatatactcgagtgaatatttcatgccattttcacggtctgcacgattcacatatagtatctttgtaccccctatagcattgtcgaagttgcgtatcacagaaatatgagaaaattcaataatgttcgcaaaaaagtctgaacatgaacatgataattaactcatttgaactttccacgtacctgatcaacttgatagtaattagtaaaacagagtatattcgagctgggttgtgaacagtacaaataccatatattcaaacaagcatggtgttattgaattctcatatctagagagaatttgacttagtgaagcaagctgccaaaccgtaaaccaacatgaatatttataaaattttcatatactccgttacagatagcgttttataacttcattaatgcgggtgtactgaacatctgggtagagcagagttgcttcggctccattgtcaccaatgtcgaagtttgttaagcaaccttcgtagaaaatgtggtagaaatgtgttactcccacttgatgagcaaaatctgtatctgcttgcataaaaaattgcatatcaatgataagttaggttaatcattgtttgaaatttaaccccttgagtaatgatattaaaaaaggagcatagccaaaagtgtacattatcaatttggtaatcaaccgaaaacaatatgattggtgtggtgctgaagttgcaggtgtactactccaaccatcaagagtacttaaattaagtcttggtgttcatgattaaataaatatatatatcgataaacagtttatttttacctttcattgaagccaaaaattcatcaccctgtatatggaatttggtaagactttttccagagagtttttcccacatcgcgatcagctcgttctgagtgaggcaattatcttgtggtcttatgtatattgtcttgttcaaggtgcggggatcatcgattgatttgattgtatatgttcccacatcatcttcatccacaaaaaacactggatataacattgcagcttaattggttagtatagttgaaattctaaactgagtgtaatattactaaagaatggttttcaatagccctaacttagttcttatggtttcatcaaataatgagtagtgaaaaggatggtgagtaatgcattattatttttcacagaaaatcatgccaaaaaaatcttaaaaggacatgatattttcactagctagctacagatgaaaaacataattatttacaatagagtacattgcgcttgtgataaacgaacttggcatgtgaatgcaatttatcacgggaacttaaaaaatgatcatgttagtgcaacaacttatctactttgtacgttttgtaaaaaaaaaatactaccattgattttgtttgttgatatgcacacatgattaatctaagcaagggatagggtgttttgttaaaacatattagttttattgtatccacatgccactacccaagttgctatactaccagcacgtggtttttgaatgacttttttttaaggtgtttggttttgggataggtgaaattagattaagaaagaaaatgttcccctaaaatttggattggcttggtctctcaaaaactggtggaacaatgggacctatttttctctttgtcgacatatataccatcacttaaaaaaatagaaccatctcattttatctcgccgaacagatggttgcgaccatctcatcccaaatttggataagtccaacccatctccaaaccaaacaagtgttaactactccattcgttttcatattgtaagtcgttttgaattttttaatgctaaacttcttgaaattagtttcattgaatataaattaattatattttataatttccttttttaaattgaaaatattgccatagttttttataaatctggtcggagcttaaaaaaggttcacttagaaaaaagttaaagcgacttataatataaaatagaggtagtatatcacacccatacagcaagaaaaagttaataagtgaaaaaatgataaatggattaaataatggagaaacaaaagacgttcattaggaatcttgtcctgctctaataaatttgtacattaaaatatcaataaattaatatttttaaatgaaaagtcggtagatgaaatgaactttacgaagtggaaacaaaacgtgcaactaaaaatggctgaaaatgaaaaggaaataccaataatgaagaattgaaaacaggttatttgcagcacagaatctggatcgaatgggaccactgacaatgagaaaaaaaaaagatggacgtacgcttcgatccaaagataaatcaactttgtaaaaagagaagaaaaggtacaaatctaactttccatgagaaaaagacccaaccatctcctgaaaattaaagaaatgaagcaacagtttatagctaagtaattaacttttttacctttgacgttaccatccccgtacacaccaactctctttgggagggaggtgagttttcatctgacagaggttaggactgaatttagctgcaaagcaatttgcagaaacatatgtgtgagggatgtttgcattctcaattgctctccttgtctccatcttctcatcaaactagatgatggggcgcgccaatggcgcgcctcctgtatataacttgttgattattagtgccatgtcatattagtgattagataatacaaaaaagggcatgacagaactgaaggtaaactatgcatcctgatgccacaaactccattagaccattaccaaaaaccttagtaagccatatattggcagcactacaaagctggttccagagcagtagcttcaggcattgacaaggctgatgctgcctcggaatgtgtcacatctccaccatggactctcttctgcaggctctccaagctggtggcgcctcacatcgacggcgaccttgaggccattgccgcactgggcacaggaattgcttcatctgggaggctgcagtttgcctagtcgtcttcgatgagagcaacagaagctgcgtcagatacacccgaggaaaagggcgtgctgcttgcaggcatttctgtgaacaattgaagtcctattccagttactgtcctcacgccttaatctgctatattcacctgaacacaaaagtgctccatgacaacgtaaacaatatgaaatcatgagatttaacaacaaccacaacttacaataatataaatacttcttgaaaagaacaataatataaatcagtgtctgaattgtacctccaatagagatatatttcaataaacattattcagaaggcaagttatgttttggagacagaataagcttatatacaaagggatagaacaataggttcaggttgttcctttcaatatctccctgtgtactgttgttggaaacaggattgaaaattctagactaccaataggcctactttgcagcaacagtcatcattgtactgaatgctttgaaaaaaagaacaccttaccatgcagatcaaatagagttgtccatatactcacatacggtttgtatgaatgtgcggttgtgccctgtttggactcctcatctgaaggtttttgttcttctcaagagataaaagttcttccataggcagcaaaccatagacgccgagaacagtgttattcttaacaacaaaactaaaacaagaaaatacaaaaatacacgactaatctcttctgttccacatatagaagaaccagaaaaacaaaactatttaagcattttaattattgaaagaatactatttaagtggatagcttcaggactataatcaacaaattcatagcccttcaatgggaataaataagtgctggatgtagtcaaatgctcataacaacaataacaaaaaatacctttcttctcatagtgttcacgtcatctcaaagattgccattttctatcgtagactgcttatatttctgagtcatctcagccaggcacttttgcagagatgcattctcagatcttaactggaagacctggatgatagtgcagtaattagaattgccttcccagttacaccataagtaaacaaaatttaaatgatatttattgagtaatccatttcctcagttcccacagtaaatttccttgtgtcaaacatgtagaatcaagcaagcagcaagtgaaaaatgccgaaggcctgagcttattggacatggactcaaatcattcataaaactaattgaatcaagttacatgaagataaggtggaggggtatgacgattgctatcaaaatctgaaccagagaatccagcattaggttactttcaacctaggctgatgcacaactggttcatcagtcattgcaccagcgtcctatatcctccacccgaagagttgcaagcaacaaactaatatatagaggagcagtcagtagaaagttacatctaaagaacatgaaaagatacatgctcatgcaagtcataagttacgtctaaagaacatgaaaagatacatgctcatgcaagtcatactgcctcgacgttagctcattcaacatcatacttcacaacataccggtatctactatttgtcttcacgctatatgatcttatctcctaattttctcatatgaatcaagcatcccaaatccatcaggtattgaattagtactaacaactaacagtacatacatagtatatactctaatgttacttttgaccgctgaaaagtgcaatcaccatgagatcctctaaattaagctgtcctaaccaataaaaaagcagagatcattgaaacagataagggattataaacaacaaaatgaatatataaaaatattatttgtttaaaacaagtacataatgatgagtcaaagttgagcattcacatttctgtcaacctcccattagaataggaaattccatcctagttgcttttagtttctccacataaagtttctctccacataaagaattatttctgacagttagtttttttctccaaaatgtcttgcagttgaaaatgcagcaataaaataatttaaaaaacatgcatctaatacaagagacacgcaaacaacagatagaatagggaaaaaatgatatttgttaaatcccacaatcattgaagagctgcttacagtgggttgggatcaattaaaacatgtcaaaggcaaaatcctatttaacccatcgcagaagcatggtgttcaaatagaaataatgaatttgcaatatcagaaaagacgagatgagttacaaactactcacaaagttggtaaggaagtgcacacgatgcaacatcagcaattgcaaaataccactcacgatcatcaccaaggaggcctagattttgataagcaacttgatatttaaatggtccatttgcggagaactcaatatggtttgttccagtaagttgatctctattcataaatctgtaagttgtcaaaataaacagaaccattaattgtgatgtaccttactaagtccatttgatatccagtttttatgtcatcagacaactcacaaggtggttagggatgttactattggaaacccatcacccggtgctggtgagctcatgaagttattcttgcttaggtccctgtaaaaggggagaaattttaccacaactcaaagaatcattaaccttaaattttcctatattacaaactttggttcatcaaaattgtaaaccctggacatgattgctagagtaaatgagtaatgaaatatcacaacaaatgtgcagttgctacaactaacctgtcataacggtggacaggcatctctggtatagatggggtagttccaaacgacgactatagaggacaaatcacgagtcgaaattgactctaacaaagtggttatcccttgctttcactaaatcatgcaccattgggaaggcgcctacaccaccggtgcactaattagttggttaagaaagcatgcttggaacatctaacaattttgcatacattatgctccctttactcccaaaatatagcaacttctggctatgtatcttgacaaaacattatagagtcaactccctctcctttgtcccaaaagttgtaatgttttcagatggagatatatagtattatacagcaacaaattacacatattgtaaatgaggactaaaagtgaataaaaagaattgagtcatagcatatgagcaatgaggaaaatattttgcagcccagcattgatcatgattagttgtcatcgacagaagatatatatgaaagaacgaaatctatcagttgtcaagtgtaaggaaaatcatgaacagtgcatgatctgttctttgacacttggttcttaatttctgaaatgttaaataatgcagttaaacaattaagtactggattatatcaaagtactttactaactacctcatcaaacatgtcacaaagcttgttcttcttaatctggagctcgtaccactctgacgtggacatctcggtagctgataaaagaaaaaaaaaggcagaaaaataactatcctctatcatttttctcaaacaaataaaagagagcagagaattgtcatacttatcaataatcactctggtactactgaagcctgaactcacattgcctattgagacaaaatttggtttgatgtcatacatatcacaccgaaacatggttcccattcttccaaatgctataatgacctataaatgaataatgatataataaattttacaccaagtaaatattgcaccattcagaatctctctaccagaaagaaatattcgagtacctcatatgatattaacaatatgtcatcttaaggacaaaccaatggcgcgcctcctgtatataattcgattgatgacataacttaaaggtacatcgatctcttaaaaacatcatttttaagatattcagaatagccagtgcacccttagcaagcaaatttttcaccaatttcctcatttgtcgcgtaacacaatactcagtgtaccctaagctaaatttggatttgtcaataatcataagtatattccttaaattgcaaaataaatgtcaaaaaaagaagataaccgaatatttaactgaagatataaaaagaactgcttcaatccaaggagctaaaacattttccctttcagaactctagaaaattgcttccatccatggatataaatctttcatgtgtcatgtccagctaagatatggcagcatacaaaaaaacgcaatttatcatttcttagatagcataaaaggaataaaggcttcttaatgtatataacataacatactaatgcttgttttaactgcagttgactccattaattcaataaacaatgtgtgatagggtcgaatgattccatgtctattagtttggctaggaaactcccatctgacgcaagcaccattgtactgctaagatttgggacatatttttggaaaattttaacacaaacagtcagaagcaaccggttaaattacagcattgaaaaaaaaggaaaatgcttctaaaatgaaggcatgcatgccctcacatcagatagggcaatcaatgataattcaatgggtttgtgagatccaaaatacagttacaacatatttaaacttagtaagataagcatggctgaaacatgataacaattcagttcaataaaagtgagcgcacttcacaaaattgatcataaaaactaaaaaaaatatataaatctttcaacattgaagcttttctttcattgacaaattgcatatttaggacccgggaattccaaacaaacaaaataaagcatgaaagtgtgcaatgaacatgtagccaatgttttatgaatataattacctaatttttgtaacactttatttatccaaaagtgcaagtggttagttgaagctaaaactataaatacaaatctttgttaggtacaatagcaaaacacttgacatcttcctgtaaatgtttttatcctagactatatatgatttgtgaagacacaaagcaaaatttgtagtgtctacactattattagtcatagatgttgtgatgtgagtttgcataaatatgtcacatgtcatgcaccgctgataacaacataaagagaaagatgtaaatttgaaaaatgtttaaattctcaatggcaccatacatcatgagaggtaattggtagaactaatatgaacctgacatcagcccatgggttaaatggctaaacatcatccaagtttttacaactaaagttgtatacatgtccaagtagaaatatccttattcttgatctgtgtaaattcaacaactatagaaaaggacttttgtccacattttggtcagtaaatacttatggctaatggctagtcctaatcacgggtttggcatcagaaaatgaacatgcttactatatttcctaggtggaaatatggatctttttccccaccaagaagataggtttgaaatacaaagtatactatatggacaaaacattattggagaaacaattgtaagagcaaagaattcaattaccttggccccaagaaccgccatgatactatcagcagcacatggcatgttgttgatccaaaccaacacaaatggaccatcaagagatcttcactctgatccttaaaactcaacagaaagaccttgataagaacacaaatactttccattttgtttttgacattttacagtgcaattcttgagttggttgatggcatatccatacaccttgttgcctagggcagcaatgaagagaagactcccataatattttctcagtttattatgcgaaccaaagcctgaaacagtgcaagagtattctaaggattgaagaaaccattttccaacaaatattcagatattcttgaacttcctgctgagcaatcacattatttgttgtaactaacacgtctagaatatgagtaatgttgagaaaattgagaacaaccccagggaaataatagtaagcaatttttaggtgaaggctaaaggagtaagttcatagctaaaaattttgcctaagcttgcatatacaccatattgttaaatacatttttatccctgaggcctacacactacatatttgcatgtatggcaaaaaggtgcatgaagacaggtaatccaccaatgacaggtgattgagtcaatttcgaagagaatcaagctcccaaaggaatatataaaccacagctttacaaataacgcaaagattcatgagccacagcaaaatagcactcggcttgattaaaagaattaagaattacacgccttataaatataggattatctattccatgatagtcttgtgtgtctttcttcagaataatggtactacactgaaatagaaaggaaaggaaagcatcttgattctactctaattccgatgctatgtttaaaagagggcatgattatctaccattccagcaacttctgcctatgacatgctaaaacacttaataataccttcacagagtagaaattataaatatatttacttcttgtatgtcctacctacaaataatgcctactcttatccggacacacaatatccccatattgtccaagccaagaataaataatcaataggttagttaaaaggagtgtcagcctactgcgttaaaccaccaaaaatgaaaaatctatagtgcaatcaaaaggatcttacaccactgatgggacaatgcgtagcaagtccaagttcgattatatccgctccattaatttttcaccaatcaaagccaaatattcacctgcaaagggtcaatggtgaaatacacaagttgaataaaagactcaggtatcacaaagaaaaggtgggaagggatatcaattatttttggaatccaactaaagggaaaactggatagcaaccaacatgcccggtcagatggaacaaataaaatgaggaaacaacaccagggcgcattaggaaacaatagtagggagaaatgatacatatccgatccccacaaatcttgcacatgagcagactacttggtcatagccaatggtgccttggccaatatggaatgcataagaaaaacaccataactacaaataatttgcagcttttcagaacagaggtttctgtgcaaggaactctatagaaggtgatagcgataatctaatgagttaaaaaggagtgagatgaattagattatattttgcgaggattgacccttattgagcaaaaagcccaaaagtacacaaataatttaagaaaaagagcagcttgcaatgaatggaccagactaccaatatatcatagcactatagatcatgttgtcttaacacacaggtacctcatctccaatagctattttctgaaatccgagaccaagaatgtcatcgaattttgcaaccatgaaagtatatggcttggctcctttataacttcaatgaattcctaaagcggtgaagcaattcctaaagcggtgaagcaacagtgctaaaatattttggagtatatgatcagagatagtcagtgactgagatatatagtgcatacctgatctttcacaaccagatcacctactgtaacactatcctcgttgaaaaacccatcaactgaaccagtgccatattgaatggcagctggttttcctggagggatcaaacaacagaaaacaggtctgtaatccaaatttgtgatataaaatgattttccctttcatcttaaataactaaacaattcataaggactaacagtataactgccaagcaaatgtgtaattttcaatgcatatctgcaaatcaaatatatatctttttggtagattattttatagaaaaactttaacttgaacaaaaccacttagcttcaacctcctaatttgattcacactgtaatccaaataacataccatctagcatcatttcgaccaaatgcaattttgctttaaaaggttacatttcaacatgacatataagatatcccaccagttgtagagtaaataacaaaaaaaaaatacaggaggaagttttcagtgcattcaagtagtagtatatacagataggcagacagttgcaaactcacaacacaaatgcacggtttgggaaagttttaagacacggaccattcttgcgataagtgcttggctgctcggacttgtagcgagtggaaaaagcacgcgatctgcatcaatcgtcaccaggaaaaatccatcattagcacaactgcacaagtcacaacacagagcatgcatttcaacaaacacttgtagggcaatgagtgattagcatcacctcactcagcagagggtggagtcagtctagcgcagaaggatgacgttgcacagtgctgacggcgagtccgtggtactggcaacctcacatagaaggaacagcatgtcagcgaaccaaagggcaaaggctgcagcactccatcgtcgatggcccggcttagctcgaaggctgttaccacatctgcatccatccagtacgtctgtaggaacctcagtgacacaccaccaagcagtttgcactatacaaaaatctaaatagaaaaaaaagaacttcaacaagctcagtaatatgacatgaaagcaactaatcagcttatctcaggaaaaaaggggaaaacactcacgcccttcttgaagctcgacttggtgtcttgatggcagcggcaagaaagcaacataggtggtcagattccttagcatcgacctgggacgaacagaccttggggcccttgtagaagagcagatatggcgctcatcgaactgcctcaccgtcggtcatcatctccgccccgagctccacccg

SEQ ID NO: 15672 - DNA, 10168 bp, Oryza sativa
catgttcttttaattaattatgtattaatttgttgagcagatagaaaatttaccttgacatttccagcttctttgatggccttgacgagcttgagctgcagcaagatgttgtggctgcggtggtggacgccggacatggcggagacgacgacgtccacctgccggacggcggcgacgaggccatcgtggtcgtcgagcgacgcctcgaggagccgcgcgccctgcgccttgaaggccagcagtatctggagcttgtcgatgttgaggccgatctccggccgcagcaggacgaaggtggggtggccctccgccaagctcgccgcaacgatccgccggccgatgtagccgctgccgccgacgatgaggacccggctcttctccatggccatggctcccagctctgatgagtgccacaactgaccacgctaccgtgcagtcgactcgacaaagctttactgccgattgcggcctatatgtattagcgtgtggtcctgttgtcgtaccaactgtgtcagcgattataatttatcaatctgactgtggtagagaggtttgggggtacgtaaataacaaagcttgaatctgttggtttggatcggcttgtttcagctccgcgttcatataaaagtactgccccctaatactgttaggatgcgataagcaagcaaacgtaaaaaacaatagatcaatcacagaagacacgagatttaacgtggaaaaccctcccaaagcagaagagaaaaaaccacggacgccagccagcaaaatatctttactatatctggggtgaggttacaatgccgcacggcggtttacaagaggtatatatatggtggaaccctaaaagggatgacgatccgtacgctccggcccaagcctccctgcgacgggcgtccgctccactacggcagaagctagcctttattaagtgcaaatgaatttggatcacaactcaacaaatacaccattatagtatttctactatacacgcttaagaatcaccctattctaatgtcaagttacaatcacaattcacaagtaggagctaaaacatgatgggtattttcctcccacacgcccgtccatattaattcgggataaaaaaaatagatacttaggggtatatatattcagatatatatgcgagtcgaatctgggtattttttcaatgcataagtgatcgggttagaaaagatgatacccaatggataaagaggatgtgataaaacatacggataatacctgctaagctattcgggtattagccggatagcgggcccaatagcaaccatagcacatctgcacatatatagcttcaagtctaccctaattaaacaaaatactaaaaggcctaaaaggcacactcctcaaggctctagcagtccaggcagcaaaaattttcacaatttgaccctttgcaaaaactatttttacaaataaatcgccaccaaaacttatttaaaaaatgacccttttttcagcgtcaaatcacctagtgctgaatttagacacctcagcgccacgtcaactggcgctgaatgccgtgccaccgcaaatgggagactaagtcagcttgccaactcatattcagcaccacgctatttagcgctgaggtgtctaatttcagcgccacataatttggcgctgaacataagggtcatttttgaaataagttttggcggcggttcatttgtaataatagtttttgcaaagtgtcaaattgtgaaaatttttggtccaggcagtggcaaaactctgcctagtgatgctgttgttttggtatctatactatctatatagttgataaccactaactactaaaactaatcatgcaagtgtgtcacatgatcatccactagcaattattattaagagtattttaaatcgtatataagtgtgccacatcatcacccactagtaattattatctagagtattttaaatatcatgcaaacataacatatcattcataattttattgtatttttagagctcaatatgtaaataatgtcaaatcattatcttacattatttaaacatatacatctaccatttctataatatataacatgcattcattcacatatcccgtagcaaagagcagagtatcaactagttattagacattagtatgccctaagctcttaacaagttagcatagctttggtccatgtggcataggtcgttgctttaactcagtatccgaataagtattccagtcgaatagtatttgcatctgtcttagtacgtattcgctgccgatgatatttgtgtttgtatttatacccgatactatccgtatccgtcctaattttaattacggttagaatatgggaagggtaaaatccaacccaacccaatttctcccgtcatcacgagggctgaatcctcaccctcgcgacacgactatggcgattactacggaaacagtttcgacaaaaggctatgtggcccacctctatccaggtgtgtgcgcgtggaaaatgaccatttttgtgtatggggcacttagccgagtggggaaatagattattcccgacagaccgcttaagatatctgattgcgataataaagtttgcaggcttctacgttaagcggtccacctaggatgatgtttttcccatgcggccatgccaaattagggcctcctgagaagatgcttcttagatatatatatttctcagctatttttaatcaaaatatttttttaactgaaatttcccagttttatattggcacaattctgtagtattactatagactctagtacttgtcaatatataaatattgaatatgtacaagacatataaatattgttttgtgaacttgattacaaattatcattctcagaccgcgtaatagtaaagtttcattacatgtgttttctttcccactatataaacagaagataaactttttactcatacgtgcacaaatttatatcagtttgtcctaagtttattcaatttatgatatatatcgagttcttttaattaatgtttttaataataaatagaaatacggtctctatatacaaccaaattaaaatcaagttttcttaaattatttactaaatggtcgtgtttctagaaaacaaattacatttccagattctttgatggcctccacgagcttcagctggaacatgaggttgtgtctgcagaagtggacgcgggacatgacatctccggccggagcaggacgtagatgtggtggatccagttcctctctacagcacagcagagaagactgtagctacagcctccacctccgtcgccaccgtcgccgcctgtttgtaccataatttggcttaaaattagtttatctgagcaggccaaattatttagaggagttggtacatttatctagaggtttgctcgagagttctgaaatatatatgtgtgcaggaatttgtgatgccctgcttggatgatttgtgtataatgctgggtgcagcagcaatttatttggtttggacttgtcacatggatgcagcctaggagagatttggcgacggggatcaatgcttgattgatgattaatttgccgagatgtgctgctgttgccgcacgggactggaggactggcattagtagattgcatgagaactatatattccgtttgttaatatttagatggagtcggattctgttagctaatttgttggagtttccatgtacgctcaagcggtgcggctgggggttctggtgctcctataaatattagtgtattaggttagttttgaagggccccgaacaaaattaccaatctattattttcctgttctttactttcatgttattttctattttgtttttatggctaagttctggcatccctagaatttagttaatctttgccgttttgcgctgaaaaacggtcgtgcttctccacgaaagcgagaagattatcctttgctagtttgctcggaaactagtcgttcgtcgtcacgtaagtacgatatttatcctctttgctaatttgcttgtaaattagtcatgtgattccgcgaaagtgaattaatctcgaaatcggtttcactagccgattttgatctatcgattttggcgactctattgtttacaccgcaagtcgttaggtgatcttgtgttggccatgaaaaagcgtcaacaccgccatcgcgtcgccgtgtccaacacctccgcctccctctcccgccgccagtccaccgttcgccgcctccgtttccgaccaccgccgtcgccgtctccatctccgctccgtgtccgcctcgcgccactgccgcctccgctgttaccggccacctcccgtgcggcacgccgttaccgtcgctgagcgcacaacctccgctgctgtcgaccgccttatcgggctgccggcgttcggatccggcgagggggcggtcagatccgtgtcccccgaccacatggaaggggcggcctcgggtggagcagatcgacgctggccacgaaggtgcgagcacggatggagcagttcgagcagccaccgtcgtccctcgaagccacaggtaataaacgagacaagccgcgcttccaggtttgtcgcccgcaccacctctcaacctacttatctccatcaatggagaacccccggaggcggagatcgggcacagggtggaggacctgtgggaggtggcagagccgcagctgtcaccgtccgagaagctcaactcctgcttcgaggacatcgtcgtcgcctccttcccctgcccccttggctcgcaaggtatgtaactaacgcctctccatgctgctctgtgaacgaacatgtttctgcgtattctctgatttgatcagatcactgctacaatagctatttttccgtgcggttgttttgatttttgcgtgcggttgttttgcccgtctggaacattgcgtcttgaaaaatcgtgattttcttgtgcgggtggtgaaaccgcacgcgaaaatccgactttcgcgtgcggctacttacgccgcccacacgggaaaataaaaatccgaaaaaaaaataaattttcaaaaaacacaaaccctaaccctagatccggatccggcaccccaccaccgtgccggccaccaccaccgccggatctgggcgggaggcagccgccgccaccggatctgggcgtggggagggcggcgccgctcccggccgcttcctcgtcgtcgtcgttgtcagccgcgcgcacgttgccggccgtcggctcctcccgctcccggcacacgtcgttggtccgctcctgaccgctgccttgccgtcgtcgttgccgtcgtgagcacgccacttccggccgctgccttgtcatcgtcgtcggccgcgcgcacgctgctcccggccaccgcctcaccgccgtcgtcgtcattgtcggccgggcgcacgctgctcccggccgccgcctcgccgtctttgtcgtcgtcggccacgcgcacacttctcttggctgcctccccacgtccgcccgccgccgcgagccctccgtgcccgccaaccgccgtcgacccctccgccgagagccgcccggaggagaggaggagaaggtgagacagagagaggaaaatgagaggagaggaaagtgagaagatatgggggagagagaggagagaagggggcgggggagagagaagaaaagtccaattttttttgaataggatgcgagggaagtgctattttccctgtgctgttagattaggaggcccgcacgcgaaaatagagttatttttgcttgcgggcctgttaagtgacccgcacacgaaaattgatttttgtgtgcgggtgacgacccggcttcgctccccccatttttccatgcggtccaacttacggatcgcatggaaataaaatggggtggcgtccaggaaaatcaatcacgtagtagtggatgattttagttcttcatgtgaaaactgacgtgaagcatttctgtcttgagttggagtcacctgcttattggctgtttgggaaacaaggacttattccaagtccctatcacatcggatgtttggatactaatttagaatattaaacatagactaattacaaaacccattccataaccttggactaattcgcgagacaaatcttctgagcctaattacgccatgatttgacaatgtgatactacagtaaacttttaataattatggattaattaggcttaaaaaattcatctcgcggattagccctcattataaaattagtttttttattagtctaaatttaatactcccgattagcgtcaaagattcgatgtgacagggactaaaactccccatctaaacggccctagttggatgatgaaatttgctgatggagatggtgaaacaaattaaaacattcggtgttccttgttgaaattgatacagccagttagttaattcattgattgaagaatgcgtttgctgtttctcctgattggattaaactggtggcattagtaccttgtcattattgtgggtctcctgtcctatatatatatgtattttctttcagcttcttgatgtaatggaggtggccactactttatactagtcttttcatttcctttgtgtgattgctggggccatatttgcattcttttctaaagcaaatgcgcatttccacttcgtgcatgtcagtgctgatggcctacatcctacctccagtctgcccaatttttgttctggttgaaaagggtggcactgttttatgcaaccagtgacaatgcaataggggattgtaggacttcagccttatctgaatgatgaagttttgttttagacaaattaagacctgtatgattgagtcaggggggagcatggtgattgctcttgttgaagggtccttttcatttcttagacacgctaaagaagaacctttctcccgtaaaaaaaaaaaacctttctggacttcctttttctttatgccaatatgtcgtatgttattaatatagatatgttctagaaccgtgagggtccatattaccgtctgaaagatcgtattgattaagtctgataattttcaagtccccaccatcctctgttagtaattctcacaaaaacaataactaagtacaggtttatctaaatcatatatgtacaaggaagtgaatatttcaatttaggtggcttggattgattaaactaaaagcagtaaagcaagcaactaattcaaacttaatattattattagggacccttattattattccacttacagtaatgtatctaagagagcaatatatttagctttattcaaccatatgttatgaacatcaccaacagaaagtgattcaacggaataataggtaaacatattactcactgaggcatgcgttaataacttgtgtagaagctcggtcattttcagctactcaatgctaagccgttgttgctgattcatcggctatttgtactctctcagccgctcaaggtagtagaaaaaggaatgattcatggagcggtatttatctgaattacttcggatgaaaactctgcctcccttagccattcatcgctcattatggattataactcccggacagtttctcgtagaaacccgagttccataggatcgggaggtgacaaaggaatgagtggtgtcttcttgctaaaatagttcagggtattaccgtagtcttcgtcaatgccgtccctgaacaggattgtggcacgatccggagtctgaatttcttcgttctcgacggacggctgctcaggaaccttctcatcattcgagctagcagaagtggttggttcagcaagtggctcaatcgttagaggttcctctatcttggacacggatgcctctggctggagttcattggactgcgtcatgaaggaagtattttctagaatgcgatccaaaattgttcttccttctgacggcgttttgtgcatgaacgatcctccagtggttatgtccagatagaatgcagactccttatccaaactcgtatggaaatgttggagaaacacatactcaggtaaggacaggattggtccggattgcactaaattagtaaatctggaccaggctgcaccgattgattcattttcgatctgcttaaaactgagaatttctacttgaagggcagtaatacgagtaactggaaagaaggcaagacagaatctgtctcgcaacttttcccaactactgtttacacatccaacggtagaggtgtaccattgctttgctatttcttgaagagagaatgggaacaatttccaccgcacagtttcttgtcttatgccacgaatcttaaggcatgagcagacttgtccaacgtctcgcagatgatggtagggattttctagatcaaagccaataaaaggtttttccctaaccatactgattagttcggggcggatttcatagccagttgtataaatgggctccgatgaaggaggtggctcatagaattcgccttgaggggaagacagctaaaaaagaggttgctcgatggtcgagaagagtttgacaggaatacttctctaggatagcaggcgtagaggtagaataaaaaagcaaaaaggatatgaggatgaacaaggtccggaaataatcagcaaccgttccctggcaacggcgccagaaatgcttgttggtatttcttacgatcacagacaaaatccgtaagcgcacggatataccgatgtagcacttcccctacagagtattccaagggtatcgaatccaagggaacgtgtgtgataagaccttcctccagttcatccaaggacaccaagcaaatgataggccaggatagagaggatttactagtgagaaacagtgtttagggaaagctgaactttaatcctaatgcaatacttcaggcactggcaacacgctattcccagatgtcgctctactacgtacccggatagggaggacttaagtgatcttgagggttgtcaccacctctacacccacctcaaacgtattgtgggatacgcagcaattactggataacaattacctaaacaccacgtctaagcaattactatctactttagtgtttataactcaccaaagcaatcactatattttagttgattatagtgaacaataatcccgtatgctacttaggaactaaccaagagataattctcacaagataaatctaaattactcaagaagaatattatattgaattcagagtaataaacagaataaaagaaataggagaagattaccgacaactccggaattcttccgactccttctactctactctcttcctattctagtatacaatatagtacaatagagcctcttataattcagctcaagctcgaaagtgtgtgtgtgaagtgagggagtgatgtctttatataggggtaggtatgacggttggcgaagaggaaatgtccgaaatgccccgcaaccgccattaggagatgatcaggatcgtccacgccaaaccccagcctggatggctgagattgtggttcggccgaactagggggttcggccgaacctgggctgggcccatctggcctggcctttagcccatgttctcccctggtcctcctctattcattcttcggtattttgggctgattcactgatgttttgatgaagttcacaacccatccttgtatggagacagaattctcctcacttaagtctagatttcctcccaacatcgaggtttatcaccagcatataaatatataccaacatttgtggaatatgtgagatttaagcacctatcactatattggatgttttattatccaaactttatgcagatgttggcggtatagaatcggcatttaacagctgccaacaccaaccctgttaacgaccaaatttggtaatctgagtatcaaggatagagatcagatcgaagcggatcaaatcaactggcacgctcacacacccaaaggcatgttttggacctgcactggagttaagcagatctctcagtcctcgtgttttacatcaacaaaccctagccgccttcgtgtgcctctcctccttcccctcgtcccgtgccctcctctccttctcacgtcgccgtcgcctcctcctcgcgccgccaccatcgcgtccccatactcatcgcctccgtctccacctccgtcgctgccgtcgtgtcgccgtgtccgacacctacgccttcctctcccgccgccgtcaccaccagtccaccattcaccgcctccgtttccgactgccaccgtcgctgtctccatctccgctc

SEQ ID NO: 15673 - DNA, 19367 bp, Oryza sativa
agagagagagagaggaaaatgagagaggaggaaagtgagaagataagggggagagagagaggagagaagggggcggggggagagagaagaaaagtccaaattttttttaatattatgggagggaagtgctattttcctgcgcttttagattaggaggctcgcacgtgaaaatagagttatttttgcgtgcgggcctgttaagtgacccacacacgaaaatcgcgggtgatgacccggcttcgctcctcctatttttccgtgcagtccaacttacggaccacatggaaacaaaatggggtgacgtccaggaaaatcaatcatgtagtagtgaatgattttagttcttcatgtgaaagctgacatgaagcatttctgtcttgagttggagtcaccggtttagttcagttgggtgatgaaatttgctgatggagatggtgaaacaaattaaaacattcggtgttccatgttggaattgatacagccagttagttaattcattgattgaagaatgcgtttgctgtttctcctgattggattaaactggtgacattagtaccttgtcattgttatgggtttcctgtcctatgtttatacattttttttcagcttcttgatgtaatggaggtggccactactttatattagtcttttcatttcctttgtgtgattgctggggccatattagcattcttttctaaagcaaatgcgcatttccacttcgtgcatgttagtgctgatggcctacatcctacctccagtctgcccaatttttgttcttgacaggttgaaaaaggtggcactgttttatgcaaccagtgacaatgcaataggggatagtaggacttcagccttatctgtatgatgaagttttgttttagacaaagcctgtatgattgagtcagggggagcatggtgattgctcttgttgaagagtccttttcatttctgagacacgctaaagaagaatctttctcccgtcaaaaaaaaaaacctttctggacttcctttttctttatgccaatatgtcgtatgttattaatatagatatctgcttagtgacaagtgccttcgctctcatgattccaagatatgttctagaaccgtgagggtccatattaccgtctgatttcttaattgtgataattgctataggactgagcagcaagttatttgggaaaatagaacctgtttagacttgtccttggattaatttggtacgtcattatatgccccttggacatgaaagatcgtattgatcaagtctgataattttcaagtccccaccatcctctgttagtaattctcacaaaaacaataactaagtgtgtacaggtttatctaaatcatataggtacaaggaagtgaatatttcaatttaggtggcttggattgattaaattaaaagcagtaaagcaagcaactaattcaaacttaacattattattagggacccttattattattccactcacagtaatgtatctaagagagcaatatatttagctttattcaaccatatgttatgaacatcagcaacagaaagtgattcaacggaatgatagataaacatattactcactgaggcatgcgttaattacttgtgtagaagctcggtcatcttcagctactcaatgctaagctgttgttgctgattcatcagctatgtgtactctctctcagccgctcaaggcagtagcaaaaggagcaagcgcggaagaccagcgattgccagattggtctcactatggaccagatctggtttcttctaagagaaacttcctctgctactgtagacaggtgtttttggcctttatatacatgccacaaaatgatctttactttaatcatgaactcagtgccatgtatgattagttatattgttcaaattatgctttctagaagttaggcaaggtgctttgggaatattttcctccatcgaggaaattaaacttgggtggtgtacatattaaatgattaaactgttaatctataagtttccgttcctatagtttgttagttgctaccatttttcttggtttcttcggttcatcaaattgtctatttcctataaatttcaattctcaccagtcaccgtgtgactgcataacatttctatagttacatagccaactatttaatttcaaatcagcatctagcaaccattcttgatacctagaatttatttgcgatcattctatctgttcactatatggtgcgttacttcactatcatttcttccatttccttttcttttacaattcttttttttttgacaccttcttttacaattcttttgagaacaataaacttgattagtgccctttttttattaaagatgggcatatatctatacatcgttttgtgttttatcataagaaaactaatatgacgacatctcactatcaatcagattttttccttcatacatattctaggatgaaaatttcacaggaagatctcgactgttttgctattatacctagaaaaaattgcatattatagtagtagcttgactatttgattgcttttttggtcaatcagagtgttacaaatatgtaactacactcataatctctatttgccacatatccattgcacaccttccttttttttttttagaattctgaagaaaaaacatgaaatttttcagtgggacatcgccgcattgccaatcatctatcctgattgttaggctaatggtggggcatcaggtataggttcatgttgttaggtgctctcagaccatatacgttctttcatccatttttggttccagccattgttttatacttttgatgctaataatggtcacatatacccatcttcaactcaagcgatgaaaggtgtttacttttgcattgctactgtattttatttagcgctttccactaacagaatatcatcttcacattgacagtcaatttgatttacacacattttctttgctttagtgtaggaaaaaggaaaacataattattacttaattatcctgtaaatttcttacccttcatgcttaatttcgtatcaatctaaattctagggttcttttactctcgctgcattcccatgtaataaacacaaatctgtaatatcgtgttgtatcacttgatataactatcctcattgtgaaatggtgtacatgctggtttttgaatctcaataatttgggttgctttttcacatgattttgttgaccttgctggaagtgaacgagctgcacaaacacatgcagttggcgcaagactgaaagaaggctgccatataaatcgcagcttactgactcttactactgtcatcagggaactaaggtctgattttcttaaaaaagagaaaaaaaaactctgggtctgttatctcttatctgcactaatattataaagtagtcgctgggttacctcattgcactcatgggttagtctcagttctaatgtcatcagactgttatagatcattggatcatatggattagatccttctttacaatttttatgctcttagctggtagatcattggatggttagtatggtcaattatgggttgtatgttaatacggtgccatcaaagcgacactccaagagaagcagtcgagaagtagctagcgatacaagaaagacaccaccaataacaccagccataaagatcgcaaggttaagagcatctccagcaatggaccttattttaaagcccctaaaagttaaatgagggctgcccccatttcttaaggactaaaaaatgtctccaactccagcagtagcccctatttcttagtccctactcatgtttatcttgtattttaaaatacaatccatatacagtacgtttaacaccacaaaaattcgaacacaattatttctaactcacataatataaccatacttaaattcactatttcaaacactacaattcgaattcaaaattaaaatttttaaacatgtaaatatggtatgggtacagtgccatatacaacaacaagatgcaaccaagattcgtaattcaccaatgaaaatgaaaattcaccaagtttccttccatctctcttctttcaatttcgcttctttctctttagcgtcaagcaaatctttcatcgcctctttgtatggtccatcttctcctccgttcttcaacttctcctttgcttgcttcctacctattggtctctttttagcactcggctgagataaatcaggagctgtactcttgctagcatcatctccttcatcttcttcaccagctctgtcaattggggtcgaagacttcctagaccgtggcctcttgtgggattctagtgtttgaaactttggagaattcctcaacttgtgctaacaatgattaaactgaaatgccctattctttggtgcattggacgagtataatgcctcagcttcaagaacttgcaacataatttaagttttagttcacatacatacaagattgttattaataataataaataaacaatttaacttacaagctcttgatgtggtatgccactgggatgtcgacgctcaatttgattgtagcaaccctgaaacttgcttacttccttctgaatgttaccccaacggtgctcaagagagtttgcattcctatcagactcaaaatcacggttagcatggtagtgctctgcgatcctctgccaatatgccttccctagttgctcattaccaataataggatctgagctaatgctctgccatgaaatgcacaattgaatgtcctccttatgagcatagttgcttgatcttttggcacttccttttgcaccatttgttgaagtatgaaggtcttcatttggcattagcacttcgacatcagtatccttggacatcatgcgcacaaaggaatcacctccacttgtcattgcaatctagtcactgcaataaatatataaattgacaacatttccaatctatctcagaaacatcaacaaatgattgtaatgtacatcaggttatactgtttgcaatatgtatttttttagataataatatgtatttatttagcatatatattggttccgcagtactaaggactcagtgcaaacacaaatttatttcttcaatattatatatgctccacaagattagctctctgacatagaacaagacactgcatataaaatatgaatgatgacaatgtacattttgctatgcgaatgattttgatgggcctagacgcctagtaagcccataaagatcacaatcaaacaaggagactcagacatacgaaactgaactttactattgtgatttgttttaatcaccatcatctctgaatttttttactgcagcatgtgtgcagccggtgatagatagctgtcgatggtcggcgctaggccttgtggacagcgggtgagcagctagttcggggacaacgtcgagactcacctaggcgtgatcaatctgtgacgacgcgcgttggccggagatgcaaggaggtcggcgacagtgagtgacggagtaaaaccgatgattgtgatggcttgaggcggcacactgtgggatctcgccaaagtttcttgcagagggatgtcgggtggtcgccggctggagcaaaacgacctggcggcttgctcgctgggaggttgtgggaggatggcgatgatgcgggagggaggatgacgatggcgcgcgatcagaaatttcccccgccaaaaaaaaagaggatggggctgtggggttgagccccccggactgggggctaggagtgatctaggggcctccctagattgggggctctagtagggactctgctggacctatattttttgcatcaactctcaaaacttatttagccacactacgtaccaccacaggatataccagtacctcagcctcggcagactcctacctccgctgccaccacaggtggccggcgcgtgccctcgctcgctagctgccgtcgcctcttcatctttttgtcgtgcgtcctgtccgacgcatccaccttccaccgccgtgtaccgcacgtagagctccggtgctgctgccgcttggtgctcgatggcaaacggcatcgatcccatcggcaaccaataacacgacgcgaggagaagccaagaaggtttaaaggcgacgcgtctgtatgtaccgaggaggaggagagggcgaggagggtgttgccggcaatggtgctgccgaggtatatggcccgacaacaacgtagaaggcggtccattaaaaaaaaacaacgtagaaggcggcgatgaggacagcgaacaccccatgcccaccacctttggaaccatgaaatgagaaccgtgagggcataatccagggatagaaaattcgacgggggaggacggtggcaacttggagggaatggagggggagctgccagctgcctagccgtggcggcggcgccaccgtggccgagccatcgccaccgtggtggattggccgtcgcccattggtgatgccacggtgagatcagcgactcgatgcagatggacacacaccgtcgttgtcaactctgttctactccctccgtcccaaaaaaaaaggcaaaccctgggtttccgtgctaatgtttgactgtctgtcttatatgaaatatttttataattagtatttttattgttgttagatgataaaacatgattaatactttatgcacgacttatctttttaacttttttcataattttttcaaataagacggacgatgaaacattggacacggaaaccagtgtttgtctttttttctgacggagggagtatgtgcaaagcgtttttttttttgggggggggggggggcatgtgaatgtgggggttgtgaggtgtgtctgagaggtggggtaggggacgcagccaacggtcggctccagccattagtattccggctgtttgaatttcgaattggaggtttggggctcgggggcatctggaccgttggatggtatactgtcggccagatcggaaacaaagtggggctttgactccctaggccccagtcctgttctattcacctattccatctatttcattaaaaccaacataaaataaatagaatatgaagttttaatgaatctggacaggcttctcaagtaacggctatatgtggcatatgaaaatatatcgaacatgtgacgcttaaaatcgaaccaacaacaccgtaggcaggagccaaatcggtgtaaggcaaaattaaactatattttcgagttgaatcatctgaataaaattttttttaacattgtccaatggactcaactccatctgaatagaaaatggagaagcttttagttctttttttttctgtcagtgcggcccatcatcaatttatacaattgacaaggactaagatcctgatcttccattagatactagataagtcgattatggagactcaacattgatgatcgaacctctcgcaaccattgcaccacgattatggagactcgacattgatgatcgaacctctcgcaaccattgcaccattcctccgttggttatcgcccgaaccgaaacacagatgacctcgctgataaagctatttcctgcaagcgaatcgagaacacaagcaatagagtagaatatgcaatatgaatatattgcgaatttaagatgaatctcacaagttggggttccacaaaccgatgaagggaaaaactgcaatatcagaataatctaagcaaaaccccccctaatccgatgatgtctactaattaagtaggttctagggtcgacctaggacgtggatgcatccctaatggactccaacacaatacacaacccaacgggcctaaagatggtgacacaacaccctgacaaattctggacgctctcttgtttcgaccatttccgttgactcagaagaaattttgacgtgagacctggcctattggaaagatggtcttattggctttccatataaatgcacggacgtcaataaagaatccgaataaggtctgaccgatgatcttagtgcaaccttctcctggataacgaggtggactcaatatgaattgggcctccacctcctagtctcgtgcgtatctaaagtagtgatgtcctcgtcaacaatacaataacactcaatgaatcaaactatacactacattgcgctgaatggctcgattgtacattagagttggacactgggtatccatacttgaggccccgtctgcaacacagagaaacaaaacacttaaaaaaattgacgtttgtgaatactcgagtgaatattaatttcaagcaattttcacggtttgcacgattcacaaatattatcgttgtaatttgtaaacacattttatagcaatgtaggagttgtgtatagcagaaatatgatataatacaatgttcggaaacaggtctgaacgtgaacatgataattaagtttcatttgaactttccacgtaccccgatcaacttgatggtaaaacagagtatatttgaactggcttgcgtacagtacaaataccatcaagcatggtgttattgaattctcatatctagagagaatttgatttatcgaagcaagctgccaaactgtaaacccaacataattacttataagatttaggtttactccgttagagatagcgtttcaggaattcgtccatgcaggtgtactgaacctctgggtagagcagagttgcttcggcaccatggtccccaatgtcgaagtttgtcaagcaaccgtcatagaaaatgtggtagtaatgtgttactgccacttgaatagcaaaattcaaatctgcttgcatcaaaaattgcttatcaacgacaagttaggttaatactatgatatatgtagtttgaaatttaacccctagagtaatggtattaaagaaacatagttaaaaattggcaatatcaatttgaaaattgatagaaaacagcatcgtttgtggggtggtgttggagttgtagatctacgattccaaccaccaaaaatacttaagtcttggttccatgatatatacatatcaataagcagtttatggttacctttcattgcagccaaaaattcatcgctgggtatgtggactttctcaagacttttccctgtaagttcttcctacttcgctatcagctcgttttgggtgaggcaattatcttgtggtcttatgtagattgtcttgttcaaggtgcgaggatcatcgattgatttgattgtgtatgttccaatatcatcttcatccaaaaaaacgctgcatataatattgcagcttttggttagtatagttgaaattcatcaaaactaatattctgcactctacagtatatgcaatatatgtatactcggacacaattactgttagtaatattactgaagaataatgagtagtgaaaaggtagctatacaaattatttattattatttttttcaaaaaagcatgcaaataccttcataggacatgctatttttcactagctatacactaaaaaaaatcattatttacaacagattaaattgtgctcatggtataggaatctggcatgtggatgcaacaaattggctagttttttgtgtgtgtgtgttttaagaaaagtactccctctacttatacttacgtgctagtttaatgataatacataattcttataggaaaatagatctatttgcaaaacaaacaaaggggatataattatttgacaacaaatttttttaaaaaaactattttttttaaatttgaacccaataaataaataattttggttcataatttctagctaaaactcttacatggattttgtcaaaaaaataaatttgttcaataatttaaattttatttttcaaattttacaatcaataattatgccccatttgatttttatcatgaattataatttttcacattgtgaattatgaagtagatagcatgtaagtatgagaaatgggcgatatggtcattttagaaaaatctaacagtcaaactcatggtcaactaacggaatagggatagaagagatcgaaataaaaactaaagggcatgtagagggtgaggcaaaattcaggggtatagaagaaattgcgaaacttttcagaagtacgtatggaattttctctaaaataaactagtagtcctagtactatataacaccgcccatgtcataaagtaaattatcttgcttatagctgttgtgcaactactgattgccctgaaactatgatttttttcggagaaaactacccatctgtaaacgccaaaatttggtatgcccctaggagaattatctcatcgtaaatagtcggattcgtgctatattcggttaaggaaattaatctatcgaagaaagcttatccacaagtgacagagttcaaggaggatgcggcatggcaagttatctattaattaggaataatttgttagtttccttttatctttagacaagtgtgtttagtgtcctataaagactttatgttttccttttatctttaggaaagtttctttcttatactacaaggactagtatctacccatgggtataaatatatacacccggggtgattgtaaaatatcacacaggtcaataatactcctggcacatcgccaccctcttttctgaggttttacttattcaaccgacagaatttggcacctgacgcggggctgcattggttcagttcgatctccggcgaaggggtaagtcctacgttctgccggcccaggcaattgtatcatctacgtcggctttgttcaaggctgcatcagtacattcaatctcttggattgctctagtttgattgatatatttgcttggctatttatcatatgtcttagttaatctagtcttagtatctcaatttagctctatcggttgtctctcgctttagggtttctgccagtatcagctaaattgttttactagattagattagctaagacatcaaccaccctaaaaatcagccaacggcttgattgtgtatatattatgtttctttacatacttagtgctgcatcaattaagtttgatctactaagttatgtttagaaccataatctctaacctgccttttgactgctaataagggtttcattggggtttcagccgatgagttatctggatgttgctttggcttacaaggattatatacaagttggatttagccgatgggaacaaagatttcattgtttaatctaatcttatggattgtatgatatcggacctccaaccaatgtatgctttaaccttcggatcagtgcttattctatcttgtcattgttagccaattggtctctactaggattatattattgttatatcttattatcactagcagattgtctttatatcattatctacattggacatataggtgattgctcaaaaccctatcgacatcggctggaatcggcatcggctgggactactccattggcttgttagccgatcggctatttgatctattgtttgcatatcttatcagttgcaggatcaaactgattagcacgcccacatatcataaacctttggacctgcactggagctaagcagatctcccaggccaatgtgtgtttttcgcgtcaacacttctttggcacgcctggtgggacgcgaattttgcacccaacatgtttgaggaggaagtcaatgccatggaggggcaatctcctgagccgatggttgaaacatctcaagataaatttaatgaaacagttcatcgtgccttgtttgatcagtctggggttttgatgcatacactacaagatgtgatcaagaagatagttcctgaaatagttgctcaaagaaatcaacttggggggcaaatcggtgaacaacttcagcatcatcagcagcaacaatatcggctcggggggcaagcatatcaatagcagtatgatgagtcatatgaatatcggtcagaggaacttcatcagtatgggcatggtgaagaatatcaatataatgatgatttggccgatagaattgcaaagatgatagaggagcagtttggaatcaaacctaaggaacatacttttgtgtatcggctgccatatcctgagtggtttgatagggttccattgccacaccgatacaaggttctagatttctccaagttttcagggcaagatgatatgtctacaatggaacatcagctgattcttagcacaatgtggagaggcatcggttgaagaaactctaaaagttagattttttccattgtctttgactggatcggccttcacgtgggtttcatcactaccatcagattctatccaaggatgggccgatcttgagaagcaattccacgagtatttctttgctagaatcgatgaattgaagctttcagacttaatatcggttgagcagcaagaaggagaattggctatggaatatattcaaagatttcgtaatgtccgcagccgatgttatggtttgagcctaagtgatgagaaactagcagatctcggattccaaggattatcagcatctataagagagattcttttgccacaagtttggcagcctggctcatctaatgcaaaaagtcctagctcatgaaagccgattgcaagaagcaaaggaagatcagttttggagttatcaagacaagaaataagataattttgaagcatgagttttcatactccaaaactggggggcatgtgttaacgccaaaatttggtaagccccaaggagaatcatcgcatcgccaatagttggattcctactatattcggttaaagaaattaatctatcaaaggaagcttatccagaagtgaccgagtttaaggaggatgcggcatgacaagttatctattaattaggaataatttgttagtttccttttatctttaggaaagtgtgtttagtgtcctataaagttatgttttccttttatctttaggaaagtttctttcttgtcctacaaggactagtatctacccatgggtataaatatgtacaccgggggtcattgtaaaatatcacacagatcaataatactctcggcgcatcgccaccctcttttctgagatttttacttattcaaccggcggaatttggcacctaacgcggggttgcatcagttcagttcgatctccggcgaaggggtaagtcctacattccgccggcctaggcaattgtatcgtctacgtcgacgttgtttaaggctgcatcagtacattcgacctcttggattgctctaattttgttgatatatttgcttggctatttatgatatgtcttagttaatctagtcttagtatctctatttagctctatcggttgtcttttgctttagggtttctaccgatatcggctaaattgttatactagattagattagctaaggcatctaccaccctaaaaatcagttaatggcttgattgtctagatattatgtttcttttcatacttagtgctgcatcagttaagtttgatctacgaagttatgtttagaaccataatctctagcatgctttttgactgctaataagagtttcatcggggtttcagccgatgagttatctggatgttgcattggcttacaaggattatatacaagttggatttaaccgattgcaacaaagattttattgtttaatctaatcttatggattgaatgacatcggacctccagccgatgtatgctttaaccttcggatcagtgcttattctgtcatgtcactgttagccgattggtctctactaggattatattattgttatatcttattatcactagccgattatctttctacattggacatatagccgattgctcaaaaccctatcgacatcggctggaatcggcatcggctgggactactccatcggcttgacagccgatcggctatttgaactattgtttgcatatcttgtcagttgcaggataaaactgactagcacacccgtatatcatcaacctttggacctgcactggagctaagcagatctctccggctagtgtgtgtttttcgcgtcaacatcatcggacatccgatttctaaaaaaaactctcatttatctatttgtaacactggctcgtcaatataaatgctcaattgcacagggcttcatgctaacaatgtctccatatgtatacaactttatatgtctattttagtttgttgttcgagacataaatacactttgcaccaacaatctaatacccctctcttcttaggaaatactcgaaaaaaggcacaggatacaatacaaaataagtgtattctagccgtatgcatcacgcaaattctcccagcaaactccatatgtcatctacatatggcatctagtgttacgtgttcgttacttcatttgcagtccgagataaaatacgccttcgcattcacttttgcgccagaaaatagatatacgcctctctccctcatacacgtataacaacaccgcaaccgcaaaatacgcctagcagttccctttatatagagcagagaaggctttccatgggctctctcttccaacccctcacacaaagcggcgcctccgcacctatgtaaaaaaaaaatcagaggtgaaaacctctcaaaccctaatcccctcgtcccctcatggtagtcactcccgtggaggagcagccacctcccgcggccgacgcatccacattggaagaggctgagcacgccgcggccgcagccaccgagggcgagggcgagcacaagagtgttatgcctgtgccggatgagctactggcaacgaccgaaggaggtgtgccgaactgaagacgtactatgaaaagacgttttcgagtggctatagcgtattgagtctatgcactgatttgtgacactggcttgtggggccaagggttgttgagtcgggtgtgtgttgtataaatcgccagcctgtaggtatgtgacatctatcgaaaaggagaaagaaaaatactacccgtcctctgcttctctctttctttctattgctctgttttcttcttcctccctactactcggttcctatcagatctccggtgagcatcgccaccggtgattggggtcgtaacaattttggtatcagtcacttacggtcctgcttgctccctcgcactctcttgacctttgatcggtaaatcctgtggccgagttggtggtcttccttcgggttgttgccgccgtcattctcgtgtctggttcggttgggttcggaggacgtgacgcaacaacgcccgctaagcagagtgtgtaagttcggcggatggtggtggtagactcgattgaggagtggatgatggctgtgctcacgcagctgatggcgaaggtcgacaacattgacgtcatcaccaagcatttgggggagatcgacgccaagctcgtcactcaaggggagcgcctggatcgggttcaagcgaagatggatctctccatgacatcactggggcaagttcaacaggagcagacacaagtggctcgcgctctgaaggcggacgcggcggctcccgtcgcatcggcaccatctacaccgcctcctcctcaacctccgcatctggcgactccgggggcgtcctcttcgtcttcgccaccaccccctccgcctcccccaccacctcccccacctccgcctccgccgtgcctggttcctcctgttcgggagcaggttccttacccacccatactccctgctccgcgtgattttgggtactacatgccacgtcgccagtggtcacctaaaatggattatccgaaatttgatggcaccgatgttcgtgtgtggttggataattgcgagacatactttgtgttttatcaaatcgctaaagggtttaaggtttctgctgcggcgttgaatttgttggagaaaatggacattaagccacgttcaaaactaggcttcgccggaatgccatcacgaaaacgggattcgctaaaatgccaggatgaagcgcgccgcactcgccactttgccattttcctccttttgctcattttcgaaatgaatttcccttctatgcaagttgacctgatggaattgcccctacggtcgggtcttgaaagcgagagggggttgagccagcccgtgtgttcgccgtgtgcgctcggtcgcctctctctctcattgccatcgcaatgcgccaccgccatgccctgcatctccggtccggctagtcgagtctagctggcaggtcgaggaggagttgacgcacgaagccgcagtccctccccaggcctcgatgctcgtcgcgggcatcagagagaagaaccataaccctaaccctagttagggttatggcgatgcagcgaagaattgctcaaggtagcgaggacaacatgtcccaaggtagttcctttcgtgctcccgggcgccaactctctcgttttcttcttggtcccagtggacttcctcttgtgaagtgcccaagatgtgggaatgcagtagtggagtgcaaatcctggaggcaaggtggtcgggtgtttttcaaatgcgagaagaatgaacaatatgttagtaaattctcttagtttgattttcagatgagatggttggaatttcagaatgtatagttaattttatttggtattgttgttttcataggttcaagatgcttgcacatttttcaagtggtatgatagttaccaaagaatggtggaaggaatggaattagatttcaatgaagaagttgcaacaccagttgcaatagcagcagcaggtgaagctgacagggttgatgaagggaagatggataaactaactaagtggatgcaacttcttgtgttgatcaacatagggcaaggcatattagttctaattggagtgtttgtttttcttatgaaatgatgtaattgaaattatggatgtaataggaacggagtgaagcaaaacttgatgtagtaggaatgcttgatgtgttgattttggtaatatttgtgctgtcaacccttatgtactagaatcatggattgatttggtaatatatgtgctttaagcccttctgtttaatatatgtcaagtctttatggctatttgagaatctgaagatgcctgtatagttaattcagcgtgtggcaaattttaatcaatcagaacaatgtcaggcaggcagtatttagcagcacaagcagcatagtcaggcagtatatagccattggtgcattcaggcagtaaatgatgatgcggtgtaacaattccaggcagtaatacaattccaggcagtgtaaatgggcacaatgacataatatctccaacaacatagtcattgctcctccacgagcctggtaagatagaaaaatgtacgcaagttaaatgatgcgcaaactacaacgaactcgcccacaatcgcaacatcaacaacattcaaatcgccaaaggtttgagaatggattcacttacccggcgacgagttcctgccacgtacactccatatttgccaccctcaccccgggatgcagtgcgacggcggcacctacatgcggtgtgccgacggtgagctccttccacgacgggccgtctccacggccagatcgatttcctcgccgacgagcagacaggatggggcggcggaggaagagagagatagccaagaaccacctctggatctcgatcccctttctacccgaccgcaggggcaattctgtcaggtcaactcgcatagaagggaaattcatttcgaaaatgaggaaaaggaggaaaatagcaatgtggcgagtgcggcgcgcttcatcctggcattttagcgaatcccgttttcgggatggcattccggcgaagcccagttttgaacgtggcttaatgtccattttctcaatttgttgggagatgctgctaactggtaccatgcatggaaattggaagtagggtggcatgattggccaatgtttacggctgcagttatgagtgagtttgaagttaatttgcaaagtgtgaagatggatgagttgttgctgttgacacaaactggttcggtgactgaataccgctctaagtttaatcagttggtctatcagttgaggctttatgatcctttgctctatatcacattttttattcatcactttctgttgggtctaaaggatgaactgaggttgcttttctggcacaacagcctactacagtaactcaagcttatttagtggctcttgcacatgaatctgctcagaatggggctggtgtgaagagatggcctctaagaaagagcattctgctgtcaagagttttgataagcctaagttggcccctggggaactttggaaggctcagcaactcaaggagtatcgcgagctcagggactttgttttaaatgtggtgagaaatatgttcctggtcatacttgtgctaagactgacaatgtccagttaaaggctattcagttacaggaggagtctgaggtattgtctgatgccctgttggatgttgtcatgaccctggatatgtctggcactgaggtgaatgtatcattgcatgctttagctgggacttgtccttctaatactattcagttgcgtgctttggttcaaaatcaagtcatcattattcttgtggattcaggtagcattcatagttttattgatactggtttgtgtcagcgcctacaattgcctactatagctcttcagtctactgctgttaagatggctaatcgggagactctctcttgttcagctcaagttccctagtttgcttggtggattcaagggcatgagttttctttccctttgagggttttacctatgggtggttatgatgtggtgttagggatggattggttatctcaattcagccctatgacctgtgattgggcagccaagcagttgcagttctgttataaaggctcagtgatttctctgcagggtatgcagattcctcctaaattcagtcttgtcagtgaagtttatgctgttcaggttctgaaatggactaaaggcaatgatgtttgggccatggctgctatggaaccatctgttacagtgccatcttcttcttctcaggattctgaaattcagttgttattacgagaatctcagtctgtttttcaggaatccaattccttgcctcccccacagagttctgaatcatgctattgcattggtgcccaatcctgtgccagttaatgctcgaccatatcggtattctcctgctcaaaaagatgagatagaaaggcaagtttctggcatgttggctgctgggttaatctctcccagctgcagtccctttgcatctcctgttattttagtgaagaaaaaggacaattcctggcgcttttgtgttgattaccacaggttgaatgatcttactgtcaaaaataagtttcccttacctgtggttgatgagttacttgatgagttggctggtaccacttacttttctaaattagatctgcgcagtgggtattatcagattaggagacaagaatctgatgagtataaaactgcctttaaaactcatcatggacattttcaatttcgtgtgattccctttggtctcaccaatgccccagctacctttcaatgtctcataaat

SEQ ID NO: 15674 - DNA, 5350 bp, Oryza sativa
cagtccctttgcatctcctgttattttagtgaagaaaaaggacaattcctggcgcttttgtgttgattaccacaggttgaatgatcttactgtcaaaaataagtttcccttacctgtggttgatgagttacttgatgagttggctggtaccacttacttttctaaattagatctgcgcagtgggtattatcagattaggagacaagaatctgatgagtataaaactgcctttaaaactcatcatggacattttcaatttcgtgtgattccctttggtctcaccaatgccccagctacctttcaatgtctcataaattcaatttttgcccattttctgcatagatttgtcttggttttcatggatgatatactggtgtattgcaagtcttgggctgatcaccttcatcacctacgttgtgttttacagttaccgcaacaacatcaactttgtgccaagttgtctaaatgttcttttgcagctccacagttggagtatttgtgacatattatctcagctgctggtgttgcaactgactctgaaaatattagagtaatgttgcagtggcctgtgccaactaatctcactaagctcagaggggtttttaggcctcactagttattattgcaaatttattaagcattatggtatcctggcaaaacctctgacaaccttactaaagaagaataccaagtttgtgtggttagataagtctcagcaagcatttgatgacctgaagcatactatgactactgctccagttcttgtgcttcctgattttaccaagcccttcactattgaaactgatgcttgttcttcaggcattggtgctgttctctgtcaagagggccatccagtggctttttacagtaaagcattgggagttaataatcagaaattatctatttatgaaaaagagttcttgactatcatgatggctgtggataagtggagaccatatttgttgggggccgttttgttatcaaaactgacatcagtcctgtgtcatttggatgatctgattttgggttctgagttgcaaaggaaggctatgaccaaattgattggtctgcagtatcgatttcagtaaaaagggggggggtctgaaaaccgatctgctgatgctctttctcgtgtgggccatttttttctatgtacattctatttcagtagttcagcctgtgtgggtgcaggaagtggttaactcctatgtggtggattcccaggctcaatccttgctcactgaattagctgttgcctcttctaatgcccagggttattccttgtctcatggtttgatcaggaagaagggcaggatttggctgggcactaattctgctttacacactaagatcatttctgccatccatgactcagctattgggggccattttggcattcaggccacatatcagagagtaaagaaattatttgtttggagggatctgaagcagtcagtggaagaatttgttcagcaatgcactgtttgtcagaaggccaaacatgaacattgctcttatcctaggttattacaacctttaccaattccttcaggggtttggcaggatatctctatggattttattgagagtcttcctgtgtctaaaggtagtgatgtcattttggtcgtggtggatcgatttactaagtatgcacattttttgccattgaaacacccattttctgcactgcaagtggctgaaagttatctgaatcgagtggcttctttgtatggcatgcccaaatctactgtgtctgatcgtgagaaaatcttcactagtcatttttggtagcatttgatcaagagatttggcattcctttgaatctgaccactgcgtatcatccccagtcagacagatagactgagtgggtaaaccagagcttggaaatgtacttacattgtgctgtggcttcagccccccactaaatggagttcctggcttcccttggctcagtactggtacaatactagttttcattcagcattgaaatgatctcaccacaaggctttatatgccagtgatcccacctatggtcttttgccttcagtacctgagcctgacgaagatggtgacactggtgctgctggtctactgcaagaacgtgctttgttttgatctatgttgcaacatcatctggctcgcgctcagaaccatatgaaacagttagtggatgcaaagcgcactgctcgttcttttcaagttggtactcttgatattacagccatatgctcagcgctggcattcatgtattttgggtcctttgaaatcttgcaggcaattggctcggtggcttacaaactgaagttacctgatgatagtctcattcatccggtgttccatgtgtcccagttaaagcaatttgttcctgacaacaaaccgatgtgctctcagttgcccacggctgctcaactggatattgccgatttcatcccttctgaagttttggatcggcgaatggtgaagaagcgcaatgctgccgtggtccagaacttagcgtgttggggttctcttcctgctgctttggccacctgggaggatgctgacgttgttcgcaccagatttctggacgctgtcccttggggacaagctccaattccagggggcaactgttatgcctatgccggatgagctactggcaacgaccgaaggaggtgtgtcgaactgatgcgaaaagacgtttttgagtggctatagcatattgagtctatgtactgatttctgacactggcttgtggggctaacggttgttgagtcgggtgtgtggtgtataaatcgccagcctgtaggcacgtgacatctatcgaaaaagagagaggaaaaatactacccgtcctctgcttctctctttctttctcttgctgtgttttcttcttcctccctactactcggtttctgtcagatctccggtgagcatcgaggaggtagaggccgcccccgacgccaacggcggcggcgaggaagccaatcggccccgcgtggaaggcgacggcgaaggtggatctcctcatccccccgcctccctccttccccacatgttttgcgcatagggttttccgtctcacgggatgatgcttatgtgttttctaattcattcggtgcttgaataatccgcgaagggtttatagtccgtttcatctgatcgtggtctctctttgaatcaggtgtcttgcagagcaacgagtcctccgcgaaggtcgatgagccggtagctacagagaacagtgacgctgctcctgctgaggcatctgtagatgctgtgaacggcaagattcctcctaccaaggttacttcttatgctggaaaggccgatgcctacatcaacttaggcttgatcgtggtcataaatgttcatgtagttgattccccaacatcctctggaaggtgttacattgacagaaagaactgtacgtattactgggaataagaagcagatagaagcggcaaaagatattattaagcaagctatgagtcaggtaatgtgattctgtgttttgcttttaactgttccttcatgctgtaaataactagtgatattagatgatgctgtgatcacacaatgattgtacaattcaatcatgctgtgaagaactgggtgatgcaatatgatgatgagatgctaaatttgtactttatgcatttccattctattcatgctgtgattattttttcgttgaaagtgaatttctgttacttgctctggaatcatggtgtgtattatcgaacctattgtctctagcatgaccttaccatcttcgtatgatatgattggtataattcaatatgtttttctgtgctccctgataatagaggtcttagaaatatagaaggtgttttttggttcttgttgagtaaacctgtgatttctttcaatcagcttaattaaatttgtgtcctcttatggtttgtgttgatgtcattttattgataccttctagaactggttccagcatttgttcatttcatttttaatagtttccataaacttgaaatgaatttcttttacacaaaaatgcttcaatgcaaatgcattttgttgaatgaaacacaattttactgcgtcaagggagtgctggttttttcctcgcttattacatcttaagtgtataaactaatgtctcttctacaatgggccttgtatgaagtatcgatcttgaaatatagcagtgcataattggactggaaggtaagttcttcttaattggtgataagttttagtgtcttttttgccaagtcaatgagatgccacatcctcgagagtatcatgtacatattaatacttaatttatacataataatttgtttataatctttcatgagttataatctcctcgtggtcaattatttttttgtggtaatatttgtcatcttccacataattcagtatcttgccttgcttccttttcaatggtgaaatttattccatgtccatgaattttatggtttttgcgttatcttaaattacaaatgatgcatgtttagtttcccatgaaaatgttgttcattcatggattaacaatatggaaacatggtgtgcatgatcatatatgtcaactatgaatgaagttagaataaatgatttgactctgcaatggatatcttttgaggatctgggagatatgttcacgttgacataaaaagatattctagtctcggtggcttgatagttcttcatagttcgtctagaagcagaacttaccttcgtgtatgatagtgtggttggaattcagtacttcatcgttaaaactttggtgctgtcacatgatcaatgaacaattactgtggtactagtatcaatctttagtcggttagtcttttgagttttggtaactgcttactgctagattagatcttattatgtttcctatataagaagtcagaactgactcaccaggttcctctcgcttccagtttccatgatttattttgtttgaaggtgccaatttggagttggatgaagggtaggtctgatgcttgaagggagtaggtttgaagttgaaccctaagataaaaccgacctccccagatgtaataagtaattagcataatctatttgcagtaacctagtcgaatttatgaattgcttgtgaactactacatgagtataaaaattagcagcgcgaatgaaatatgaccatgtatgtgcctataatcgccatggtgattaagaagtaataaaacattcaagccatccatgggcgatagtctactacagttgtacacagccgcatcagtaatcaaattagagatcagattgctgctacagacgcaatcgagcatcttaaaacaacctaaatggatcaatcgatactaccgaatcgaataaggaaaatcaacggcttattcgcggat

SEQ ID NO: 15675 - DNA, 3161 bp, Oryza sativa
attgcgtctgtagcagcaatctgatctctaatttgattgttgatgccgctgtgtacaactgtagtagacaattgcctatggatggcgtgaatgttttattattctttaatcaccatggcgattgtagtcacatacatggtcatatttcgttcactctactaatttttatattatactcttgtagtagttcacaggcaattcagaaattcgactaggttactgcaaacagattatgctaattacttatccagtgttaccgggacactgacacgggtgtcggagtccgactcggcaagctaagaaaaaataggattcggggactcgctccataaatatgatttttagtgaaaatattatatatatcatcaaataaaacatactcttagtcagtaaaacactaaaacatatggtgtcacacattattctgcacagaagatcctatcttcttattagttaggacaaagactgacagccaaaataagtgaatttcatgtgtagaggatcccttgtgcagttgtgcacaaaaaaacccactgctatcctgccatccacatgccactaccaatactactcatgagtactactagttgtctctggagtactactagtatgcctgtgcattgtagatgcacgcacgcagctacttttcccatcgagctctcccatcccattctctctctctcttctgccttctttttcccatcctctcccacaggtctgccagacaaccaccggcactgctcgcctatggcagctgagagagacaccgctagtagtgtctgatgcgtgtcgaaccgtgtcagacacgagctgacacggggatgcgtgtcgacatggaaaatttttttggactcgcgtgtcccggtaacactggttacatctggggaggtcggttttatcttaggattcaacttcaaaccattctgctgtagaattcctacaaataaaaaaaaatagcagtcttgtgtttgacccagattgtttctgtatcctctgttcgtctcaactggcctcaagaacacaactattttaaggaatatataagcagaatggagagtttaaactccattctaattttgttcggttttgtctgttgtgcgtgtaattaggcatttaattttcctatttcatgttttttttgccaaacggccaaatggccacactctggcattcgatgtaacaatttatcatatcgggaactattgttacaatctgtatcttctttgtgtgctgtctaccacaagtcttatctgtaagatgtcatattttttatgattggttctacctgttactgagaatatcttctactatttctctttttgccaggttttggtagaagcaaatggtgtaacacggacattggttttgaataggccaaagcagttgaatgccctctcctctgcaatggtatgacttctaaagacaaaaacatgacaatgattcaataagtaatggggcatatatggtattagcgactatatatagggtgcaggaacactgatttgataatttttttttgctttcattttctagataacgtgttttttgaggtgcttcactgcttatgaggaagatgatggagttaaactattgattgtgaaggtaacgatcatgtttgagtcctacaataatgaaatatctaatgtggtccatatttgaacaatgtatttagaggcttatctttttttaaaaaatgaataacgaggtagtagctaacatcaaacatgaattgcctgtttaaatttccaaaatcatgaattcaaagtttcatccgcttattgaagtttgtacaaccaagttgtagtaacgtaaaacaacaatgctgcccgtgccttttgttgcatgctaactgtccttttgccatttgtaaatgtaattgattttcgccgggatgaaatgtaattgattttctgctgctgatatatgagtcttgacttattgggataattccatctttagtacctcctgctgttacctttactgctgctgtttgtgctcagcttgatttttataactcgttgccattcttgtcatcacttgttttttcctttgtcagggaaaaggaagagcattttgtgcaggtggagatgttgctgcagttgtccggtctataaataatggtaaacaacacatatgatgcatccttgagactatgatgtcaaatatcttgagctggtttatttttggcttttagctgttttgctttgacttcctttgcctttccatatgctatatgctaattcactgttaacatgcaatatatagagaattttcttcttgacatctaattagttttactatgcatttcttatatcagatagctggaaatatggtgctcattttttccgaaatgaatttctgttaaactatatcattgcaacatatagcaaacctcaggtaagctgtcgctatggctttgaaactgcttgtccacataattgttgtcattattgctcaattcttaccactgaatgctacaacactcttatctaggtttcgcttctaactggaattgtcatgggtggaggtgctggtgtttctatacatggaaggttccgagttgtcacagatagcacggtatatattacggaacaaactctatatgaaccttccgtttttgcttaaatcatttcaaaaaggatgtagctggtgtgcataaaaagcttgtttgattcttttcatgggataaacagcttaccagcatatgcctagagattgactctgtatttttactactatttatacaggtttttgctatgccagaaacagcgttgggtctctttccagatattggggcttcatattttctatctcgacttcttgggttctatggtgaacttttttcctatctcatatctcctttattcaattgaactttcacacatgatcatatgaattctcattgcaatgtctaaaactgattatgaatactggaaacccatgtgcagttatgcatccttaaatgcttattttttagggaaaatccaacctcaaatcttgcaaattttggatcactggatgtgcttcacgattcgtgctcttctccaactccagcgaccacctcttcttctccggcgccagcgccggcggaacccaaactccggcagagggccgacgaattagggtccggggtgcggtggggatgggagggggggaggggt

SEQ ID NO: 15676 - DNA, 7048 bp, Oryza sativa
atcggcttgagggaagaaaaggacagggaggggaagggaagggccccggccggggggacctcgcctgcgccgttgactcccttcggccagccggcaagacgggcggcggcgtgttgggccggtggcgacggcggatcaggtggtggcgagatgggcgcgcgaggggagcggcggcggcggaatgcgcgagggggagaggaatgggagaaaaaaggttagggttaaggctgtgcacgaatctcaaagcatatccaatggtccaaaatttgaaagattggaggtgggatattctatcaacagatgtataaacagtccctattttttatttaggatgatcatattattacatgattttaaaatttgtgggtgtggaaatatatatggccactctgtttctcccatcatcttaataaattttggtaaaaacaagaaatgtatgtggccagattttttattgcctgtccacaggattcatctgttgaattttaatataatggtgaatttgttataattacaccatacaaagttataatttgatgggaaactatcattggagatcgttttcactgattttttgttatgtctttctcaggagagtatgttggtcttactggtgtaaggttggatgctgctgaaatgcttgcttgtggcctagcaactcattttgtaccttcagatgtaggtctgccagtggcttttgaattttatgttcagtgtgggaccacatatttgttcgttttatgtttggaagtcaactgttataacatgtcctacacacttgacttgttccaagtgtgattatagataacccgagtattgctggttttctaattcctactagtacactcactcttgcagaggctgtctttgctagaagaatcacttaaaaaggttgatacatctgatccatttgctatatgtggaattatcgatcaatattcgcaacaaccatctctgaaagaaaaaagcgctctgaataggtaagcgtgcaattgtccagacattaccttttcatgcacgtcaagcttattctacttcctttgtgtaccctgtaaaaatgacgtatcctggacaggtgggatattctggttcacaccaagtaatcttgtcgtacaaatcctttttggcatgttaaatttagattgattaatctacagtttttaagttactagtagctacataaagttccatagttataccatcaatataaatttcatgcaggaaaaactcctcatcctgggggcgtgtttgaccaatttatcctctccaaacaactttattttgggtccaagcctcagcccccagatagatagactagtccttttgaaataatattagcttgtaatgaagggcaggtggagaaatgtaaggaattggaatgggggagatataggaaagcaacagcatgcacttcccacatcttgtgtcttctttcaatagatggatgggcttcaacttatcaaaaagcttggtaatggttgtctggcctggctttaaataagccgttccctatgccctaacggcctaacctgttacccgtgtgttttctatattctcctcatctttgaactcatttttgggtattgcttttcttaatcttgtttgaaggccaaaaaggcaattgtcagtgcattgtaacttggaaggacttattttagtttgtcaggagattccatttgttcctctttcatttcaaggttttgttttctcatttcattctcaggtcaacttttattgcctaatccatatctgctacttccgtcatatgattgcaggctagaaatcatcaacaaatgcttttccaaaaaaacagtagaagaaatcatagcctctcttgtgagttatgctaagtcctcatttgctttctatggactctccagttctgttgtgctaaatttgatgtgtatcatgttaggaacaagaggctccaaatgttgctgatgaatggattgcttctgcaatccagtccatgaggaaggcttctcctactagtatgaaaatatccttgagatcggtatcctctcaaacatttccaaagcatacgtctttatgttactcaagtcattctatcttggtgccttctgatgcaaattattgtagtgtaaggcactactatttatttagacccatcaatcctttatatggtttcatatgaccagtatttatattgctcaagcgcatacttcagatagctttatgaactgaaccctactcttttgtcttggcagttggcacaacagatcagccctatagccaaaaaaacaaaccttctaagattatagcttttgcatagtcaaattgcatgtatgggcataccagttctaaaagctttgtaaatgtctttgaaactagtcgttggagggaagacaaggctcgttcactccacagaagagtacatgtgctagaaaaggcagccagcttaaaaacaccaactactttcttaagccttatttagtttggttgcctacgctgatctccggcgtgctatgcaacaccccctgcttgcttctttctgttcgacttggagcttgcagcctccctacccttgcttatgacctattcttaatagaaccgatctgattttcactacaagaggaattccgtgcttctgccggatcctccctatctcctgatcaagcttgtgttggtaaatactccctccgttttttaatagatgacgctgttgacttttaaacacatgtttgatcattcgtcttatttaaaaattttatgcaaatgtataagatacaaatcatgcttaaattacgttgagtgataaaacaactcacaacaaaataaattataattacgaatggtcaaacgtctgacaaaaagtcaacggcgtcatctattaaaaaacataatgtagtactccctccgtcccataatataggggattttgagtttttgcttgtaacgtttgactactcgtcttatttaattttttaaaaaaatattatttattttatttgtgacttactttattatccacagtactttaagcgcaacttttcatttttgatatttgcaaaaaaattttgaataagacgagtggtcaaacgttgcaagcaaaaactcaaaagccctcatattgtgggacggagggagtattgtttagtatggcctatagtagtacactgtttgggacagagttagtgcccttctcacaacatcccgtctggcggaaactatggagggggtggctagcgcgcgcgtgggcaccaggaaagtagctggcgagcattccccccttccctttagtcttaactacctatattagttaatatacttaacagtaatgatagtaattaggaaagattcgggagattttttttactaacagattaaaaaaaatttaagttagatttgaaaactttcgatttaagttttaaattttaaagtcaaattttaaaaactttcaactcatatttgaaaactttcaacttgagatttgaaaactttcaactcagattcgaaactttcaactcaagaatcgagattcgaaaactttcaagttcggatttgaaaattttgaaaactttcaatttgagatttgaaaactttcaactcgagattcaaaaacttccaaatgcagatttgaaaattttgaaaactttcaactcgagatttgaaaactttcaaatcgagatttgaaaactttcaagttcagatttgaaaactttcaaactcaaaatatgctaaagataaaaaaaaatcagaaaaaagtgagaaaaaaaaggaaaaaaagggtaaaaaaaacgaaaaaaaatcgtagcggaggcgcgcgcaccggcgcagcggcgctgttccttcttggccggaaacgcgcgccgccggcgcgctcgctacaactagcggaacaaagcagttagatggttcactttgtataaccactacaattttgacagaaaatagtgttatggttagtttctagccttttaagatcatgtgacctatcttttgggagttctggtctttttcaccaggccgacaacgaaggaagccctgaccaattttattaagatcaagaggagtaaagtattgtttacaacaaacatggttgtttagggatcaccctaacacaggaacacaacttaaaagctcagaattggccctaagtccgggagaggcacagaattggttgctgccacaacagggcagccctctatcggcgcacttcagtgatcaacattcctcccaagcatgcatcacgctaagtccattcttctatgatgcagcagattacctcagaggccgatttgctggcaccgtcaaacacctgagcgttccgttctttccacattatccaagagattagaattactactgcgtcaaatgggagttccaatctcaccatgagcttcgaggtgtcaaacctccagctatcactacctactaaggtctaaagtggagcttagtctctaagaaaagtttgttttacacctaacattcagtagggaaggtctttgttttactgtagtatatgtagttcgcgagacgctagccatctgtgcccccattatgttcttagcttgttgtatttactgtgagttcagataagagaaggccgaacacaacttgttggtgaatgcttacgtcgagaatatagaatggtttgccatgtgatgcgtggtgacttcagtagagacttctttgaggtaaatatctatctacatctccccatgacatgttcacttaagatgaacatactttggacgattcaattcctatttgcagggatgcagggctatattgttggatagagatcgaaacccaaaggtcagcttaacatcctgtttgtcagaaaattcgttcttcacatattgtctaatctggcatgggcatagcattaaatctaaccctgacatctttgctaattgcagtggatgcctccaaggttggaagaggtgcacgacgaggtggtcgaaaaatatttttccaaagtcgatgatccagagtgggaagatttggacctacctcctagacgttcccatggaaggaggcttgttcccaagctttgactgaatgaagcctctggtgaaaaactgaagcctttgttggtgcttcttaataacaaacagatcgtccccaatttgagggatatgtggagacaagcgatgaagtttataataaagctgaaacatataatactataggttaacaattttattagtagcaatttagagaagtccatctcatagtctcatgcgatgcttatattggtatcgctattgtgctttttcaaggtgtgaaggtacgcttcaagccaaagcccaactgcataacggcggcccatatgataccggtatcaggctatcctattaggctttgaagctatcttctgcttgtagattctaggtaatcttttatatatattgtataaaagaaattcataagtttgcactgtgttgttttttaagtaaggcctcgaaaaggtagatccctaatatcgagtgtgtcttgtaatgcacttgaactgattgcatttcgttgatgaaatgggaaaggtccactctctttgtccaaaataaataaatctatatctatatctatctatacctaataaaaaaattcgtaaggcttccggtaatttttcatctgtcacctatcgctcgcgtcagtacaatcgtgcgcgatgcggtaatcagcttccccgttcaaacaaaatcgaagacagagcggataccatgcttcttcttattgtatttctctgaaaggcaaggggttttctataaaaaaaacataacaggcatttaggcagggtaagggtcagatcaaaattttatacatggacaagaagttttttgcaaaatacctaagatgcgcgtggcatgcatgcattcttacgtgttcctagagagaaggaatttatccatttcatgtttcgagctctcaaaaaatggcgtggaaacagatagaaactcttgaatggaaattgaaaagaaatgtagccccagttccttcggaaatggtaagatctttgacgcaagaagaaggggcgacccatatcatcttgacttggttctgcttcccctctttttttaagaatacggctaaatcggagatgggcggtgagacaaaccggacactaggcagatcacatgcatggggaacagggatttgaccgaagaaactgctcagtggcagtctatacgcccaattgaggagcctctccccgcagtgttttacgtgtcgcacggaaagagcaaaaaaaaaaatcaaaaaacgagaaaaatggtacggtcaggctggttattgattgatgatttgtacgggaaaagtacacgcaaggtccctcaacttgttagccagatacaaaatcgtccctcaaccacaaaaccggacatccggcgtcccccaacttacaaaaccagtcacaaaaggtctctcggcggttttgaccccggttttgtcccacgtggcggctaactcagcgtgagacccacgtgggccccacatgttagtaagccatgtcatcacctctctctatctttcctcccccttcctctctctctctttctctctcttacttatctcctctcgacaggctggacgggccgggcggtgggtggggatgtcgccagggtgaggcgggagaggaggtccgacgaccgccgaccggcgacgcggtggcggcgacacgggagaaggggagggcggcggcagcccagcgcggtcgctgcggccaacagacatgcatggtacgggcggcgcgaagggcgacagcggtgcgtggttgtagacgaagccgaggaagacggtgtcgacgtctcccccaggcttagccaccggggaaggagccgggcagccgtcgagggcatcgcggctttggtcctcgagcgccgtcatggcgtcgccgtcgtcgccgcgttcctcccgtctcgccgccaccgccaagccgacgccgacgcgttcctcatgcctcgtcgccaccgcccagccaacgagctcgccggtctccccgcgcctccgctggctgcgcgtgtggctccagcttggccgctgcggtcgcccgccgctcctcctcgtcggcgagcacggagaggaa

SEQ ID NO: 15677 - DNA, 3484 bp, Oryza sativa
  unsure (1)..(3484): unsure at all n locations
tgctcccctgagccaacgccgacgcattcctcccgcctcgaagccgacactggcctccccgtgtttccccgccgtcgtcaccgcgttcctcccgcctcgccgccggatttggacttgggaggagctcaccggcctccccgcgcctccgccggccgcgcgtgtggctccaactctaccgccgctcctcctctccgccgcttcttccccgtcggccgcgccgaccctcttctccaccgcgtcggtgccgccgccgcatcggccctcctctccgcgtcagttatgatggccgcagccgcgcgccgccatcgccgaccacacgagggggacggggaggccggcgaactcgcaccgtcctgagcccgcgcgccgccacccgggaaccgccgtcgctagccacaccacctttcggccgcgcgcgccgccgcctgtgcgagagcagggagcgagaggaaggagagaaatagagaaagagagatagggtgctgacgtggcttactgacacgtggggtccacgtgggtcccacgctgagtcagccgccacgtgggacaaaactagggtgaaaacccccgagggtcctattgtgaccggttttgtaagttaggggacgccggatgtccggttttgtggttaagggacgattttgtatctggctaacaagttgagggaccttgcgtgtacttttcccgatttgtactagcatgagtgctactgctagctctctgcaactgtactactgtttgccaaaaggaaaatttcacattgaaggcccgtttaaaccccaggcaaaattttttaccctgtcacatcgaatgtttgacacatgcatggagtattaaatatagggaaaaaaactaattgcatatattacgtgtaaattgcgagacgaatcttttaaggctaattgctccatgatctgacaacgtagtgctacagtaaacatttgctaatgacggattaattatgcttaataaattcatctcacagtttacagccggaatctgtaatttgttttgttattagtctatgtttaatgcttcaaatgtatatatccatatatccgatgtgacacggtaaaacttttcaccctgatctaaagaaaacctgattgatactctcaccgactcaccatcccataatatagttactttactttttatgcgtttagattttatcccgaaatataactatatattatttaatttctttatttagagtaaattgcgttgacggtaaaagaacttggcagatgggtgtgattaggtgaaaaacttgaaaaccaagcgtaacggtacaataacttggctaggtgggtgcgctcatggtgcaaaagttgccacgccattgttccaccttagcgaaagtgccacattagcattgaccatctcattttacagaaaagtccctagtaacttttatattccaatcacttcttcttcaggtgtatctgttttcccattgtttggtactccctccgtttcacaatgtaagtgaatgtgaggaatactagaatgacttattgtgaaacggaggaagtagaaagattagaaagatctagaggccccaccgcggcatcgacggagcagcccgaggccacttagcaggcgacctcgacgtcctacaggttcggcaacaccggcggcgccatgaccagcgccgcgtccgctgctggctccttccttccacattcgctgggtgcagatcgagtctccgacaatatcaagtccatgttcccctcctcgtccacagccagcggcgccacctccgtcaggcacgatgagtactaggaatcccaccggacacgacgagtacacgggatccccaccggaccaccagcagacgcagggagctatgcctcaataatatcatcaagccataaggaagatcatgtgtcagtgtcgcaatgatcaaaccagtccaccttctcatccagataaattctgctactgccaactccgaaaaaaaaaccccaccatgatgcagttcaattgtgaattcttcctcatggcctgcaatacaaaataattggtgatgtgttatacccgcataaggaaaataatacactaagattatttgcagattattgaactaattatatgctgttgatcgataagggtacaaaatacatctagtaagaatttctcattgccaatgttactcttatatcgtatacagctacaggaaacaccaatcaataattacagtactaccaatatcgtggctagtaccattagatctcttcattgcattgtaataacaaataacaggatattcaagtgaaagaccaaaataatacagccatcgtataggtcaatgagaccttaactttgcaatcctccatcaattgatcgaacaataganatctacaaccatcagcaggtgatttaccataacaagctccaggaactcgccgagtcagagccatcccaaagtttgtggcaatcacgtcgacagcagcagtttgtggacttgaattggtttggttatggtttagggcttgaactagcgtggcacacagagccctcgtcgccgccgcgatgtagttgcacggcttcccttgttgtcatcatcgtcgccgcagccgccaccaccgccaccgtcgctacgtcgccgccaccgctgcgtcaccaccagcgcaaccacctctcgatcaggatcatgtcaagaaagataaaaggatatatttgtacgtcaacaaatcatattagggggttttctataaaatgagatagatctttcgtgttaaagccaatacggcaattgtgctaaggtggaatagtaatgtggcaatttttgtttacgtgacaacttttgcaccatgagcgcatccatctagccaagttattgtaccactacgctcggttttcaagtttttcacctaatcgcaccctcctactaatttcttgtaccgtcaacgcaatttaatcctttatttacttactcatctcaacaaattataaatagtttcttatttaattttattgaaaaaactttagaggagacgggtgaagtagttttgcagtactgctgtactagcaggaatagctaatgccatattggtaccagtttttacgagacgcagcacttgccaggagaagtgatgattaatcagtgcagttactgtgactaatggccgttcaagatcgatccagtcaattcatgacagtaataatttagctaggtcccccctccatggatacccaatcgatcgatcactgcataaattaattagtagagagaagatcggagcacgtacatagaagtgttttaaccggttaatactgagttttgtttgtgtggtgttaaagtgctaattagtcaaagtctcgcaagcttgccataatgcatcgatgcatgtgggttgcgtgtttggccaatcaggagctgcgaatgacgtggcattattatatatatatatatatgtatatatatgtatatatatatatatatatatatatatatatatatatgcggtatatatatata

SEQ ID NO: 15678 - DNA, 1926 bp, Oryza sativa
accgcatctctctcgttccacccctcttctcggtcctccagttaaagtttttgtcctattattccgttcattcctgttagacggcgagtaaaaaaattactttggagcctacagccacgagtaatttttttattttggcgcacgctcccactcccgcttttctctcgctctcgttcgattcttctttccgttcgtccagtaaaaaaatcattccttgttatttcgcccctgttagaccgcgagtaaataaattactttggagcctaacaccgtgagttaaaaaattacttgttttgaccctacaacagtatgtcagcccgtgagtaaataaatcactgccggtcagatattattcacctccacactacattaccaattaacttgtattcaccagtcaaccaagctaccagttaacattctagcctctattaacaatattttcttttacacacgggttctgttacattcagacacactcaggggcgtgcctacgttatactacccggtgtcataggacaccgggtagattattcaaatcctatataaattacactatgttaattaatatattagttaataattagataattagtatatattggaccccagtaatttttgttctgggttcgccactggacacactatacaataaacaaattacatgcttaaactcaaaagtaaaaaagttacaaaggatataaacactccaacaaaaatcatcaaagaaattcagatcagcagatcctcctcttcaccgcgggatccatcgtctttgatggacgaatgttgtagtggaggcggctggctcgccaaccaaccagcttagaacaggactgtgtggcggtagcattaggaatcaggatgggcagcccaggatcaagcatggccgctattaaacatgcagaccataaaatcagtaatgcctcaaaagattagtgcactaacaaccaacggaggtgcattattagtgattgttgaaagttatacctccggcgctagtgacaatgtttcccaggtcaccgcatgatgcatttcatcatcttcgagtccaccgggttacattgtgctcctgcaagaccaaaatttgccatatatatgcactatgagtaggcatgccttagtggattgactcatagtatgaggctatgagcaactgagcattgcacaggacatggtgatgcttgcaggctgaaaagccaaaaattaatgcaagtgcaagctcatgggaaatctaaatgggcatttggtggtacatatcagggataagtggcaaaacgttgatcaagaggcttatgaattgttgatcgtgtggattaagcttattagagaatttttggctcgtttttaccaagagaactgctgcaagctacatagttgaaagcacatactcctaccagcgatcatatattttcagttaccatctgaatgccatggaggacatagaataacttccattgtaacgttcagtcaaaattatttacaggaaacaattgattgtatatacaactaatcaaacaaaccaaattagtactaataaaaaacaccagtcttggtttaccaaagcaatcgtttgtcagagaatgcgacacctaagctgactctaggccacatgtgcacatctacagatcatcctagttcttctattgttttcagaagctaagaacagccctgcatgcatgattcatcacatatacacttatagcaccaagcgaagccatccaccaaacaacttctaatgtgtttaggttggatgtgtccactcaatacacggatacaaaagacatgaatagattagttctgttaggttcctgacaaaacatcaaatagattagttctgttaggtacctgacatatattaacttcatcccgttggctgggaatgaagttggctgtgaaacaaaggttcacgttggccggcaattgaaa

SEQ ID NO: 15679 - DNA, 10839 bp, Oryza sativa
aagtatggttacccttagctgtagtccatctttaatgtataatcaaactatttcagtacaatgtcaaacaaataatgtagagaaaatcccttgtgtacccatgaaaactcacctaatgccttctataccttcgaattttacccaatcccctgtgtacccctgaaatttcgctttgatcccttccatgcccctcctgataggtttctgttagatatgttactcaaaccgtgtgttgtattgtcagtatttttagaaaataccaaaatgcccctgccaaccctaactaaagtttcaatcccctttccttctcccgcatcctctccacgtgagtggcctcagtgtgccgccagcctgcagtcccgcgccgacatcccgccgccctcctgccgcgcgagccatcgtcccgccgtcctccgaccgaacgcgccgtcctgccgccctccggccacgcgccgtcgtccagcctccgtcacgccgtgcaggggcgccggccaccgccctccagctgcgcgggcgtcgccccgccgtgcgggtgtcaccggccactgccctcccgccgcacgggccgtcagccaccgcccctcccgccgcacgggcgtctgtagtcataactaatctggcaactgggaagaggcttggaagcttagataaagctgaggtaatttacttttgtagttacaacacttattcgatagaagctgtttgtgttgaagatagttttagcaatgcgtgtgatcccattgatatgggcgaccaaaggcctttgatcaacatctttgacagaacatgattcatccaagctctgtaaatgtttaaagaaaaagcaaagtacatcttcaccatccagtgactaatgatgattgtagttttcagatttgttttgtgtggcaaattttgttgggtgcatctagctagatatagcaattacgggtcttggtcctctttctgttatattaaattgagaatgaaaagcttgtctcttcgagtttcttagcgattgtgttcaggaggaactatgaagagatgaggtaattcaaattctattactgcgaagcaacaatttagtttgttctctgatgttagtatttagggcaattaagggaaaattcagtagataatatttaatttctgccagtcaaaaagcaactggattgtgtatgtatatcatggaaaatttagttaaggttgctttttgttgtcattttgcaggtgtacttccatgatataccaaccaacctgagccatctaacatgaatgtagccttgccatgtctgggggaggaaacacctatagttgcaccaaaaatgaccaagagcaagataaagggaaaaccatcatgttctaatactcctggtagcccaactatgcgcacaaggagcacagataagagtcctgcaatgggcactagaagcaaaagaaaactttatggactaaatcatatggcttgctgattaggttttattttggtactgtccatttctctgttgaggctgatggattttgttgttgtgatgccctgcaaagtggtagtcatagttgccatattttgctattgtaaggattgcttcctcatgatgtgatgatgtactgttatggaccttgtgccattatgctcatgatatattacctagctaatttggtttgttgattgcactattttgtatgaaatggaaagttggtttggttcctgcactattgggtatggaaatggaattgtgtgtgcgcatgatatgaatggttatgtatggatgatggaaagattttgttctgtgcatgatatcgagtgttctgtatagatatctctattgttatgtatgatgctattgatgctcttattgtaccataatcaatttcttgtatagaggaaccaatttttttatagaggaaactgatgactgtacagacagtcagcttttcctgatcctattatttttcacaaacaaaaagttcaatatattccattttttcagtgccacaataaatttgttatacactcattatttagtctcataaaatacacatattgttcagttaatattttttcaattttttcaatctagctgccacactcctccatctacaagtgtattttagacatttggaaccacacataacgtgaaaatgaaggaaacctatcgggaggggtatggaagggatcaaagcgaaatttcagaggtacagaggggatcgtgtaaaattcgagggtatagaagggattaggtgagttttcatgggtacacaagagattttctcaatgtagagaggttgtgggaaatatacagtgcaaaccacatgtgtaatgaaaacctgaaaaagtaccgttggataaaagatactaccaatttaagtgcagttgtaggttttcttatccaacatttgaccgtccgtcttatttaaaaaattatgaaaaaagtttaaaaacttagtcacacataaagtactatttatgtttaatcatttaataacaacaaaagcactaaccataatttattatcaactaagacgaacggtcaaacgttggacacataaacccacgagacggaggtagtagatacatcggatttttccacgtcattaagagtaaaacttttactcgcagatttaatcataagtaaaaaattactcatttttacttttgatgatgtggacaaatctcagacatatttttaagccaacagtagttttcaggtttccaatatgtatattgctgtgactatatttttcccatggtttgattcgttgagtgctgttgcagtgtataaatcgatcatgggacccagtcacaagaaaaaaaagaagtaaaagcttcttttttttttcttaatcacatggagcggagtctaatatatcagccaacaataaaataattctctattaagatgatttcacttgaaaatatggtttaattttgcatatacattaccaatttaacttgctgtatgttggttcaatttgttttttttttggatctgagagaatacaccgtaaaggacattaggctggttcggtttgatgcctaaaagagtctcaccaaattttggccatagacacaaattttggtatggccatagtttggaaatgttaaattgtgtttggttagtagccaaattttggctaaaccaaatttggttgtgtgccttcagatggctacgccattctttcttgtctcctcaccttctcacccacggatcgccgtttaaaagatgagagttttcatgttgcagctctaattaattactttccttttgcttcattcaaggtcggattattatatttttttaattcttgaataatgtattatattttgaatatttacaaattttctgctaatataagaatgaacgaagctgcagatgaatgctgtcgggtgataattaagtattggggaatggatggagtattcaactatgtacggaacaagagatcaaagcaaacaatgagcagaagtgtgagcaggaaatagaattaagccatcaataaccacaaatatgtagtcaacaaagaagataataaaaggagaatagattgcagattttttttagacaaagattgcagattaattaagctagcattacacttctggcagctaccacaaagctaagacgcatgggaccgcgcacatttctgatagctacagcaatctgctacaatgtgttcaacgtaagcaactagtgcctcctttcgacactctggagtgttctcctttcccctagggcccctttgatttataggaaaagtgtaggaaatttaaaggatttcaatcctatagaaaaaattactatgaaaccgtttgaaacaaaggattgaatcctatactatcctttaaattcctatggaatgggtaatctatagagattttggaggaaagtagaggtccatcctcttggaaaaattcatttgagtctatctctctcttccgattcctgcgtttttcctgtggtccaatcaaacggtcattcctgtgtttttcctgtattttccaatcctctgttttacacttacattcctgtcagaatcctgcgtttttctattcctgtgattcaaagggccctcaaacgagactttataagttcattaaggatgtgtttacttcgtgaaaagaaaacttttggttctcatgggatgtttgaccggatgtcggaaagagttttcgggcacgaatgaaaaaactaatttcataactcgcttggaaactgcgagacgaatatttcgagcctaattaagccgtcattagcacatgtgggttactgtggctaatcatgaactaatcatgctcgaaagattcgtctcgcgatttccatgcaaactgtgcagtcagtttttgttttaatctatatttaatactccatgcatgtgtctaaagattcgatgtgatgtttttggtaaaaaaaatttttggaaactaagggtgtgtttagttggggaaaaggaaatttttgggtgtcacatcgaacgtttgaccggatgtcggaaggggttttcggacacgaataaaaaaactaatttcagaattcgcctggaaaccgcgagacgaattttttgagactaattatgccgtcattagcatatgtgggttactgtagcacttatggctaatcacggactaattaggcttaaaggattcgtctcgcggtttcctccataactgtgcaattagtttttctttttatctatatttaatgcttcatacatgtgttcaaagattcgatgtgatgtttttggaaaaaaattttgggaactaaaccagacctaaatcattgattgacaaaataaatggtggatatcttgagctactatccgttgatgtgcccctctgccgtaggaggtatgacagggtctctaatcaccaggggccgtcgttgaggcaaatggggattctggtaatgaggtggagtagtttttatctatggctagtaaccggtagaaaagtgaattaattaataagaataatttatgcataaaacttttatatctattgtattcataagtgatttaaaaggcaatgtaattgtttgaaaaaaacataagccaatctagaaattgaactacgataaataatcaaaatcaacagttaaattaaaactaagggcatgcttagatcccctggcaaaacttttcaccctatcacatcgaatatttggacacatacatgaagtattaaatatagaaaaaaaactaattacacagattgcgtgtaaattgcgagatgaatcttttaagcctaattgctccatgatttgataatggggtgctatagtaaatatttgctaatgacggattaattaggcttaataaattcatctcatagtttacaggcaaaatttataatttgttttgttattagactacgttttatacttcaaatgtatatccgtatatccgatgtgacacaacaaaacttttcatccctatatctaaactcaacctaagtttttaaaatcttggatgtactcccccgtcacattttaagtatagctatgagtttccgtgttaaatatttgaccatctgttttatttaaaaaaattataaaaaaattaaaaataagtcacgcataaggattattcatattttatcatctaataacaataaatttattaatcataaaaaatttaagtaagatagatgatgttagacacagaaatttatggttgtatttaaaataggacggagcgagtaactgctattactaagcagcaggcagaaaaacaattcaaggacccgtcgccattttggagtaggtgtagtaggtagggagttgacaggatatcgctgtctcctaatcagtactccctccttgcaaaaatttgaaacctatttctttttcattaaaaccaagaagcaattaaatcactcaccatgtgacaaaatcaataaacatacaaccaataaatactagaatagcttcttgtttcgaccaacaatttaatttagcacatagtaactacaaataagactcaaatttttgaagaaaccaaagaatgaaataggtctgagatttttagaaagagggagtactccaaaattaaacaatggtattgtgttagaagcttctagtggttacaactatattttactgcctccgtcctaaaaaattaagagattttagacgagtggatatttcctaataatatgtatctggacaagctccctgtgcagattcatattactgtaggaaatgttccatctatctaaaatatcttgtatttcaggacagaatgagtagattcttggggtccggtgtaggatctgaaaatatagcggccagtccaaactttttaagagagtgtttatatctaggggtgtaaagttttggcatgttatatcgggtattatataggctgtcacatggggtgtttgggcattaattaataaactaattacaggggcattaattaataaactaattacagtatctgttagtaaacagcgagacgaatttattaagcctaattaatccatatttagcaaatatttactgtagcatcacattgtcaaatcatggagcaattaggattaaaagattcgtctcgtaaattagtcgcaatctgtgcaattagtttttttttctccatatttaatacttcatgcaggcatttaaacgttcgatgtgacggggtgtaaaatttttgtgtcggaactacaccgggcctaagtacttgtatgtggcaaaactcattggatgtaggatctgaaaatataggccctgtttagttcccatgcaaaaacttttcatcatgtcacatcgaatatttggacacatgcatcgagtattaaatatagataaaaataaaaaactaattacacagtttgcgtgtaaattgcaagataaatcttttaagcctaattgctccataatttgataatgtggtgctacagtaaagatttgctaatgacggattaattaggcttaataaattcatcttgcagtttattggtggaatctgtaatttgttttgttattagtctacatttaatacattaaatgtgtgtccgtacatgcaatgtgacacactaaaatttttcacccctagatttaaacacagccatagtggcctttttaacttgtacagatttgtgagatgactggctaattattgaactgcaccattgtagaatctccaacttctacgaacaaattatgggacagtacgcctacatcgaagcaccagctttggtgcattaaactggtcacattactaaaactaaacagcggcaaacattattatgaccaacaacaaggagcacaaaacttgcagataaatttttggaaggatagtgagtgagattgcctacttacatccctatatatatatatatataaacaaataaacattaaaattaggtatatactcaatttgaatcttggagtccatactccatgtagtaccagttaatttacctatacacatacacccctaggtatctgaattttttgtcccgaattaatatggtcgagcgtgtgggtggaaaatacctatcccgttttcactcctacttgtgtgattgtaacttgacactagatgaatagggtgattgctgatcgtgtatagttggaatatatactataatcgtgtattagggggcagtacttttatatgaacgcggagctgaaacaagccgatccaagccaaaagattcaagctttgttctttaccttccccctaaccactctaccacagtcagagtgattaattataatcgccgaccctggaccacgcgtagtatatataggccacaatcggcagtaaagcttttgtcgagtcaagtgcacgatagcgtggttagtttgtggcactcatcagagctaattaagagccatggccatggagaagagccgggtcctcatcgtcggtggcaccggccacatcggccggcggatcgtggcggcgagcctggcggcgggccaccccacctccgtcctgctccggccggagatcggcctcgacatcgacaagctccagatcctgctggccttcaaggcgcagggcgcgcggctcctcgaggcgtcgcttgacgaccacgatggcctcgtcgccgcgatccggcaggtggacgtcgtcgtctccgccatgtccggcgcccacatccgcagtcataacctcatgctccagatcaagctcgtcgaggccatcaaacaagctgggaacatcaaggtaatttattttctatcagctcaccaaatcagcacataattaattaaaataacttgatttggctgtatgaatatagatgaaaacgcttctactcgagcatccaacaaaaacagaaatatcatgagctcctcagttctcagccactcattttttatctcaatttccatagccgtgaatggtgagtgatgacagcttgggaggcaaggcccctctccgtctccctctcttctcccactcactccctcctcttcccctcttccatgactagacgatggacacaggcaagcgtctgaggtgacgtcgctacggtgggatgagttcaaggtcatagtggagcttgtgatctggggatggctagatttatctctgtggcacacgagtgaaggaggtagttgtgggagggggaggtctggcgctgaaggtgacatgcgacgacggcatggtcaccggtgttggagaacatgatttgatccggagctatgtgatgatttttgtgttgagcttcagaactaggcaacgaccgtccttctcttctcacattccagaagactggtgtgctcaaggacgacgtcgtcgcttcacgcacaatggaggagcatcacaaaagtggatgggcgtgttgtgaatttttagtgtttcagtccatgcatctgtatgtttcattcgttcgagaaaattgttgcagtgggtattggatggtgtttcatgttttctttcttcgattttactcagatctacagatgtagcttaaaatcatttgtttcatctacttatttgtttcactattttttcaagacttgaaacatattttcattaactattgaagcatttttgtataagcggttaaatagcgtccaatttttggataaaaaaacagacgttcgatttgtagttgtttcggaatatagatatatgatttctatccactatcttgaaaagtaaaagaagttttatatatatatatatatatatatatatatatgtatgtatgtatatatatatatatatgtatgtatgtatatatatatatatatatgtatgtatgtatatatatatatatatatgtatgtatgtatatatatatatatatatatatatatatgtacatacatatatatgtacatacatacatatatatatatatatatatatatatatatatacatacatacatatatatctcataacttcagtaaaattatggcaatttttactgatatgatatatcgatgaatgtgaacgatgcgagtagatggttttatcttctatagagtatagctcatggacacaaaaataagttatttaattgagcgatgttttagtgtttttttacttatattattatactaacagcagaaatgattaggggttaatttgtcatttatgttttattcccctctagatcgatctgtgctcatccgttgcgttggcattgcttatattctatggaaaaatcagaaaaaagagagaaaaaaatttagtcactactaaattacgattttttatataataatatcccttcatgtttctattaccgttaatcacctaattagggtgatagtacaaatagatttatttgaaccctttgatcaaaatagataatggatcatattgatttctacttttatagtatagaacaccatagtgtgggctcaattacattttcaatgagcggtacaataagatttgtttttttacctaaataactagtcggtttgatttttcttaatgcttaaactaaaaaatgtcacacattaaaggatgaggataatatcagattgccatatatttactatgaatacttatctgcgagcagcgtttcctgccgtcagaattcggcatggatccatcgaggatggggaatgctcttgaacctgggagggttacattagaaactattaagagtggcgggctgggcggccgctcgcgcgtgccacgtcggatagctacagtacgtgggtggaagtttttcgaaaaagtccttctattttttgtaatatataaactgttgcttcattgctttaattttcaggagaatgtttgttttaatttgctttaactgggagggttacatttgatgagaagatggagataaggagagcaattgagaatgcaaacatccctcacacatatgtttctgcaaattgctttgcagcttacttcagtcctaacctctgtcagatgaaaactctcctccctcccaaagagagagttggtgtgtacggggatggtaacgtcaaaggtaaaaaagttaattacttatctataaactgttgcttcattgctttaattttcaggagaatgtttgtctttttctcatggaaagttagatttgtactttttcttctctttttagaaagttgagatttatctttggatcgaagtgtacgtccatctttttttttctcattgtcagtggtcccattcgatccagattctgtgctgcaaataacctgttttcaattcttcattattggtatttccttttctttttcagccatttttagttgcacgttttgttgccacttcgtaaagttcatttcatctaccgacttttcatttaaaaatattaatttattgatattttaatgtacaaatttattagagcaggacaagattcctaatgaaccgcttttggttctccatcatttaattcaattatcattttttaccttattaactttt

SEQ ID NO: 15680 - DNA, 29499 bp, Oryza sativa
  unsure (1)..(29499): unsure at all n locations
gcaggaatagtagaagtctagaagacgaagacacatgactatatcttatggttcttgttatgtattatgacatgatgaactagtactatatcttatggctcttttcaaacaaaggaaatttaaataaattttataaagttgagaaaaccctatatatatgtctaatcggaacgaaggaatagtcattccaaattcctatgaaattccttatggttggctcgaatcatagggatattagagaacttttaacttgaggtccaatcttttagaaaatattctttgcatctatctatcttccaataattatattatgttttttctatatatgctccatttaagcagtcatttctgttgttttcttgttttttttcttttatctctctgtgtgtgtgattaatggtttcatgtttatacatgtagactagtagtagtgctagccaagtttaataatagagatgtctaccgcctttaattttatccctcatatctcctcatcgattcgatcaggaggtgtatatatatatataaaacatgtgtactaccttcatcttaagagattttgcccatatatatatctacataagcaaaatcttttgtatttagagacaaaggtagtacaatatatctcatccataatacacaaactctaatgttatttatttgtttactatcacactagtatttgcactttttaaattatgtagaggctgctttttatactgagagattgttcgttctctctctcctcacttaccccacactcatcaccaaatgcaacataacactgttaaaagacaacacttgagtcttataagcacgatcttgagttttattatacttgctcttatgtacgtactccttctaattccataattatcatgtttgactagaactttaacaattttaaatatttagcttaaaaaaacactggaacatagattagttttaaaaagtactttaataaaattaaatatctacttatatttttatatattataattgaaaatatatttggacaaactctgatagcggtacgtaagctcagggatccatttgattggattggtcaatctttttctagctaccaggccaattggtatgcacactctatatccatgcatgctgatagatcatgtcatgcactggcaaatagtgtaagtgatgtacatgaaaagaatagatcgactagctagttttctgtcgtcgcttgtggagaaaaaaaaaacaaacaattaacagtcgcaaacctatcactttggagaatcccatatatgtgtgctactatcagaggtcgtttcgtttgacagctctagcttaattagttaccccgaatacaaagattgaacaattaacaagtttagattggttgtatttttgcttgattttgccatgtgttaattaacactgtaaacattctggtatatatatgtggggtatcagttaacaacactcttgacattagatatatatatgcacttctttccatgtgattagttcataacacaaaacgatcaacacagtacgtaccctcatgttacgacatataattaggactaaatttgtttgcatatatgtatacacaatggttagaaccatcagtaacccaagttcagttgacaaattaattagactgtataccgatatataccatatccattaaaaataatttgaattaaatagttgttagttttcattgagttgcctagctatgtttgaccaacaatatttttaagaaatctagttagtatttagcatcaaagttataccattagatttgtaataaaaaaataatttatgaatgagttggacttaaacctttttattttgaagttgcttaaaaataatggtcagtttaagcacgctcggttaaaactaacaactattcgtgacaaaagcaacagaattgaatatatatatatatatatatatatatatatatatatatatatatatatatatatatatatatatattactcatgcatgaagaatatgtaattgtcatgacaaatctgctgctgatctctgaaagctgtaataattaatttcagtatatatatgcatgtacaaactacatgccttcttattcctgctttaatgaagaaaataatatcgatgagattaactaaaaccagatggtttttacgagttaaaatttcaacaaaaaactttgaacgatatatagtctgtttcctgataagcgtccagggtgttgtctacaagatctaattaattaaaatagtgatgtcaaaagcaataatgtaacaaacgtggaaagaacggcagtgtcaagaaattagcagagaagatacttggaagtccactgagcttgtagaaaaagatggagaaagatgcagttttatgagaagatccaaccagaagcaataatgtagatatggttatctatatgtataacaactacacatcaaatcatgcgagaacagggtaagttttccacgagtgctttcacacatgcatgcaaaacctgtcctactttagtttttttttcccaagaaaatctgctatttatctctggtcatccagtccaaaagagagaaaacacccctctctgccgagtctcttccatacggtcttaaattaactgaataagattgctgacttcaagagtgaaaaaaaaaactatatatgcttatatatatatagccgtgtgcctatcggtgtaaattaaccattttcattataaaaaatgggtcgagtgaaagatagaagagaacacgacataagtgctaaacaatatttcaaattaagcgcactatggagctataattaataacatcatatacagagagctctatttaagaagctgggacatttttttcctgggaattaaagaacattccctagaagaacatattacattactcatctagaagaaaatgaatcaaagcgccgaacaatcaaaagcattttgtagaatcagagaaagcaaaagacaaagacaaaactgttgtaggattgaaagaattttacacagtacacacactagcgaattctatataaaccaaagacaaaactgttttaagattgaaagagccgatgatgagaaaaaatatacacatctatcactgttgtgtatatggagtatatccaagaaaaaagagctgaccgaaaatccgaaattggaaagccatgacctcaatctcaactcctcaactgaacaactcaattagaagcacgataaactagaattttatgtttattatgataaattttatactaattaaacacgccaaaatgaagaacgtaacttaccggcaaatcaattagggaaatttcagaagaaaaaagaaaccctgatcgatcgacaaagagccctaacaatagtacgatattccaagaaccgacagagagatcatcacccagatcgagatttaattgcaagcaaattaaacagaaataactgcgagcgagcgaaggagacgccggcgaggaagagagaagcatatatgtgttggtgtgtgtataactgtatatacatgcatacctggtgctggcgaattggaagagcttgccggtggcggagaagacgacgagcccgacctcggcgtcgcagaggatggagagctcctcggccttcttgaacagccccctcctccgcttcgagaaggtcacctgcctcgccgccaggttgtcgatcctccgtattgctatcctctccctcttccccgtcgccgccctcccctccccctccccccttcccccgccaccgccgccgccagccatatcagatcacacaccaattcaccaccgccgccgcaaaatcggggaggatcgatcagacgaaacaaccaaaaccctagccgctaaccgcaccagccaaaccagccgcgagatacgcggcgccgcagatctatggctgcggcggcggccactcccgctactactactacttatggaagaaaaaggcagggaggaagggagcaatggagaccaccaccaatggaagcgaagcgaaggaggcgagagagaaagagaggaaacaggagcagggaggtagggctagcctatagcactgcagcaggggtaggggtaggggtaggagtaggacgactcctactttttatggcaaaggctttcaagtggtggagccacagggacggaggcaggtgtccgccacgaggtggttaggactcaggccccgtctagatctcaacttaaaaattttcaccatatcatatcgaacgtttgaacatctctataaagttttaaatataggtttagaaaaaaatttaattgtacatattacgactaatttgtgaaacgaaaattttaagcctaattgctctatgatttgataatgtgatactacagtaaacatttgctaatgatggattaattaggtttaataaattcatctcgcggtttattgacggattatgtaattagtttctttattagagcccgaacaacccatacaacaccataatacaatatccgatgtgacacgctaaaactttacaactgtatatctaaacatcccctggggacgcagggactagtgtaccctccctccacgccattgcccctgcaacttttgacattttgaaaagtcacatagttctgggttcaagagccttcggaactatttcgaagagcttaaaattttaagaattaaggggtgtttaggtgaggctaaaactttttagtccatgtcatatcggatgtttgacgctaatttagagtattaaatatagactaataaaaaaaactaatttcataaataagagctaatatgcgagacgaattttttaagcctaattaatccataattatgaaaagtttactgtagcatcacattgtcaaatcatggcgtaattagactcaaaagattcgtctcgcgaattagtccaaggttatggaatgggttttataattacagtatgtttaatactctaaattagtatccaaacattcgatgtgacagagacttggaataagtctctgtttcccaaacaccctcctcacttcgttaaaaaaaatcaatcacatcaaataggtttaactaagttagtggtttttttttttacagatggagtaattatactctttctattaaaagaaaatctatatgttcagattcatccgtagagttgaattcttttttgacatatggagtactccctgattcgtccaaaaaaaaagacaatttaggaggagatgtggatctaggagggttgttcagattcgttgtactactagaaggagatgtggctctaggttgctttttttttttgacggagggagcatttgatagtcatcttctgataatctaaaaaactaggtttcacaccttatacttctagtttgttttttagactctgacttcaacttcttagaatctggacgaaaagcttaattgtttgggaaacttgttactccatccacctcaaaatataagcatttttggaccctgacacggttttcgagatgctactttgccaacaatatctataaaagtaagatgatttaaataaaaagagttacatactatgatagtctgtttgatgataaatccagtaacatcattttttttcatgattgatcttttttctattaatggttaaagtttaaaatgtttgggttatcactgtactaaaaatacttatattttagaaaaggggagtattttagaagaaactgcagttgtcccactccataggatgtgtttagtttctaaaaaaagttggaagtttgggaaaagttgaaaatttatgtgtgtagaaaagttttgaatgtgatgtgatgtgatggaaacttgaaagtttggggtagttggggatgaactaaacacagcctatggcatgtttgtagattctgaaaaacaaaagatgagatgagctgaaaataaatagcttctggcttctggattttagttgtacttttgtatattcctcgactacaacattttagttgacagttgttaaagggcctagagatatattacagaattctccaaattctaaaaagtaacgagtgagaacctagaagaaatcgtagctgtcagaggctcctcaaattaaacagatcctttgacagctacagtcactactacgtaactcattttgccatacggggatatccatttttccgtgcggtcatttgacccgcctgcacaccgctgtctgtgaaaatcagtattttcgcgtgcggacggaaggaccgcttgggataatcgattatcccgtgcggtcatactataccacccacacggaataaaaaaaaccaaaaaaaaagaaaaatcgtcgcccgcccgccggcctgcaagcgaaccggccgccgcaactcgtcgtcgacatcgtcgcgcccgccgccgaccctcaccgccgtgagggacggccgccgccgccggatccgggcgtgtgggggccggttgccgtcggccctcgccgccgccgcctcgccgcacccgcccggtcgtcgcctcgcgaaagtagggagaggagagccctccctcctcgtcgtcgtcatcgtcgtcattgtggtcgccggcgccgctcccgcctcgtcgtcgtcgccctcgagcggggaagggcaggagaggaacgctgccgtcggatccgggcagggacagccgcgggccgcccgtcgttgcccgccctcccgcccaccggatccaccgcccgcgcgctcccgtcgccactggggaggggaggagccgcggccgccggtcatcgccctcccgtccgcgggatccaccgcccgcgcgctcccgtcgccgccggggaggggaggagccgcggctcctcgcccgtcatcgcccgcccgcgcgccggagttgctgctggggaggggaggggaggagctgcgggccgcccatcccgtctacgccagccgccgcctccccacgtccgcccgccgccgccgagctcaccgccgtcccgcctgtgggttgtggagaaggaggcaactgaagaagaaggtgagagaaagagggaggaaaatgagtggaggagaaggaaggtgagaagataagggagagagaggagagaaggggccgcggggagagagaggaaaattttgaataggatgggagggacgactatttttctgtgcgggtggattaggaggcccgcacgcgaaaatagggttattttcacgtgtgggcctgttaagtcacctgcacacaaaaattgattttcgtgtgcgggcgacgctcccaccatttttccgtgcagtctgacttacggaccgcatggaaataaaatggggtggtgtccaggataatcaatcctgtagtagtgagtttcttctgaaatgttcggtcctaaaaaatataagctaccgaaaactccgtaatctacaaaatgagctactgaagaataaaagtaactcccttcgtcctataataaaatttaggagtaagtttcattcatttatcttaaaataagtttatttttaataatcattacatcaaaattcatgaaaattaaaaaatatatcggaagcagataaagtactggaaaatgactgtattaggatttaataaatatggtattctgttttaagctttatactccctccgtcccaaaatataacaatttttagccatcaggatttgtctcaaaatataacaacttctgcaccaacattctctttccaaccaatcacaaccctcaaccacttacttctacctactttcttaataaccgtgtccagccctaaaatttcttaggacctgtttggttggtgaaataaaaatttttaggtgtcacattggatgtttgaccggatgttggaagtggttttcggacacgaataaaaatactaatttcgtaactcgtctggagaccgcgagacgaatcttttgagcctaattaagccgtcattagtacacgtgggttactgtagcacttttatgcctaatcatggactaattagtcttaaaagattcgtctcgagatttacatgcaaactgtgcaattagtttttctttttatctatatttaatgctacatacatgtgtctaaagatttgatgtgatgtttttaggaactcaatagccccttatattctaggacggagggagtattgatatatgtagaaaattaaatttattttaggatggagggattaaaagaatcaactcttaggctgtgtttagttcacactgaagtttggaagtttggttgaaattggtacgatgtgatagaacagtagttgtgtgtgtatgaaaggtttgatgtgatggaaagttagaagtttggaaaaagaaaactttggaactattaggcccgtttagtttcccaaattttttttctaaaaacatcacatcgaatctttggacacatgcataaagtattaaatatagataaatgaaaaaactaattgcacagttagggaggaattcgtgagatgaatcttttgagtttaattagtccataattagccataagtgctacagtaacccacaagtggtaatgacagattaattaggcttaaaagattcgtctcgcggtttccaggcgagttataaaattagtttttttattcgtgtccgaaaactccttctgacatccggtcaaatgccctaaacatagccatgagagaggagagaggacttctgacatccggtcaaatgccctaaacatagccatgagagaggagagaggacttctgacatccggtcaaatgccctaaacatagccatgagagaggagagaggaggggaagggggggtggaagaggggtacgttggcatcagtcggtccatcgtccgtccatttctttctatgacggcaaagcctcctgctatcgttcagaaattgatgagcttttgtagagtagctaggggtaggagtatcctattttgagctctcgccgaagaaactgttttgggtggtttttctcgggaggatggaggaaggaatcgaggaacagggaggtcaggagggacaacgtactgaccgatggattgatgcgtggacgatgcagtagctaggcggtgtgatgaggtgttgccgtgttggagcctggaagacgggttggtggagtgttgcaaacaaatttaggagtaggtggttcgttcaggtcaccgtttatcaataaatattatcgtcacgtttatttaagttgaaatgattaaattcttaatcacatgttagcaaggctaacatgatcttgatacacgttttatgttactaataacgcgtgagatccaatttattgaaagatactctcgctactaactgcgaccacaaccaaacaactgctaataaaattaaactcacctaattttaggggtggtaaattgtgacctggtaaccaagcacccacctgttatatagcaggccaaatgggtggcttaacctaacacgccacatcacctatatcggaccgtgccatgtcggcccacatgtcaagaccacagtctaaggtggtgccgtatcgtgctagggcgacgcggttactgttacagtcaatggaccggtgaaaaataaaagaaaaatgtggagatgcaaccacactatataaggaaggaaggatatatatgattcaattttgctatatatttgtcgacaaattttcttccaaaaatttaacagatgtaattacagtacaatcgcagtgtaattatactgtaacttgtatgtaattacactgtaactataatataacttgtatgtaactttcaaaaatctctccgtaacatgttatttcggtaaaatcgaggtcgtgggaacaaatcctttcatatacgtgtgtactgtgatctttttgttcgtcactagaacaaatcttgtaatagatctaatgattcaaaattacgtgaaagttatatacaagttatactgtagttacatgcaagttacagtgtaattacattgcgattgtactataattatatctatcaaatttttaaaagaaaatttgtcgataaatatataggtggttcctgtatgattaacatggatcaacactaaaattagtatagttataagattgcatagcttacggtgggttgcgacttacgaatgatactcagcatataccagagagaatcacactagagagctgataaaattaatctcgcgctttcgttaacgatcgccccttcgatctgagattgtctccggaggaattgatgctcctatcgtgtccttacaagatgaaggtaaatcgatcgaatattgatcggtcgtacgtgtgccgccgtggttttatggtgtttaatcgacggcgccgtacttagcttactagctagctctaattacgtacctacgctgtctccctcaccgggcactacgactcacttcccacttccccctcagccttgatctcgatatttgattgtgccgtcaactccaacatcaccttgatcgaacgatttcccacaactcaacttcttcgagatcaccatgattgaacgatctccgagctgcttcacaactccactcgatctagactatgctcgtgagatcagattgagctaaatccctgataaacatgtcataaacacacatctagtgatgattggacgacactttcttaataatgaaaacattcgctgaaattctctaccgatcaagcatcatttttcgtataaataatatatatgttcttgatttttttagtcaaatagaaattttgttttttctattcacttttaaacaccatatttctatcgtaatactccctccgtttcgaaatgtttgacaccgttgactttttagcacatgtttaaccgttcgtcttattcaaaaacttctgtgagatatgtaaaattatatgcctacataaaaatatatttaacaatgaatcaaatgataggaaaagaattaataattacttaaattttttgaataagacgaacggtcaaacatatgataaaaagtcaatggcgtcaaatattttgtaacagaggaagtaataaattgctaatatgatcaattgttcgactgaccgaaaatcgtttcgaacaaatgctaccgttctcgacgttttggaccacttctccctacacattctcctatccggggcccagtgatgcaaacacaaacaaaacccaagtcgcagaggttacacggcccaacagaaagcccacctatcctctccccacggcccagtccgcgtccgactccgcgtcgcctctcgcctcctctctctcttcttcttctcccccaaatcccaattgcttattctccttcgacaagccggccaccgtccatcgctgcttcgcttgctcccacccgaagcaacgcgaacgcgacgcgctcccctccccgccacctcggggcggtgagaccaggcctccgcgaccctcgccggccgtccctgagcgccgcccgcaccggcaactcggtttcgaggctgatctcggcaggtttgtgtctgccctcgatccaaaaccggtgctgtggtttgtttcacgatcccgttaaagttgtcgaatccgttcggcgattgtgattcaggtagaggaattagttttgcaagacaggttttacaaggaattttttgggggggagtgggggacacgtttttatgctgttgttctgatgacttcttgaaagtcacacccaagttagttagttatcagcagctcatggtaatcttcagtgatggattaaccgctctacggtatctaggcaatttgagagtagaagcaagccgtagcctacagaacattttgccatccaaatgcttggcattttgatttgattacgcaggcagtaattttggagtagaaaacgcgtcctaccgaacatgagacttatcacaagtatatcgttttttgacaatagtcaataggaactctgcgttgaggggtttgatttcaatttgttctagatttgatccattcttcttccttttatttttctgatgcaaccaacaattagtctggcattggcgttagcgattaccatctactagttattttccgttagaatctatatgcatgtacagcttattgattaccaccaactgttggaacatatgtaacctgctatttctttttatgcagattgctctagtacaatgagctggagatttcctctttttgggtatgttatttttactgaaagcaatacttttttcgtttgttcttcttatgtctgttcctaacctttcctcgcatagcatttgtattctataaactgagcttcctcttttatttggtagaaagtattgtatttgttgatcagtgccagccagcaggcttgatgtgattcgtaatccttagtttctttctatactaaaaagccttcagatattgatgctcaaaaaattgctttgcttttgttccaaaagtttattttatcatccgaacagtgtccaccactcagctactctgttatttcttatggttgggtcttcagttacgctgaatttaatttttagcataagtaaattaacgtggctatttaatatgattcacttattgccttaagctttcctgaaaaacgagctcctctggcttactgtctttgtttctgctgaatgcttgccagcagcaactcgcagcagcagcaacctgatccaaatttccaggacaaccctacgcaaccttggtaccctcagtctgtagttggttcatcttcacatccatccacaccaagctcttccaatgttggtccacatcaaagagcttctgataattcccagtcttcatcgcgtgctcaaccatctccagctgaggctgcagggataattgctcggttaaaggacaaaaggtcagcagctaacctttttttgataagttgcttgtagcttcctgtatacgaagtttcattgtattatgccttatcttatctatactgtgggttaaaattgcaacagccttgttactttttaccatggtattttacatattctagtgtttatattagtactaaaagagagtcactagaatctaactaataatattagagtaatgaatttttaattgcaataatgatatcatggctgatattctatattctatcaattggtaatgaatgaagaatccctagcttttcagagggcacgacaatttgtgcaattcagaagggatgtatataaatgctaaaagaagtgattatgtatggttgggttgctttttataatcgccacctttactacatgtgtttttcacactattccttgtgagcatgcttgtttggaatgcaaaactgctgtatataatactgtccttttttctgcagtgttgatgagttgcagaggctgttgaaagacaaagaggcatataatgctttcttcaattcactcgatcaagttaaaacccagaacaacgtaagttttgttgctgagtacacaggtgtttgaaatttgtattggtggctgtacttagatgtttctgtatttcctccagtagttaaagatacacaggaaactccaaactatatgctccaattatttttctttttctttttctggcctcatatttgaggctttgggctgtggcacatctcctgtgatttgggcattaatgtgggtgattattctttaatttatattcggtgctgcttttaaccttagatagttgacttgtctgaatgctagacctcttgtcaatttgctcacttcttgttctttcttaatgttcagttacgcgatgagcttagaaaggagacagtgcaacttgcaagtgagttattcgtgtttctgttatcggcatgcaatgcttttttattggattgtcttaactatgaaaaagatataaacaacttgttagttactactgtttctaaatcaaatatggttggatcttctgaacttacaggagaaaatttggaaaaagagcaacggatcttggagctcaggaatcaggtttagtactgtgacctccatctcagaaactataagctactgtagccatgatgttcattgttaaacgaactttaaatacagttaatgctataataatggattttgtctgcgtttcaattttttttcctgagattcaaatcgcatttattattgtgcagtgcaccattataagaactacagaactagctgctgctcaagataggttggctgagttggaaaggcaaaaggatgagattatgaggtcatattctcctgctgcactgctcgacaagctccaaagtaagggttctgaacagctgcatctgcatcatttttgctgtgtattttaataagagtctgtgctttattatttgtagttgaatacattatgtgaattagtgcaccgaatcatgggcatgttttgtatgtatctattgtttgctatgaatgcactacccttctgtaaccggccaatgatcaggctaggactggtactagcgtcatagtggcgtctatgttagttccatttcgtgaaaccttgatttatgcttctgtcattgtttgaagtccaaccatgtaatttaatttttcaaacacccaaccgcaaccgctgacattttcatgaattgcttcggtgcttgctcagaatcgatggcaaagttggacgaggagtcggaggagctgcaccagaagttcctggagaaggacattgacctcccaacctttgttcagaagtacaaaaagctccgcgccgcctaccacaagcaggcgttgctccatctcgccggcaagacctcacttcgctgaaatccatcggccgtctgtaggacgaacaccctgttgtatgagtttcccatttctccatcattctattctgtcgtggtgtctgtccacttggctgtttatcagtgccgcttaatattgtagggcttgtgaaaacgtcagggtttgattgcatttgtagatatacgattgtattcgcatcatggaattttatgtatgatcatttggctggtgccaacgccagtgaagcattttgacctgtcagagacacggaaacaaatataaatcttgtgttcaaatctgagcacgaaccaggattgtgccttgtgcaaatcttgtacgtacaaaactgctccatgctccatatagtcatatcaggcattcctttttgcttatttcaaaaaaaaaaaaagctaggattgattgaatttgagagttcctgaatgaaaaaaaaaagaagaaaacgattggcttttccaacccatttgccgcaagctcaaagcatcataacctatgggttcagaacccatttgcactgcagatgaagtggcaggaaattcagatgagctgtactacatctggataaaactgcatcctcccatgagcttttgcacgggattggatctgatccctgcgaccgcatggacgcatgcaagcgaggctcgcacgtagaacaaaactgcattattagccgtggattagaacgatccaaggcgagctttgtctgcaactctgcgtgcatcgctaattcgccgcaacccgcaaggaacaaggtgcccgtgaacctgctccctttggaagcatagggaaccaactgtactccctctgtttcgtattacaagtcatttaaatttgttctaaatcaaacgtctttcaaattaactaaaattttaaaaattgtataagcattttcagcaagaaacaaacttacttaaaaaatgttattcaattataggtttataattgatgagataatttggtactatagatattctacttttttttctacaaatatagttgatatttaacataggacaaacctgaaataacttgtaatataaaatggagtagcaaactgacgtacagttggcctcccgaagattagcagatatgtgttagattaatatatggagtatagatttgttctgtttgtgttaggaggaaacaggggagggttttgggcttactctcaccgacaattcgatcacgagatagatgcattaatagatgtaggaagatctgtctatgttccttatccttgcttctcctgctaattaatttgctgataagtggctaaaccttgtacatagccatggccgggaacgatgcttgccacggatggacgacgatcttcgtgctgaatttcagtagcgtcctgcaccgttgactgctggtttgttcgtttggctggctggcttgttgatgttgcctgcttgcaaggcacttttgaaggtacaatttgcgtttgtcagctgtgctctcttctgccaggacgataggagagttttcggacaactgcttgttctagaattttaatttctcctaagcagttctcacataaatgctagttaccactgattcgccaaaaaaaattatgggtagttttatatatatatatatatatatatatatatatatatatatatatatatatatagggcaccatggtatctaatgtacaaaatcactcaaatttttcaaaattttcaaattgtgagtatatacctagttataataattcgattcatatctatacctatcaacaaaacaactcaaatttaactttatttcacaatccatgattacatacctaactaattatatgtatggatgctatatacctagaatcaaaatctaacaaaaacaagttcaaattcagtacaaacatgctttgaactagttagtaaagtagttaatgttaatacctaagtaattgaaaaagtttcatactcatttgaattgggtatatactcaatttcaacaatggtgcccgggcaccatggagcaccaaacaaatttaatatatatatatatatatatatatatatatatatatatatattcttaataaatttaaagtcaactttgaaaaataaactacaactacaatgaaaaagaaaatcaaaatgaactctaagattaatttttaggtggcagcggctaataagttataggacaaacgatggaagcctctaagatacttgagttgtaaaatctaaaaaaaaaagtaaagaaaaaaaagctaagtgtatttttagattctcatcaattagcaagtcaatacttcctttgttacaatataaatatacctagtgcgagatgtgttatatcttacgactataaatctgatcaagcaactatttagatttagatttatagttctacaaatacaaatctggacaaataactatatgcagattcgtaatcgtaggatatctcaagttctatcgcagatgcatttatattgagaagaaggttacttagccatctgcgcgctgagtacagcaatgcacgggccatccgctcgcggctgcgtagtacactttttacgtgcgcacgcaatgcatgccgagctggatggaagggatgggacgtgatgccgctggctgctcgtgaagaaggaacagacgagcagtagaatccaacccccaaagaaaggaggccgcggaatcacgcgtggaggaacggggatttgtacacatttggatctgtaggcgtcacagcacaatagattcaccgagaaaatatccatagtccacatcaatatttccctagctagttaatagtgaggaagcaaatacatgtactgaaagaaaataaaaggagattaattgtgaggaagcaaatacatgtactgaaagagagaaaaaaaaaagagatttggagggatgtgaaattgtgagagggctagggattgaacataaaacctcagagttgaaaccacacgccgactactattacactatcaagtgcatctcaattacatatactacaggatgagagtcagagagtcggacatggcagacatgcatatgttactttgtaggaggaataggcatgtaggttacgttttatatcttgagaagcagcggacgagaatatgaagaaattggaaaaccaacttctaatttcttataaattttctgaattatacaaagttatccttttaattatgtaactaatacagctataaaaaatatggataaaaaagctaaaagctcctcctaaaaaaagccttaaatatctttctaagatacccctctataggaagtgtggttatcaacacgtacaagcatgcgttactcaccaatggatcgtggtccttgaacaaatcattcggatcacatgtttctgcagactgcagaaaataccaggatgcgagcatctacgttgatgttatttgtacacatccaagttaataattaaacaagttaacctgatcgccggtcacagccaatgacccagagaataatgcaaattaacagtaattattaacagacactcaacggttgttgattggttgataactaagctaagacacacctggtgattcgtcgacagggtgtgatgatccttgtccttgttgacccgtgaagaagctgtctcaggacgtgtcaggaatcaaggatttcgtcaggttttacctgcagtggccggacaaaaactttgacaggatgtggtacaatattcttgcccatctttgtgacttttggtcgcactcctaggcgtgtttaacttccttaatctgtcttcctcgctgtctcagcttaactaagtaattaaaagggtcaatttggttctgtgcatctcactccactacaattttgcatgtgataagccagtattttgcttctccataattaatcattgttcttgtgacaatttttgtctagtgagagattcttatcccaaataatctttctactccaagggagaagcagaacattgttcaaaaatcaagaccttatcataatttatttactaccaccatgagatgatgattgaggtaaatagtaaagcatcgaactgtacggcggtggagttgtgagggcataataccaacgaccaaagttcacattctttgagcatgtgttaggttagtcaaaagatgccaagatggtgtccgtatgtgcttggtcaaacggttaattaaactataaccttcgaaaaacaattaaacttaagaaacaactatatgtctataagagtataagcaagttaatcctaaagacttatttctttttcaaattaacgtgttctgtaaaaatcatcggcgatactattaactcaaattaatatataaatggtcctaaaagcttaaggcccctttaaatcgcatgattgagaaaatgtaataatagaaaaaacacaaaaatttgatatgaatgtaagagtaaaatagatgattgcaaaacataagaaaaacacagtaatgaccgtttgattggaccgcagaaaaaacgcaggaattagaggagagataaaaactcaaaggacgatttccatgaggtagaacctcgtgttagatttcctccaaaatttacgtggcattagacattctataggaattttataggattccaaaagatttcactcatttgattcaaatggctatataggaaaaatttctacagggatgaaatcctctaaaatttttatgaattttttttgaatcaaaggagaccttaataatgatgaacttattagcttatggtatctctctttttcgtgagcacgttttttcaagccaataaataatctgtttttacagaaactatttacgaaagttcattgtcaaaaaataaatatatttcaaaatttttaaaatacccattcgtctctaaaaacaaaaacaagtccaattctaactacgaacctagatactacttatgttagagattttatttttcttttggacagagtactagagtagtacttaatgatttgaatgtgcgctattagcccgtcatgttgtccgtgccgccgtaattaagctcaaaccattcaatcgatcggcgccaaagactacaggatcaacagccagaaaccctatataaacccagctcgctcagtcacaatcctcactcccctcagtgacactctcttagcaagcaagctagcttagccaggagagctccattgccatggcggccaccaccaccatccctctcctcctcctcctcctggccgccaccgtcgccgccgccgccgccgagctctccgtgtaccacaacgtgcacccctcgtcgccgtccccgctcgagtccatcatcgcgctcgcccgcgacgacgacgcccgccttctcttcctctcctccaaggcagccaccgccggcgtctcctccgcccccgtcgccttcggccaggcccccccgtcctacgtcgtccgggccggcctcggctcgccgtcgcagcagctgctgctggcgctcgacaccagcgccgacgcgacgtgggcgcactgctcgccgtgcggcacgtgcccgagcagcagcctcttcgccccggccaactcctcctcctacgcctccctcccgtgctcctcgtcgtggtgcccgctgttccagggccaggcgtgcccggcgccgcagggcggcggcgacgcggcgccgccgccggcgacgctgccgacgtgcgccttctccaagccgttcgccgacgcgtcgttccaggcggcgctcgccagcgacacgctgaggctgggcaaggacgccatcccgaactacacgttcgggtgcgtgagctcggtgacggggccgacgacgaacatgccaaggcaagggctgctcggcctcgggcgtggccccatggcgctgctctcccaggccgggagcttgtacaatggcgtcttctcctactgcctcccgagctacaggtcatactacttctccggctcgctccggctgggcgccggcggcgggcagccgaggagcgtccggtacacgccgatgctgaggaacccgcacaggtcgtctctctactacgtgaacgtgacggggctcagcgtggggcacgcgtgggtgaaggtccccgcgggatcgttcgcgttcgacgccgccaccggcgccggcacggtggtggactccggcacggtgatcacgcggtggacggcgccggtgtacgcggcgctgcgggaggagttccggcggcaggtagcggcgccgagcgggtacacgtcgctgggcgcgttcgacacgtgcttcaacaccgacgaggtggccgccggcggagcccccgcggtgacggtgcacatggacggcggcgtggacctggcgctgccgatggagaacacgctcatccacagcagcgccacgccgctggcctgcctcgccatggccgaggcgccgcagaacgtcaactccgtcgtcaacgtcatcgccaacctgcagcagcagaacatccgggtcgtcttcgacgtcgccaactcccgcgtcggcttcgccaaggagtcctgcaactaattaagaattaagattaattaagatgatctaccgctatctcatctagagccaagctgctgctagcaaatgcacgagaacggcttgtgcagtctatgtattctcttcttttccctttctgaaatcacggtgtcctcttgtgggcttgtagctttccgatctgtgcaataaggtatacgtgacatcaaaacttggtcacgggcgcctgtctcatctgtatgtgccaatagggctatatctaggtgattacgtacgtactcagggttttaccagtgtgaattggtatgtttacatcgatcttaaagatcttcatcatttgcatcgctagaaaaacttcatatgagaataccaaatcaagggcagcaattcacaagtatgagtactgaatcgattttttatgtgagcagaattatagacccaagttactcatcagaactcacaagatggcaaccacacatatattccttgcagcaaatgtcactgtgatacataggccaaacagagaacatccgatcagttacttcatgttgttggatatttttgagctgcgggtctgcagcgcgcgtatacaacagggtgaatgccagatcagtttgccttggtgctgttcttgatccactccaggtacttggtgttaccaccagttatgggaagagcgataacttcaggaacactgcatgaacaagttaccagtaaatctgacaggaacatttttctcccgggccggccgaaagaataggccaaccaaattacattaagatttcagggagaaaagttacaagtaaactatagtaaacagacagattgtacagcaagatcaataaactgaatgaagcttactcgtattcatggttagctttgacatgttcagtcaaggcatctagaagagattctctagtcttgattatgagtaactcttcagcatcagtttgcacctgcaagaaggcagattattgatcactaaatcctaggtctgctaaggagcaggaaatacatcatccgaaggaatgataaaccactgaattacaaagatgagaactattaataatctattcagtctataggtaaatttccacaacgcacctttccctcccaccaataaacagattcaatgcctgaaaaatgtacagaacttcagtataattcagtataaacgataatatgaaacaagctaattgcgaatcttggcacagcacctgttgcctaacagcataaggaagggcagcgcaacaatcattggacaaccaaagcaccattatatttcgtgattcaacagagttcttgtttcagtccaaagtaaggtaagcaaagctttaaaagggtttgttcccacatatgatggattttcttgatctaattcgtttacactgccacctctactaaaccttttcagtgtttccattaaattttttgaaggtaataaagatgttttctatggaatacagagggccaataacactgacatatgatctgggttcataggcatatagtgtcagagaaacggaagtgatgagcaaagtgacaaaccaggcactatattgacacaagcagctagtttctcactgatgatgctctgtgacagcttcttccctgcagtagatgtgaaacatgatgcttttaaagactgcttaaacaaaaggcagaaatagatgctaaaattaattaacaaaaaaataaacgctaaacaacaatattgaaaggagaaacatgatgctcacaagacaaatagtgcaagatcaatctcaactctaactgctttatcttggaggaaatgaaatatattgcctagcaagttccacaaatgaaatgcgcacacaatataacaagaacaaaaacacagtaaagtactacctgcttccctgtttggaacagtcacatacacaacaatggatggcacggtggtggaagcggactccatccgagcagagctgagacctcttaccctgagaaattttgcattcagatatcactacaagaagatagaattcaaactagataaaagcgtagcaatgttaacctccaaagttcacacatccatcaatgtcataacatggataaactacactcttgtaccatacttcagcgattcaattttttagcagccgcatgttcggacgtgcctagcaatttcgcgggttccacacaaaatctaagagcaaagaggaaagagaaggttacccgaggaaggggaagcggcggcgggagaaggcgcaccccgtcctgcaggcgacggcggcggcgctggcggcgccgatgcttaggaacagaacgccccggtgagcgacgagcggcccccctctccggcggtggcgcggcgcggtgcggcggaggccgcggcggcggcgggagcgagaggtcggaacggcgcggggaggagtggcatttttcccgacgagcggtttatgtacacgtcagcattttgcttccttccttcctccctcgcgaagacgcgaacccgatgctttgctcttgggccgggccttcctctggtgggcccacatgggctaggctcgcatcgagttcgcttttgttctctcgcgtgatacttaaccctctcgcttcgcttggaacacctccaaaaccctacttccgcctccgcctccgtctccgcggattcttcgagctcccggccatggctgaacccgaggtggtggttgccgcaggtggggaggcgatggaagccgaggcggcggagccggctgcggcgaatccgagtcagaagagggagagggaggagggggatgactccgccgccggcgctgctggcgaggaggcggcggagggagctgcggccaagaagcagaaggtggagggggagggggaggcgaagggagcggaggatgaggcgaagggggaggaagaggagggcgcgaaggaagaggaggcgaagccggtgaagctgggacccaaggagttcgccacgggcgtcgagatgttcgactacttcttcgccctgctccactcgtgggcgccgcagctcgagatcaacaaggtgagggttgcgattcggttgtcaatcgtggccggcctctcgctgtttttggccgcgaaaaaaagtttcttgctttattgatgactcgcgaagtcacgatgtgtgttgttgtagctaaactttggtatgataaaagttttatccttgtagctgtagtgataagctggtaggttatttaattagctttagtggtgtataatggtgcccgtattaggtagtactttgcctttgaaaccggtgatccaatcggctaaataattcgacatgataatctgagtgttcgccttgtatttagccaagtttgcatgaaactccatagagcccccagattcgttgagttgatctgtcactgtcaaggatgtttttaagcttggagaggctgctttatgcatttcgtatgtatggtaggtacttctaaaccaatgatctttgttgggttgagttcgttagcaccagtgattggcacttaaacattatccttctttcacctagcatttctttaggttctcatgggcaagtttcatttacagaatagcatatggcgttgaatactccgtagagcccccagtttcattgggttgatctgtcatggtcaaggatgttattaagcttggagaggttgctttaggcatttcgtatgtatattaggtacttctagaccaatgattttacttctaaaccaatgatctttgtgaatggacatgttgggttgagttcagtagtaccagtgatttagtgcttaaacagtataattctttcacttagcttttcttttaggttctcatggtaagtttcatttacggaatagcatatgacgtttaatactctttcagctgcactgccttcatatgttgggactccatatgagttcttccatgtagtgtttgacgaactgggactgggttctttacttaaggatggttgtaccacaaggagaacagactctatttggggcttcaggcatgtttgtttaacttgaagtgttatgttatgacttgcaatttaaatctggttagcttgcgacctccaaatggtcctttggtgtttcgcaacattttctgttaaaattgagttagaccataagtagcaatttttttctctatcaaagaaaattgttggtttattcctacctgtttttagcaagtatgcaacagtagaggtaaaagagatcactttgttttctgtcatacatgaacaaggtctctaggtggtttgctaatcactcttataagaaaattgtattggattaaggctgcaattatgatatgttgcacataaattgaactgtctgacacatatatgagttacaaagaaatacactatgattcttcatctacatgtgatcaaaataatcgcatacttgagccttgcatcttttacttcatcgttgtttggaattggaagataaaactatttgtcagtgggatgtttatgttaccacaataagctcatctctagttgcccttgagaaaaataagctcattgctggaagtgactatagtttcacagtaatcaattgtggtgacttccagatgcctatgtgcttgtgtactgtactttgtctggttcaaactatccagatgtcactttactttttgcattgtcattgctactgtcacacttgagtttgctgaatcgcttaacttttgcagtatgagcatatggtgttggaagacctgctgaagaaaggccatgctgagtccgataggaaaattggagcaggaattgaagcatttgagatccgcaaccacccggtgtttcagagccgctgtttcttcgttcgacgagttgatggatcctctgatgatttcagcttccgtaagtgcgttgacagcatacttcctctcccggaggacatgaagattggcaataagtccaatggcaagaagggtggtggccacttcaagggcggtggaggtaggggaggaggacgaggtggtggccgaggtggcgggcgtggtttccgcggtcggggtaggagaggcaactaaaggactcaataaaaccccgaaattttttgcatgcctaataccaatccttaagattgaggcattcatggcaacatgtgcttgtttgtctgccttctcctagagggactgatgctccactcacttgtgtactgtgaaagtgcaactatgataagatctcgccgatctgtcttcccatatcttcaccgcattctgtttgagcgatttgtctacttgtcttcacatggcatattttgttttgtttggttttgacatctcattttctgtgtgatgatcatattgatccggcttttgtgataaaaccagaacatagtctgtgaccgctgaccggtcaccggtcagttacagtattttctgggaagatcgggaattcagttgtggtctgaaaccacgggaaccgcatgcccagaccaccggtgtaaaaacgatgtcagtgtgctcgaacaaactagtgagttgtgatggtcatttggtcaacttgcaaatcgcgagataagtgcacaccaatgttgtttttgggcactgctgctgggcacagacgaggaccacggcgaattggttgtgtgagttcatgcgatctggcacgctccaatacggccaggaagtatacatgatacattgatactagtagtagcaatgtaagtgcagctcagctcgctcctgtaggctgtagtcctatgtgagttgtgactgaactgaactccacggcaggaagcatattcccgccatcatctccggtggttgacggccttttttgtcgatgattactctataataaagccatctcccggttgggcgagcatcaatggcgaagtagtgagggtccagtgaccactttctcctgtgggatagagctgaaacaaaggaaacatcactttctcctctgggagtaatacatatccggtccaatgcactagcagtctagcagcagcagcactaccgctgtccggttgttgcttgcttgctcgtcagctactactactagcttagctagttgcagtgctggattcttgacggtagctttactactactttacggtatcagcaatggcccatttgaatcaaaaatcctacgaaggaatttcgtaggatttaaatcctatatgaattttcctaataatcatttgattcaaaagattgaggttttccaaatcctatgaaactcctatggaatggttcattgtacatagattttagagaaaacttactggttcatcgtatatagattttagaggaaacttaccaagagctacaatctcttgaaaaatttccttttgagtttacctttctcatctaattcctgtatttttcttgcggtccgatcaaacggtcatttatatatttttcctacgttttgtaattttctgtatacttgtacttctgtttttcatgtctcttgtttttcttaatcatgctattcaaacgagcctaagtgagtagtaaggggaggaggagcttttcatccgggaggctggagctgcttttctgggatgcagcacgttgcacggggcgcgcggaggcgagaatatgcgtgtgcgggatgatgtctcccggacatgtgtgcgggtgcgtggtgcgtggataaggaaattcaccatctgcctgcctacctgcacgctgtgttggtcgcgtgttccgccggccgagagcaccatcggacgatgccggctcgctatcgccgattcgctgggaagcggtgccgctgctctgctctgggggcgcacggcgggtgctgttctgtcgatcgtgtgtttttgtggctctaccgtgtgtgtctcttgggtcttttttgggcccagcggccttatttagagagacatcaactaatgagacatggagaaaggtccaaaaataaataaattggcatgtgaggtagtatcagatttaagatatatcacgtcttatacgtgatttgttcattttagaaccaagagaaataaattgagtagagttttactattggtcaaatttggagtatgattttggactatataaaaatgtaaggctttataaatgtagcttgtcttgcttatattaggacagttttttctcctctttctcaatctttacttacttacttgtttttcgcatacacgattttaaaattgttaaatggtgtgtttttttaaaaaaatatattaaaatattactttaaataatcatattaatcaaaatttaagtaactaatacttaatagcataagaaaaactaataataaaaaaattcaaataaaatagacggtcaaacgctaaaaataaaaattcacaacaacacttaacatgtaacggatgaactatgttcttattcatcactctgttttacgtgtaatgtaacggggaaaaggttcatagcccttgatgtccaatacagccctaaaaacttttccaaacaaagttacgttttagtcatccaactgatcatccattaagaatggataaaacatatactacctccatcctaaaatatttgacgctgttgacttttttaaaaatgtttgaccgttcgtcttattcaaaaaaattaagtaattgttaattctttttctatcatttgatttattgttaaatatatttttatgtatacatatagttttacacatattacaaaagtttttgaataagacgaacggtcaaacatatttaaaaaagtcaacgtcgtcaaacatctagggaaggagggagtatatgtgtcgtatggtttgtgttcaaggggtgaagagtgtcgtgcaaccgtgatttctctatggtaatttaacttactgcgagtgatttcccttttggtcctgtcaaagtttacaattggtaatactagttggtactattgtgcttgaacttataaacggaaaaggggatccaacccaaacaacaaaacacaaatagaaaataaaaaatactccaaaatccaaactaaaaacgggaaaaatagaaaaggaaaacttatacgatttctgcgccctcctcttcggcgtcttcgctactctccgccttcgagccccaaaggaccccccccctccccgccggcggcgccgcttgccgcgggggacgatgtacaagctcggcggccgtggcggttggacgcggcggacggggccgagccgctaagcgacctgcagcccctcaaggccggggacgtggggctggcccctctatccgtggaatgccccttccccacagaagcctccgcgctcccgttttcagctgtcgggcgaccctgttcactttcctgcgtctgcttgattgtccgtcacccccttttgggaattcctcctaatatgcctcctagcccccagtccacgcaacatttcttccccctataaccgggtccntcttcccgcgttttttctcaagaataccgccccctaagtggctttcaaaaaattttactctcccattccacgggggcggaaaccccgcgggtgatttttagatttccaggggtgttcccaacgaaaactcccttgggggctttctttgtcgcacactgcggcttctgcaaaaccgtatgcttttttt

SEQ ID NO: 15681 - DNA, 731 bp, Oryza sativa
  unsure (1)..(731): unsure at all n locations
agcggtnnnattangatctgctcctcacctcnnnnnnnnnnnnnnnnnnnnnnnnnnnnnnnnnnatatatatataaaacatgtgtactaccttcatcttaagagattttgcccatatatatatctacataagcaaaatcttttgtatttagagacaaaggtagtacaatatatctcatccataatacacaaacagattgtacagcaagatcaataaactgaatgaagcttactcgtattcatggttagctttgacatgttcagtcaaggcatctagaagagattctctagtcttgattatgagtaactcttcagcatcagtttgcacctgcaagaaggcagattattgatcactaaatcctaggtctgctaaggagcaggaaatacatcatccgaaggaatgataaaccactgaattacaaagatgagaactattaataatctattcagtctataggtaaatttccacaacgcacctttccctcccaccaataaacagattcaatgcctgaaaaatgtacagaacttcagtataattcagtataaacgataatatgaaacaagctaattgcgaatcttggcacagcacctgttgcctaacagcataaggaagggcagcgcaacaatcattggacaaccaaagcaccattatatttcgtgattcaacagagttcttggttcagtccaaagtaagggtaagcaaaagcttaaaagggtttgtttccacatat

SEQ ID NO: 15682 - DNA, 779 bp, Oryza sativa
  unsure (1)..(779): unsure at all n locations
ggccggggaaaggggaaaggggnaggaaagccgcccacggnaaagagnnaagaggatagcaatacggaggatcgacaacctggcggcgaggcaggtgaccttctcgaagcggaggagggggctgttcaagaaggccgaggagctctccatcctctgcgacgccgaggtcgggctcgtcgtcttctccgccaccggcaagctcttccaattcgccagcaccaggtatgcatgtatatacagttatacacacaccaacacatatatgcttctctcttcctcgccggcgtctccttcgctcgctcgcagttatttctgtttaatttgcttgcaattaaatctcgatctgggtgatgatctctctgtcggttcttggaatatcgtactattgttagggctctttgtcgatcgatcagggtttcttttttcttctgaaatttccctaattgatttgccggtaagttacgttcttcattttggcgtgtttaattagtataaaatttatcataataaacataaaattctagtttatcgtgcttctaattgagttgttcagttgaggagttgagattgaggtcatggctttccaatttcggattttcggtcagctcttttttcttggatatactccatatacacaacagtgatagatgtgtatattttttctcatcatcggctctttcaatcttaaaacagtttgtctttggttatatagattcgctagtggtgtctgtgtaaaatctttcatcctacacagtnnntgcttgctttggtttcttgat

SEQ ID NO: 15683 - DNA, 1523 bp, Oryza sativa
  unsure (1)..(1523): unsure at all n locations
ggcgccttgaattcgtaaccnnnnnnnnnnnnnnnnnnnnnnnnnnnnnnnnnnnnnnnnnnnnnnnnnnnnnagatctttaggatttatgaacaagttattgttcacgttatcagatgaactttgtgtattctgagaactgagtgttctttcttgtttcaggcaaataatggcaacttctctgtcatggagggagggagtaggaaacaacctttctccaaagttccttctttgggtggtttgttggaactgttggatcagtgagcctataattcgagccaactatcttcgagtgagtacagttgacatgagcatcgaatgcgatctcgccttatctttcttttagtacctcgttgctgaccatcccctttgacagatacactgatgtatggacaatgctaggctcagtcagtagtcagtggttgggttgctgctttcttcaagtttcctgccgccctgatgctcgtcttgcacggagatattcagatttactgtgtattttggtgaatggtaaatcataatttgccctgtaatgttgttgctgtacatgtcagactagcctggattatttcactcaatttgtgctagtgagaaccacttgctacgtatggtagattgataataaagagattgtgctgagtccatgcatctaaaactcggatactttttttttttactgaaaacagttggagagacttctgctgcgctatattaatagatatataataaaactcagatacttctcccttgaattattagttcgtttctgcatatatttaagcttaaaccaaacatctaaactattaaaatatcttccatcagattgagttgtatgaattctcttaccaatgcaatcccaaatgtgattaatgaggaaaagtttttttttcctctttctgaataaacccgagttcatactgtacaaagttcagctgtattgggcgttcagtccagcaaccggattcaaaagtcctgcttaagatatcatctgatcttccgcaaccagtctcaccaagattatgtaactaattcatagtctttaatctcttcgttccaaaataaataaatttaatacttaattctttatttcaaaataaataaatctaatacgagatatgacaatcctatccttttgagtagctgaatgtgttgtaagatttggaggctgtgttcagacctttggttcttttttcttttgtttggattgccgctgaggctgaacctatgatcatttctagtaaaagaaatgggggttttgagtcttgctcaaaagaaaaaagatatgacacattctattatcatgaatctacagtaaccactaagaaaaacatcatgttaaacattaaggttccgttcttttctccaacaagagttggataaagattaagattttcgtggcacgcttttttaaactgttaaaaggtgtgtttcgtgcgaaaaactttttatataaaaattactctaaaatatcatattaatctatttttcaagttggataattaaaactcaataggcatacgcta

SEQ ID NO: 15684 - DNA, 1242 bp, Oryza sativa
ttataacaagatgtatgccggttgccacaatgcaaaaagtgaattctaagaatgcatactatctgcagaaatgctatgatagattgtccagaatagagctagcctaatactattgtgacaaataggacttgagtattttttcaagcttgcaaagcctcgggcagttgcttaatcatgggatcatagtgacatgtcgaacttttgtttacgaagtttgcaattggacaactctagattcctagagtttcttcggttcaagaacagaacccacacatcattgctatgatgctatctttttttaattgaaaactctgctatgtgaatttcatgacagtgttttggtttatctagcgatgaagtgcagaaatattattttcttgatgaactgtagtttctagaactcaaactcagatgtcatggtctaatgaaactttggtgtccatgtctaatagagtatcaaaagcagcgacgggaagagccccatagtggttggcccttggggtggcacaggaggatacccttgggatgatggtgtatactcaacggtacgccaggtcatcatcacccatggtgcagctattgactccataaggattgaatatgatctgaaaggaagttcagtctggtcagagacacatgggagcaccgatggaggttctgaaacagataaggtctagtttactatccctgctgcagcttttttaatttttttagcaagattgcaacactccgaaatttgcacaaatttaattggtactgtgcatgtctttagatctatataataaatataagagatttattacgttccttgaggagctaccacattttttagtgtaaattttggtagctcttggtggctcctatgtgttgagataccaggaaacagttgtacctcctcaagtaccataaaatcactacaagtataaacacctatatacaattctggtaaagttggaagatagttttaggccttagctttatgtatgaatctcatgtttattttggcgcataaaatcgatgacatgctgacttgtttttaatgaagttggtaaaagtttatatatcaaaggcctactttgatatccattctactttgaagaagcataatttagttttcatccctaaaacaaaattattgattttatatgtataatctgcaggtgaagctagatttccctgacgaaatccttgtgtctgtaagtggctattacgggtcagtctgtggaactccagttaggggta

SEQ ID NO: 15685 - DNA, 705 bp, Oryza sativa
  unsure (1)..(705): unsure at all n locations
cggtccttgtgatcgtnnnnnnnnnnnnnnnnnnnnnnnnnnnnnnnnnnnnnnnnnnnnnnnnnnnnnnnnnnagctttcttagtcggagacctggttttgaggaaaattcaaactacacgagatcggcataagctatctcccttatgggaaggaccattcataatttctgaagttactcggccagattcttatcgactcatgtgtgaagacggtactcatgttgacaactcttggaatattgagcatcttcgtcgtttttatgcttaggcattacttttgtatcttcctctttgactactaacatcaagttgttccttgagttaccagtcgggggctactataataataatggagtgtgatttttatcaattcaatttgcttacttgatttatcattggcttgtttgattttttagcttagccaatgaggactgaaagtttttaacaacttttgcgggttctaggctcaataaggtttgataaaaacttttaagaaatctagagctgagtttaaatcatcaagcacagcataaattcatcagtattgtacaaattgtgcctccatcatcatcatcattatcatcagaatacacaatcaatcagattcagttttttaatcattagagttatcagacccagtcggcttaagatcgttgtcctgtaacctctcaactacatcagcggctatctttgtcgcagcttt

SEQ ID NO: 15686 - DNA, 1630 bp, Oryza sativa
  unsure (1)..(1630): unsure at all n locations
cgattgtctctatcgggggtctgttaaacattgctcaggctcggcaanntgtttccagtcgggggctcgtgctggcctctacatatcgggtgctggttgattatcactcgggcgaccttcggcggtcggcctggtttctgttgaaggactagtctccgcgccattcggctcagggtcttttccgaaaggatctatatcagatggcttcctgcaagtttgagatatgctatcagtactacttcaatagtgagtgactggcgatacaaaggaaattgctaaacgacttgtacctagatgatttcctgatttttggtatgggacgactggatgtcttcttctttggattggcttgccttggctgtttttcggtcacccctttgttgccggcatcatcaccttcatcatcgctcaggaccaatttcctcttacgggagtctgactggttagtcgatttcgaggtgtttggttgagtatcggaccgaattttttgtactccactcgcctgactagtctgccgacggggcgagcgatgttgagcaattggaggatccgacttcatcaaggcaaattcctgggcatgatattccaagctttcaattaactttgcagaagataaaagcatgcttttgagaagggctgagatgtttgatacatacccgcggaggagggttgaaggcgttgtatggcaccactggcaacaagtgcgaataactgaccacgatagcattcgagaagattttgtacattctctccttcatgactttaaactcaagagaatctagatcttcacggttagggtcatgcttgccgtcaaactcaaaggttgtgcgggatctctctttaattggcgctagtcggcttttaataaaatgccgggtgatctgctctccttgcagaccttgctctttgagcttcagcatgcgatcgatcagggcaagtgcttgggccacctcatctcccatgggaagcgagttccaggtgtcttgatatactggaggtagacaagaatactcgggaagcgctggctcgggattttgcacatagaaccaatttgcatgccaacccttattcgaagttttgaagggcatggaaaagtatttttggctcaaggttccccttagttggaaaccggctcccccgacaacacatggtttgctcttgtttggctgaggcttgaggaagaagatgcgacggaacagggaaaaatgcggtcttatacccaggaaagcctcgcaagcatggataaaattggcaatgtggactatggaattggggtttaggtgatgcaaactaatcccataaaattccaaaatcccccggaagaatcttgaggttggaagagaaaatcttccatagaagaaatgagaaaataccacgacctcatgtgtgtcaggggttggaaatgtttcgccgcacgccggacgccacccaatgatctcctttgccggaagaacgccgtgcgccaccatctccttcaagttttcctctgtcacatcagagggcacccactgactttcaaagctttctctctcctctgccatggatnnnnnnnnnnnnnnnnnnnnnnnnnnnnnnnnnnnnnnnnnnnnnnnnnnnnnagctgtattcgattcaatnnnnnncacactct

SEQ ID NO: 15687 - DNA, 713 bp, Oryza sativa
  unsure (1)..(713): unsure at all n locations
ccgtgncctgatanatcgtnnnnnnnnnnnnnnnnnnnnnnnnnnnnnnnnnnnnnnnnnnnnnnnnnnnnnnnnnnaataggaaagcgtgctcatcacctttcttcaaaataataaagatatctttgcgtggaaaccatctgatatgcctggtattcctagagaggtgattgagcactctttacatgttaaggaagatgctaaacctatcgagcaacgacttcgccatttcgcacaggataggaaggatgcgatcaaggaggaattgaccaagctgttagcagcaggcttcatcaaggaagtcctacatcctgactggctggccaatccagtcctggttcggaagaaaacggggcaatggcgcatgtgtgttgattacaccgacctcaataaatcttgtcccaaagatccctttgggttacctcgcattgaccaggtagttgattcaacggctggctgcgagttactcagttttttggattgctactcaggatatcatcagatccgactaaaggagtccgactgcttgaagacttcgttcatcacgcccttcggggcctactgctacatcgccatgccttttggattaaagaatgcaggagcacttatcaacgcatgatacagagatgcttttcaactcagaatggtcgcaacgtttgagcttatgttgatgatgtagntgtcaagaccaagcngaaggatgattttgttac

SEQ ID NO: 15688 - DNA, 742 bp, Oryza sativa
  unsure (1)..(742): unsure at all n locations
tggccgttgccccgcccgcccgcaccgcngtggttggccggccgtcaggtaggttcccaaagctatcaccagtgctatagtatacttcctgtgtccctaaatatttgacgtagttgattttttagcacatgtttaactatttatcttatccaaaaacttttgtgaaatatataaaactatatgtatacataaaggtatatttaacaatgaatcggatgattagaaaagaattaataattatttaattttttttaataagacgaacggtcaaatatgttttaaaagtcaacggcgtcaaatgtttagcgacggagcgagtaagaattttggtaaaagaatcggagatcattcagttcactgatggaagctgccattgcccattgcgtgcaggggtggctcagctgagagcgaggaggggtgagagggtgaggtgcggctactcctccagggacggcaaggaggcgacgcccgccgccgccgtgaaaggcgcgacgtcgatgctcgcggcggcggtgacggcgtcgtcgtcgtcggcgccggcggcgatggcgctggtggacgagcggatgtcgacggaggggaccgggctgagcctggggctgagcaacaacctgctggggtggatcctcctcggcgtgttcggcctcatctggtcgctctacaccgtctacacctccacgctcgacgacgacgacgagtccggcggcctctccctctgaggccttgttcggttaatggggta

SEQ ID NO: 15689 - DNA, 866 bp, Oryza sativa
  unsure (1)..(866): unsure at all n locations
cggtgcattatagattctcagctatgcactgagagatcccctcataatttccccaaagcgtaaccatgtgtgaataaattttgagctagtagggttgcagccacgagtaagtcttcccttgttattgtgtagccagaatgccgcaaaacttccatgcctaagcgaactgttgagagtacgtttcgatttctgactgggttagcctggaagtgcttgtcccaaccttgtttctgagcatgaacgcccgcaagccaacatgttagttgaagcatcagggcgattagcagcatgatatcaaaacgctctgagctgctcgttcggctatggcgtaggcctagtccgtaggcaggacttttcaagtctcggaaggtttcttcaatctgcattcgcttcgaatagatattaacaagttgtttgggtgttcgaatttcaacaggtaagttagttgctagaacccatggctcctttgccgacgctgagtagattttaggtgacgggtggtgacaatgagtccgtgtcgagcgctgattttttcggcctttagagcgagatttatacaatagaatttggcatgagattggattgcttttaggcagcctcttatagcctaaagtctttgagtgactagatgacatatcatgtaagttgctgataggtttcagtttttcgcgtctaggtctcgatattgtacttttcctcttactcgacttaaccagtacccacccagcttctcaaccggattataccatgcacctttaaaccaacatcacttgcaattgaacggtgggtgttactccgtagattgctcgcaagggccgnttgaaaatggtcattaagctttttttgacacatgctttgaagacggg

SEQ ID NO: 15690 - DNA, 754 bp, Oryza sativa
  unsure (1)..(754): unsure at all n locations
gtgtggtgtacttcggtagaatgctcgcaaggtcggctagaaattggtcatgagcttctttgaccattgctctgaaagcggaaacgctttctcataaagagtaccagaacgaccgtgtagtgcgactgaagctcgcaataccataagtcgtttttgctcacgaatatcagaccagtcaacaagtacaatgggcatcgtattgcccgaacagataaagctagcatgccaccggtatacagcgagtcgctctttgtggaggtgacgattacctaacaatcggtcgattcgtttgatgttatgttttgttctcgctttggttggcaggttacggccaagttcggtaagagtgagagttttacagtcaagtaatgcgtggcaagccaacgttaagctgttgagtcgttttaagtgtaattcgggacagaattggtaaagagagtcgtgtaaaatatcgagttcgcacattttgttgtctgattattgatttttggcgaacccatttgatcatatgacaagatgtgtatccaccttaacttaatgattttgataaaaatcattaggggattcatcagnnnnnnnnnnnnnnnnnnnnnnnnnnnnnnnnnnnnnnnnnnnnnnnnnnnnnnnnnnatcgcataacaactaaatctaagtggataaccacatttcaaattaaattaaggggtattctctataaaaaaaggcgggtaatatatacttttcatgaaaatatgttactctttatttaggggta

SEQ ID NO: 15691 - DNA, 1631 bp, Oryza sativa
  unsure (1)..(1631): unsure at all n locations
ggtatgtttgggaagttttgattcgattagctacagctanttctagatttaaaagtaccataaccatttaagcttttttgatggattaaaacgaagctaagctttccctaagaagactctctagttagctcctaaccagcgtgtcaacttcatttccacttcaataaaaaagaaaacattttcatttccacttgtttgatgttgcctcattttcagttttgcacagcacttgatttcaaagcatttcatgtgcattactgcattatactttcctgctgaattcaacattggatgcccgtcctgaagtggccgggaggtctcaaatcatgaacatgagatctgcagagatgcagacatgcagtgcagctaatctggtgaccacaacaaattcggagaaagtggaccacacaaatgacacaagtcttgaaaacaggtctccaattctccacggcaagcaaaagaatcagaaaatgtgaatttcatttgaatttactcataaatcgtcatgcattaagtatatgcctgcctgcctgagtacaaggaacggactcatccgcaggcttaaactgttccatatcccaaaatgttacagcctccaaagctcaaatcgaaaccagcccatctgttatctatatgactattggctaaactacatgtaattcaagtattcactttttgttcaaaaggaattcaagttttcatccatagctcaatcagaagaggtactttgatagcacgtacttgggagcaggcctcctgtctcccatccagtgctgcatatgcaccccaatggcgtccaggtgttgcccgctccggccatggaagcccacaaccttcccttccgtcttcgccgacgagaagtatgccccgaactcctctccgaatggcccgtacttccctcggttgctgatgaaggtgatcgacctcagaaccctgggcccttcctccctgttggtgttgtagtagccgtatacgcatgtcaggacctcgtgtgggtagtccagtttaatctgcaagtgcatttggagagaggttattgtttgacatgccaccgaagaatgatgaacagatcctatattgttgttgtatgtttcatgaattttattccttgacaacggaacttgattgataatagcactcagtactcaccctatgggttatgtggccactggttccatgccttgcagaccagacggattggtcacccctgtcgtactcgatctgtatcgagccgataaaggtgcctctcatcacatagacttgcttcacaccagtgtagacaccatcatcccatggccggcctccttcgccaccccatggccctggccccattggaactggttctttcaccatgctataaggaacctggaaaacggttacaagttagctctgcagccacatacttatgttatgattcagacaagaattgtagctacctcattgtatgtttcactccttgattgtgcaagcatgtcgtagcgcaaagaggggttcatctcaatcggtgatctactactaactcgcggggcaagcaagttacctttcttgacatggaccccgatgccatcaatgtaccatccttncctaccatggaatcctactatccttccatcagaaaaactggtggagaa

SEQ ID NO: 15692 - DNA, 709 bp, Oryza sativa
  unsure (1)..(709): unsure at all n locations
gcgcgcatgnaattctcnttccnnnnnnnnnnnnnnnnnnnnnnnnnnnnnnnnnnnnnnnnnnnnnnnnnnnnntaaacggctaaactaatttcggtgctttctctcagggaccattttgaatattacgcgttattatttggacctacctgcaaatatctccttgtctttccgccatcagctttcccctcctaaacctctccccattccctcgcaaaaccctcgtctcctccacactctgctcttctcgcaaaccctaatcccacgcgcggccaccttccatggggcgctcgacctccctcaccgaggcggaggcggggatcacctgcttcgcctccttcctcccgggctttcgcggcgttctcaagcaccgctacttcgactttatcgttcacgaagtcgcccgcgacgganttcgtcgccgcctcaccttctttgatcttcccgacgaggtaagcttagccctctcgaccccgatttcgcgggttccttccgggatcccccgatttttttcattgcgctagctcagcttcgccgtgtatcgcaatgcgtggatgtgagtgaggaagacaaagggngcccgtccgcgaccggaccactcggaggcccttaagtcgtcctgcgctcttggcgatgcgaatgcgacccgttgaagggcttcctcagaagcgtccccgggcctgagctattatttcccgtattcttcgcg

SEQ ID NO: 15693 - DNA, 749 bp, Oryza sativa
  unsure (1)..(749): unsure at all n locations
tcctttttaatgaagggacggtcaaagttaccaagtttacttcggaaccatgctgccagtgcaaagttgaaaaatatggtcagtgcacttcatccttctacagctatcagtttaagttgaatcatgatgcagtttgataattttttgatacgggctacccttgacctttttcttcaggcgtgttacctttggtagtttaatatggtgaacttctcttttcccattcctccttatgctaactggtgtacttgacaggcatttcgcaggctgtagaaggtgacttagtttatagcaaagagccccctcctggagaagcaacttcagttgatacttcagaaccttgcgatgaccaaataaattcatctgatattgatctatgttgtgagacacttccagaagaaacaatccagtctgtgaaggtctgtaatttgcagcaaacaatgcggtgtacatgctcatgcacaaaaagttcctaatcatgcactgtcatttctcgtgtagatagttgattctgaagatttattgaagggtgtctacacatttgaagatgttgtccttcctttgcctgggtatttaccattccacatccataacttcaattttcatactgaatcacattgagaaatatatatggtgtgcttatttctgtaaacatgcagttcgcaagcattatttcctggaaacggaannnnnnnnnnnnnnnnnnnnnnngntgtgtgcacangtgcnagtgactttcagttgagcag

SEQ ID NO: 15694 - DNA, 1393 bp, Oryza sativa
  unsure (1)..(1393): unsure at all n locations
cccatcaaaagaagaattgggctgcgattcacattgggctgtggggccaatcactccctccggggtgctcaacatgggaaaatagtcntaggcctcaagctctcccaccaatgtgaaaatagtctggtcacctacaagtttcttgtaaccctttcaaatctctgtttcgtgtatttagtggagagtcagaagctagacctcattttgagttttgatgtcagagaaccagagttcatctacttaaatacagggattgaattgtaactggttataaacatgtttttcaagatataagagaccatattggatcgaaactataagcattttctccacttgaacttctccggttaggcacttaagtaattaccaatgtacttttcaaaggaacatggcaggccaaacatagggctataggagtaaataaagaacccatagtttagcctaagcacatgcctatcatctaaatctaattgctttgacttcaaatgtgctgtttctgctaaaatatccattttgagctctgaagttgatccagtgaaaggtttgatcagataggaagaaaataaccagtcaatagaataaataattcaactcaaccaataagcacttcaaggagacagatccaacacaacattaaatgaggagagattctgtccatatatgatactcctacaaaaatatttgtacaaaaagaactccaaacaagagatcatacgagttgattaatagtacatccaagtcaagtaagaaaaacttgtgctgcagtaaagcaagaagatgctgcaagctaaagcaactaatacttggcataaaaaaaaggcagagattaggcaatgactgtgcattaaatattttgaactaccaagcatgtagctcaaggatgattaattacctagtggcctctaataccatgttcctgagctttcttttaggagcaccttctacagtcaaaacctgtgaaaatcaccactgtatcaatacgtaaaatatcagtggaggagagtttcataaggaagcaatagaggacaaagccataaggcaaaaggtcctaactcctttacctgggaaattatataggttgcatagttccaatggaatgagaagtagccaagtatacatttgtcgagttcctcgatgaactttacaatcagagtctcgggatcctggctgttttggaagaacgcgaatatgttttcttcgtaacccttgttcttcctcagataatcataggccagcgtacataggtgggggcattcatccacatggtcaaacccaatttgcctagctgaaaattgccacatatttgtgagnnnnnnnnnnnnnnnnnnnnnnnnnnnnnnnnnnnnnnnnnnnnnnnnnnnnnnnnnnnnnngttntacaaatcaaaacacct

SEQ ID NO: 15695 - DNA, 711 bp, Oryza sativa
  unsure (1)..(711): unsure at all n locations
ccgtgcatgagttctcacttgaacccgnccnnnnnnnnnnnnnnnnnnnnnnnnnnnnnnnnnnnnnnnnnnnnnnnnatagcagaggaaataatttgtcagacagtaagaaccgcatgacaccaaataggtaggtgaactctagtttctaaggcttgcattgtgatgctagtaaaattggcatctgctctaactggaactatctgcagagggaaaaatcagcgtaacaagggcataagcattatcagcttttctgaggaaggtgagggtattccctcgagttctactggtggttcggctcgttgtagttctagttgcggcacatctgcaaagttggaccaagataccgttctactcaccttgaaggataaactccgtaagctggggcaacgtctacatgaggtgatacatcttcttgaaaagttaactgcctttgttttgttgtgatatgtgaagtccagctgctctgttttggtcatatgcacgaccttccacggattatattatgagcattgtttttaaatgggatgagtgtcacatatgttgattgtatggaatatttgttttcgacccattacccttgtgcaattcatatttaaaatttattacaaaaggtaaacaatataagtatgtcttccatatttcatgcctatggctaatgactggagtctatgaatttaatctcaatttttcgtcagacaaacagctctt

SEQ ID NO: 15696 - DNA, 742 bp, Oryza sativa
  unsure (1)..(742): unsure at all n locations
cgatgaccactacattgtgtaagatcgtaaagagattttcccacctnaaaagctagcaatgagggtaaacacatgggtgtccttcagctgttcacagtccactaccatttccttaggtatacggatctcgcaggcaccccgggtccatcgggccttcacatactgtgtcccttggaccagagatattgaactagccagtctctgataccaattgaaggatcgtaaaaggtttttctcatcctaaaaactagccaatgagatgagaggtccccccacttatatattagagcaattttatgtaggatcgaatcacaataactaagccaaccagaggggggtgaatggttggtatacccaaaaaccgaaaacttttagcggaaataaaagttactctcgaattcgacggaagtcggtctgaccgagattgatatgccggtctgaccgctcggatgccgccggtctgaccgctcggatgccgccagtctgaccggtatagatcaaccggtctgaccgccgaagtcgcctgccgcacttgctacctccgccagtctgaccgccttgctcccgccggtctgaccgccgtcttgccgtcggtatatcgccggttggaccgccgaaactcagtgaaacacaaatcgaagaactcttaaagtgcatgacgactttattgattctatctgtgtttacaaagtgcaccaacagcactccttacaaaaatttcaactaaaggggtaccgaattc

SEQ ID NO: 15697 - DNA, 714 bp, Oryza sativa
  unsure (1)..(714): unsure at all n locations
agtgtgntttggnatgtananctgatatacnnnnnnnnnnnnnnnnnnnnnnnnnnnnnnnnnnnnnnnnnnnnnnnnnnnnnntgcatatgtcgacaatggctgtgaaagggcagtaccttggcccagagaggttgactgatatgcagtagttcctgaggttgtaccccgcccatgcttaccgatgatagcgttacggtaggtttgtggaatgtaagctggtgcagaaggggaaggatcatttcctgatcttcgagttgcttcactcattgagcgcgaaagcaatgtggaaacttgtacttgtgtagctggtacagttgatcttggggcagggaacacaggggcactcgaaggtcttgatgctgtgacagtaacttcagaaactgagggagatgcaacccttatggcagcagtctcttcttgagcttcagaattagaagtggtagaagtttgtggcaattctgaagaaagtgaagcagctttatcaacttggggtaatcttggagggactgggacaggtttatcaatttgaagtgatctcactgaaggaagggatgtatctttagcacttggtggtgatttggggggaactggacaagcttttcaattggggagattttggaggaacttggagtgcattacccactttgtgagattttgggaggaactggagcangtttataattngttggcgatcttgaaggagaagaacat

SEQ ID NO: 15698 - DNA, 1030 bp, Oryza sativa
  unsure (1)..(1030): unsure at all n locations
gggcggtnnntnnnnattgaatactactccnnnnnnnnnnnnnnnnnnnnnnnnnnnnnnnnnnnnnnnnnnnnnnnnnnnnnnnnnataaaactaaggtctataaagaatatgacctgtttcttctttgcacgcttatctttttcattagcaccacccccacgcttccccttcatctcatttccaagaagccatgcctcttcctcctcctctcgaattaactcttcttgtctcttcaaagcaacagcttcttggtacgcaacttcaattccactgacaaataaagagcacagtaggactattaggtagctaacaatttgtctaaaaatctattctgttttaagttagaaaaatgtatatgcattagcttaatgcaaaattcgtacacgcagctttctaaaatttcggtagtttgtctgttagagaagtcttcgaattttagaggtcaaataatttcattcaaatgcccaaggctcaacataaaccacccacaaagcctagggatcgactattggtactggccaacactacatcggtaaccaaaagaaaatcagcctaaataattctttttacctgaatatatgagatagcacaaatgtttcaagtatcttccgaccaagctcagttaggcgtctttcctcgcgctccatggaaattttgttaacctcaccagaagcaccatcctatgacagtgagaatagtaagacagactgcaaatccagtagaaaaacctctactctgcaataaaccgatcaccaaacaactatgcacagatacaatacaagaaactcacaacaaaaaatattcccaatataatatatctaggagcataaagatttatactgagattattaaacagggaaaaaaatcatgcttcaatcatcaaagccccccctaccttcatgcgactatgggaacatttgtcatcctttggagacacaggttgacaaggcagtggttctaaggctggggtaccgaattcctcaagtggnnggtggcanntgctcgtacntttcatnttcagtgcaca

SEQ ID NO: 15699 - DNA, 706 bp, Oryza sativa
  unsure (1)..(706): unsure at all n locations
acgtgaacccattaagagccctgacaaaacaccnnnnnnnnnnnnnnnnnnnnnnnnnnnnnntctagacatccgatgcctagtacttgggtcaattgctgaccagaaagcacaaaaactgaaaatccaataaagatctcatttcaataggcagtaattaaagaaaaaatactttgctttttattgcagcatattatattggaatagctgctagtcaaacctggaccatctcattttgtcctcaatcagcttgctaagtttatttcttcgttcctcaacaaaacggcggtatattgactcgatgtttgtcgtataaacacggagcaattctcttcgataagggcgatcgaggcaacgaaatggtttgtccaccttctcccttacatattaaatacagcagtatgatgttacatgatagtttgtagtcaattcatatcaacaagaaacagaagtaggcaaactatctaatgtatacaagtgatcttgctggtctgtatgagctacaaaacgctaggaaattagagcaaaaaaatgagaaactggaatagattaaataaattcccaccatgggaacatcacagtagaatcaaaaggaatgcaattgaataaagaaacaatgctttgagataaattggcagactacctgtagaaaattcaaaaatattggttccgcgattaggacatgaagcaataaagacagacatgc

SEQ ID NO: 15700 - DNA, 1597 bp, Oryza sativa
  unsure (1)..(1597): unsure at all n locations
ttgtgaagtagcgtgaaaagagatggtaaatgaatctggattccttgttgatagagcaaatattaattcaaaatttgagtttgtagaggaaagtcaagatgacacttgaaggcagcatggaaagagaagaaataatggattaacacatattaagcatggtattaggcgtacatgtcaatacttttccggtggacattccgttttgcctattggaatgaaacattttgcactggacccatggaccataccagtgtagattgattgattttaattaaaaatgtaccggcaggcatacagctatcttttttgtacatattggagtatacacaacatttatctagccatgactgtgtttgcaaacatattttggtgcgagttaaaaatagagaaacaagtacgaagctatgataaaggagcattacaagaaatcatgattgtctgcatatcacaattctctatattgcaggttgcctcctagctgtgtagtagttgttcacaagattaatacaagaactgcggttctgtgcaattagtaatgttggtttgcagcatgcgattctcctgctattcaggttgaagcacaggtacctaaatgcctagaagcgcaaattccagccagaatttaaatgcgaacatgaacagcataacagatgaaataggattattgactgtattatgttttttttcgaagaaacagaatgttccgggaattctggatgaaacaagattgtatatttaagtattgccctcgttaattatgttccgggaatggaggtagcaacgtatggggtaagtattgccctcattaattatttcttaaattgtctgcttctccggtcaacgcacacttgagtacagagtagctggattaaaattgtgaaatggagggtgctaaccagaagcaacttcagttgacaattcacggatttccataaatgacctgactggacgctatgcattaaggctacaaaaccgtctcatttatgagagcacacgtgtatactgtcttctggactctgaagctactctgcaacgaggaccatttccagtttctgatcgagatcttttgtgaagtctgggctggcagctgtaaggtagatgaccctaacacttgcaactgaacaagacgcatcatgcatacaggtgctacgtcaactaactactcgagaatttgtgctattttctccaagtccgaaccaatcatgttaagctcaaatggcgttgcaacgacacggaccaaataatttagtcattattaacacgcgtaacgcgaagcaagtgcatttactcaccaggatcatcgtcatcaccgtcagtgtcccaaaagggcggggacgtcgaagggctctcgctctccacctgctcgcaggaccgccactcggacaacgactcgccagacaggctacgatcctcgtccctcatcccagccgtgctcgcagcagaatcatcagttgctgcagcacaagccatccaggaaatcttccactgcttcaagcaaccttatccgcagctgcannnnnnnnnnnnnnnnnnnnnnnnnnnnnnnnnnnnnnnnnnnnnnnnnnnnnggccagagaatactcatttncaaagacag

SEQ ID NO: 15701 - DNA, 1252 bp, Oryza sativa
  unsure (1)..(1252): unsure at all n locations
ctgaaagcgggacgcttttctcataaagagtaccagaccgacggtgtagtgcaactaacgctcccaataccataattcgtttttgctcacgaatatcagaccagtcaccaagtccaatgggcatggtattgcccgaacagataaagctagcatgccaccggtatacagcgagtcgctctttgtgaaggtgacgattacctaccaatcggtcgattcgttagatgtaatgttttgttctcgctttggtggccaggttccgcccaagttcggtaagagtgagagtttaccagtcaagtaatgcgtgccaagccaacgttaagctgttgagtcgttttaagtgtaattcggggcagaattggtaaagagagtcgtgtaaaatatcgagttcgcacatcttgttgtctgattattgatttttcgcgaaaccatttgatcatatgacaagatgtgtatccaccttaacttaatgatttttaccaaaatcattaggggattcatcagnnnnnnnnnnnnnnnnnnnnnnnnnnnnnnnnnnnnnnnnnnnnnnnnnnnnnnnnnnatcgcataacaactaaatctaagtggataaccacattgaaattaaattaaggggtattctctataaaaaaaggcgggtaatatatacttttcatgaaaatatgttactctttattaggccaatattatgaaatttgccatttttatctatacgtagcaaagcacatacatttagctagtcttngaaaaaaaagagtaaattgcgcccgcggtacacaaacttgttaggtgggtgcattatagtgtaaaaacttcaaaactcttgttttggtgcacaaacttgtataggtgcgtgcggactatgactaaatagaatagcaaatctaattttgctgagttggatgatgagtagacccccaactaagcattcacgtaagaaggacaggtttgcctgctcgtaagcaatggccctattttatcagaaaaccccttctattgtttggtatttcgatcatgtataagttttctgtgaaacgaatctgagaggtgttcatagcggcggggagctggggaggtcgaatccgcggtggctgtagtgatgggggtcgagcccaacagctacgccgtgggggaagtcgagttcgacggttgctacaacgggtaggtnnnnnnnnnnnnnnnnnnnnnnnnnnnnnnnnnnnnnnnnnnnnnnnnnnnnnnnnnngtagtctattcaaannnnnnncngcacact

SEQ ID NO: 15702 - DNA, 714 bp, Oryza sativa
  unsure (1)..(714): unsure at all n locations
cggcgcttgtnatgtagatcnnnnnnnnnnnnnnnnnnnnnnnnnnnnnnnnnnnnnnnnnnnnnnnnnnnnnnnnnnnnnttggagatgattgaatttacaggtgaattacaggtgctgtcattttatgtgaccggtcagaccgggaattgtgtgctggtcagaccggcggtatgcgcgcggtcagaccggccagcccgcggtctgaccggctgactctgtgtcggtttcggtttcgggttgtttgtttggatatccgtgattatttcatgattatggcttctagatggatactatacatatgtaatactgttgtttgctactaatgagtcaagttggagatagcttgttctcggaatatggtttctttgtttatttcatgtgtaggtgactcgatgcctcgggagagtatttgcggtgatggaccgggagtcggcttggggataagacgacgttcgtggtggtcagagatcatgcgggatacttaggctagagttgatgcacgtggttgatggagattccatatggcatacgatggaggtattgtgtgcgtatgggatgcggagttaaatttggaaggagtccaactttggtaccgatggttatgtaaaagtttgttcntgtactagagggtttcctaaagtatttagaactcctagtattgagttgggtcgtggctttaagcttgctaccttgggtataaatagtggggga

SEQ ID NO: 15703 - DNA, 1344 bp, Oryza sativa
  unsure (1)..(1344): unsure at all n locations
gcgcccttganatgagaacttgnnnnnnnnnnnnnnnnnnnnnnnnnnnnnnnnnnnnnnnnnnnnnnnnnnnnnnnnnnntcgggaagagaccaggtttccgccccgttcgtaccccaaacttggccgagatctaccccaagatcatctcaaccgagttggccccaaaccactcggacgagatccaatctactccaacacgacccgatgaagacaatagagcctatccgccaatcctgatgaaactcctcaacgatttggctgtcgttttcaccacaagagcgtcatctccccgtaggtctaggcgggatccgccctggccccgatccagtctagctctagggaagtcggtgtcatactccagcctctcggcacggtttcgacgaaacagttggacggctacctcagctcccccggtgtcgactcacgaccaacggagatcgtagagtacgacgacttcggctaccggtacgactaccgcaacctcgacgacttcgacgaaggctatgaagataactacacgccccctctacttcggcattttcatgggcgacaacgagacggaaaaacagcgtcaagcccgagaagaagaagaaccacgcgtgcgacaggaagccaaacgtcgcgactggaggaggagcgcaagcacaagagcgagaacggttggagcgtgagcaacaagagcgcgagcgagctgcaaatgatgcttgggaggccgggcgacgagcacgagaactcatcgggcaacaagatgtcgaggggacggcggtttttcgcaccccccaacagaacgtggttgcagcgatcaccctcctcgacaccctcctcaaggaagacgcactcaatcaggccaatcacgtcgtcaacatcttgaaccagaccaagaccatgatcgcagcttcggtcccggttaactccgcgagtgtccgcacgccaactggcagccgagttccgcctcttcaatctcaagactatcaccaaccgagcctcagcgtcgtcggcgccggaaccagtcgtaggagcagggatcacgacgagcaatccgttcactcgcctcctgaccgacacagggagcgtcgagctgaatgtccccgctccccacatcgcaggcgtcccatcgatcttcgcgaaactatcaatcagcgccgtgcggcaagaggctacatcccccaccattcaccagatcgttacgacgacgacgtggatggagttgctgncttcacaagcgacctgcgtcgagtggatttggccagccgcttcaagccgactggaatcgagaagtatgacggcaccactaaccctgagacttggctcaccgtctacagtctcgcaattcgcgcagcg

SEQ ID NO: 15704 - DNA, 1070 bp, Oryza sativa
  unsure (1)..(1070): unsure at all n locations
caagcgtaagcccgaggnacttgtggcaaccantacaccatcctcccgacaatgttcgcgcgtcaacactttggacaagatcatgaactctcaatgtccgcatcatccaatttccaaccatgcggccaaagactgcttcgtttacaaacagttcgcagagcaatacgccaagaacgcacgcaagtcgacttacagagatcaaagcacatcaaagaagaaggatgatgaagatgatgccccgactggtttccaagacccccgcaaggagctcaaccatatctttggcggacccctggcttatgaatccaagccaaagcaaaagctgactgaacgggagatcaatgctgttcagcccgacacgccccaatatcttcggtggtcagaaacaactatcaagtttgaccgctcggatcaccctgaccgagtggtccacccagggcggtaccccctggtactagacccagtggtttgcaacatcaagctccgaagatccctgatcgatggtggcactgcactcaatatccttttcgccaagactctggacgacatgcaaatccctcgcacggaattgaagccaagtaatgcgcccttccacggagtcatccccgggctgtcttctactccactcggctagattactctgtcggttactttcggcactcgagagaactttcgcacagagaatatttgcttcgaagttgctgattttgagacagcgtaccatgccatactcggacgcccggcgttagccaagttcatggctgtcccgcactacacctacatgatgatgaaaatgccaggtccccgaggagtcatatccctgcggagtgacatcaagcaagctgtcacttgcgacaaggaaagctgcgagatagcccagacccgcgagattgcgctcgctcgagaagaaatccgactggctgcgtccactgcaaccgaaggagaagtgtctgcaaccaagatgtcaaaaggcggagaaggcgacgccaagaccgagaagattcctctagatccctctgaccctactaagactgctgtaataggcgctaagttagattataaatggggta

SEQ ID NO: 15705 - DNA, 737 bp, Oryza sativa
gaaaccctgacaccacccagaggacctatggcgtgaatcaaggcagcttgctggaaatatttagcataacctaagagccggttttgcgagctccaaagcctcaaactttgagttaagtggttcatcaaaaggtaactctcatcctaatctgatttgtttcatgctgctattcatgtgcgattaaccagtggaaagcaatatagtgaaagctgccaagatatccaagctagaaaggcgaatccaggctctggagaaagacaaggtcgaactggcaaaacagagggactcggctctgaaagatgtcgaaggtacttgtagctgaaacttcaaaaaccactctcatcttcatgcccagtcattgatgtgaatttatttgtacagatcgcaaaatcaaatcccaggctcaattcgacatcttggttaacaaaatcaagaagcttgaaggagctagagatgaagtcgccaatgccgctacgccactcgtccaggccatgtttttcaataacaatggtccgagttcaattgatgctgtcgaaatcttcgacaagcttagaactgctccggatacatattttaagaacatcaaagaagctggaagtatgggggcaagtctagagttggcgatgaccaagtccttgtacccgaagattcaccttgatgttgttgacggcttcgcagacgggacaagtgaggaagccgcccttgacctcatcagtgatgcgcaaaaagctggggta

SEQ ID NO: 15706 - DNA, 1132 bp, Oryza sativa
  unsure (1)..(1132): unsure at all n locations
aggcgccttgantttcganactgaagaacctctagcnnnnnnnnnnnnnnnnnnnnnnnnnnnnnnnnnnnnnnnnnnnnnnnnnnnnnntgtccggggattgatttgccgagtgtattattgatcgtatgatctgggagcagatcgtgccctaagaggcacctggacccctccttatataggggaaggggtccgtattataaaatacagtccatatccctaacggaataagtagttacagataagattcaatcttaaccgactaagatcccgggtatttccttaacatacaagtttggaatttaacccaagtccctttaaagatattctatctatacatggcaccccatacccagtcggattataaatgccgtgttggtatggggtatccataatctccacaaaattggaataatgtgacggaaaagttgaaagtttgtgtgtaggaaagttttgatgtgatggaaaagttgaaagtttggaactaaactcggcctataatatataggacgattcattttgcttgaagattggtgatctaccggtatatttcctccgtactaaaataaacaatccagtatgaagtatgatatatcagaatcctattgttacgaaatccggacagtagatcgttataattgcccaaccaaaaaaaaaaagatcgttataattgccagtacacgaaggaattattactattgggccgattgggtcaataagcccatgagagcccactgggccggtgctgctgacgtcacgccgagctacttacctccgcgagcggccacaactccgctccccttccccctcttcgcctgagtcgagtcgcctcccccaccgccggccaaccatgctgccgccggccgcccgcctcgcggcccgccgccttctagggctcgcgacctcctccgcctcggaatcggccgcggcgcgacgcttgtcccgttctccggtcagtgcccccctccccctcctccaaatgcctctgtatctcctcgctgttcgtcggcggagctttgccgtcctgatctctcccttcgggggcaacgtctcgttgcagatctcctacgccgncgcgggctgctccttcaggctgntctccacggcgcttaactacgtacgtgaggcgcct

SEQ ID NO: 15707 - DNA, 727 bp, Oryza sativa
  unsure (1)..(727): unsure at all n locations
gactaggactattaccataacattgctactgggagtgttatagcttatgttacattttagatattttgtacatagacccaaccaccattccaccaccactgtgctcacaaaaagcatttctgacaatactattttcatgtcttggactttcagattgctaagatcgttgaagttgcaccaatcagagtatatgaagttgctacattttacacaatgtttaaccggactaaggtatctttgcatgacttagtattttgtacttgttaatccctccactagcatcttttcaccctattttgccatgtaggtgggtaaatatcaccttttggtgtgtggaaccacaccttgcatgattcgtggttcacgtgaaattgaagaagccttgttagaacatcttggagttaaacggaatggtttgtattattcacataacttatcctatcaactaagaataacacttcctgatttgttaccacaaacggtcttcgagcatgtgtttctcttgctatctctgtgatagcattaacatttttctttcatttgcagaggtgaccagtgatggtttattttctgttggagaaatggagtgcatggtcccttcgagatctataattttctgtcattttggatgcttgcaaataggtgttctagttgagttaagtgtttaactatggggggaaaattctcgatatanagaggtgtntgtacagctcttacggntcaactt

SEQ ID NO: 15708 - DNA, 674 bp, Oryza sativa
acgattaggaaaacgggacacagttgatcagaaaagcactcgacttagcattaaccagcctaaacgcggggaacgctttacagaatgcaaccctttgcccttttggaattaaaagtttggaattacaggccatgacacggctcaaacccagactgaacatctattacaggtaacaagcattatttttttttgattgcaagactgtatacaggcgtcatcacgttaccagcgaccgttggcgtaacggcgatggtatagaaaggatccattcaactcactagccaaattggtgtaatccggtatttgctgggggtatccatttgacccaactgcatggttcatcgatggatatgagagccatcaaccaagctttgatggacttatgtacacagccattagaataagcattcatgagggaaatggctttccttgtcccctggaagcacctatgtataggccctgagtatccctcgcggaaatgggtaagcaaataaaccgcccagactgttagcgaaaccatttctgtctgccaattggctttaacaaaacggtacggtggacaaatgttggggatatgaccaaggactctggatactgcattgctctgtacctctcaaacaatcgttatgatgtaagtgcgaaatattttccactgcccttgggatgtgcagaaa

SEQ ID NO: 15709 - DNA, 735 bp, Oryza sativa
  unsure (1)..(735): unsure at all n locations
gcccctgccacacgaaccattgttagcaaggcctatcggcagggttttttctggcccaccgctgtatctgatgctgacataagggtgcgaacatgtgagggttatcaatttttcacccgacagactcatctaccggctcaggagttgcaaaccatcccgttatcttggtcgttcgcggtttgggggctcgacatggttggcccattcaaaaaagctatcggtggttatactcatctctttgtagctgttgataaattctccaagtggatcgaagccaaaccagtcgtcacaatcacggcagacaaggctatagatttttttcatcaacattgtgcactggtttggggtacctaatcggatcatcactaataacggcactcaattcaccggcggagtatttaaagattcctttgaagacttcggcatcaaaatttgttatgcctccgtagcgcatcccatgagcaatggacaagtcgaacgcgccaatggtatggtactttaaggaataaaagtacgagttttcgaccaatggtatggacaagtctttgcgatttcgtaacttcaaggaggagcgctacggagaagaccgagtggatgatctcaaccgactggaagaagcccgtgaagcagccttaatccagtcggctccgtatttacagggatacgacgttatcacaatgcgacggtcttttacgagctttttagtcgagacctgttttgaggaaattcnactac

SEQ ID NO: 15710 - DNA, 560 bp, Oryza sativa
attcggtggccccagtgctatagtatacttcctgtgtccctaaatatttgacgtagttgattttttagcacatgtttaactatttatcttattcaaaaacttttgtgaaatatataaaactatatgtatacataaaggtatatttaacaatgaatcggatgattagaaaagaattaataattatttaattttttttaataagacgaacggtcaaatatgttttaaaagtcaacggcgtcaaatgtttagcgacggagcgagtaagaattttggtaaaagaatcggagatcattcagttcactgatggaagctgccattgcccattgcgtgcaggggtggctcaactgaaagcgaggaggggtgagagggtgaggtgcggctactcctccagggacggcaaggaggcgacgcccgccgccgccgtgaaaggcgcgacgtcgatgctcgcggcggcggtgacggcgtcgtcgtcgtcggcgccggcggcgatggcgctggtggacgagcggatgtcgacggaggggaccgggctgagcctggggctgagcaacaacctgctg

SEQ ID NO: 15711 - DNA, 1001 bp, Oryza sativa
  unsure (1)..(1001): unsure at all n locations
aattcggtaccccgaaattactagagaaagacattctggcaagttatatcttagtcagaaaggttatattgaaaaagttcttcgtcggttcaatatgcatgatgcaaaaccagtgagtactcctttagctgcacatttcagattatcttcagatttatgtccacagtcagattatgatattgagtacatgtctagagttccttatttaagtgtagttggttcacttatgtatgctatggtatgttctcgtcttgacttatcacatgcattgagtgttgtcagtagatacatggctaatcctggcaaagagcattggaaagttgttcaatggattttcaaatacctacgtggtacatctagtgcttgtttgcagtttgggagatctagagatggacttgttggttatgtggattcagattttgctggagatttggataggagaagatcgctcacaggttatgttttcactattggaggatgtgctgttagttggaaggcaagtttgcaagcaactgttgccttatctactactgaagtagagtatatggctatttctgaagcttgtaaagaagctatttggcttagaggtttgtacactgagctttgtggagttacgtcttgcattaatatattttgtgatagtcaaagtgcaatatgctttacaaaggatcagatgttccatgagagaacaaagcacattgatgtgagatatcactttattcgaggtgtgattgctgaaggtgatgtcaaagtatgcaagataagtactcatgataacccagctgatatgatgacaaagccagttcctactactaagtttgagctttgctcaagcttggtgggtgttacagtatagtcctagagactatttggcgcgcggtgattttacctacatgaggtatttttggtgnnnnnnnnnnnnnnnnnnnnnnnnnnnnnnnnnnnnnnnnnnnnnnnnnnnnnnnnnnaaagtgtcttcaaatcaaaannnnnctcgccca

SEQ ID NO: 15712 - DNA, 749 bp, Oryza sativa
  unsure (1)..(749): unsure at all n locations
cgaggaattcggcaccccgtgactgcaaattgcaaaaggtatagaaatcaactaggaatgcgaaggaaggtaaaaaagaagaatcaaagcattcagtagaaacaagaacacaatgttatgagttagcaaccgaggtatacctgaagtcctaacattttcccaattactcctaacgcttcttgtgtgtccttgttctctttgcaaaggtgaaacctggtcagcacaccagaatgacaactccggttataacgctaattaacagcaaaattagacgaagcaaaaacataatatttcttatacaaatttatacacatagattagatgttttttattaagtttagccaagtaaaatacacagcaagtcagatgaacacattcgagtacaaaggccagctaaagataccaggccaatagaaactatcaattcaagctgaattccaccaccttaggaacttcccaacatgatttggccagctagttgatcctctgctatcaaatggcctgtcatctctccaatcagaaccacccatgttcttcctcttccttcccctcccaccaccacttnttccaccggcaccccgnccttccctagctcctgatcccagccgcaccctaatgcatctctgaaactcatcattgtgttcgaacgcgtcgggggaccaaaaaantgaaggtcttctttagaaaatatggcccttcttcagcccaaaaaaaccccccaaatacaccattttcaccaattttacccc

SEQ ID NO: 15713 - DNA, 517 bp, Oryza sativa
tgagagcgaggaggggtgagagggtgaggtgcggctactcctccagggacggcaaggaggcgacgcccgccgccgccgtgaaaggcgcgacgtcgatgctcgcggcggcggtgacggcgtcgtcgtcgtcggcgccggcggcgatggcgctggtggacgagcggatgtcgacggaggggaccgggctgagcctggggctgagcaacaacctgctggggtggatcctcctcggcgtgttcggcctcatctggtcgctctacaccgtctacacctccacgctcgacgacgacgacgagtccggcggcctctccctctgaggccttgttcggttaatccgagaaagagattggagaggggattgagagaataattctacactataataggagtaaaataaatcctctctaaatcctccgctcgcgcgttactcgacacgaggcggcagttaattattttgcattcttagttggtgtagagaccaattgaagttaccacttcgatgagtccgtctactgat

SEQ ID NO: 15714 - DNA, 1393 bp, Oryza sativa
  unsure (1)..(1393): unsure at all n locations
agtgactggaatccgacatgccactggccannnaccnnnnnnnnnnnnnnnnnnnnnnnnnnnnnnaatcctacctgaaatcgtgtcaaaagaaaagaaaattccaacctgacacgagtgatcgtgtgctgcagctacgagggcgtggacgtggtccggaagcgcgcctcgctcctctggaccgccgccatgatctcccgctgcgccggcgccctcgacggcgacgtgaccagggcctcccaagccgccgccgccgagccgtccggatagatctcgtggacgcagtcggcctcgacgttgaggtggctcaccctctccaagcagccgatttcttcagggtccactagaaggttgctctcgccgtccttccatcctatcagctgtagagagagccagcgagcgatggtgaattctcatttctcaatgtgcctgatgttataaaaccggccccgataacaacatcggtaaccgaacacggaatgcattggtaagctcaccttggcggcgcccgtggagttggtgcagtagagcctcgcattgtcgacgaggttgcagtagctgtggaacgcggtggcgaaccgcttgtgggacttcagctgggacttcaccctcactgctctcccggtgatcacagctcttctgacaatgtgattaaccgggtcaaattttgtgcttatacctctttgttagtacacggaaaatagtgcagttgagtcaatcgcaatgctgacataatgnaagcgtgagcagaaacagcaaagatcaagcagaatttgtttgagtaatatgaacnagcatagtatcagtaatgtagacatgtagtgaagtaggattaagttctgaagcatacctgattcccctgacaaccgcaagataggcatcacagaccacacctacgagctcgatgcgatatggcttcctgtttctcgtctcgccttcttcatctgtactggagtcctcaactggctcccagtactcctcagtgattgacccgtcctccgtgaccttgtagccaacacccatgcggtaccgttgccggtgcacagccctggccatggtgatcgtctgctggacaaacggctcccacgacatggtgccgtccatgatcacatccctcccttcgttgagggcagtcaccaggagcgacgaggctgcgtccatcgatgactgatgtacctgcaccggaatcgaggggtcactgacaatgagccatggtatgtctgaaatgtacatactccctccgtcccaaaaaaagacaaatcctaatttccgtgccaaacgtttgaccgtccatcttatttgnnnnnnnnnnnnnnnnnnnnnnnnnnnnnnnnnnnnnnnnnnnnnnnnnnnnnnnnnnnnnnntggtctccatnngnnntcgaattcgagg

SEQ ID NO: 15715 - DNA, 1174 bp, Oryza sativa
  unsure (1)..(1174): unsure at all n locations
tgtggtgcntcnnctttgatactgatacgctnnnnnnnnnnnnnnnnnnnnnnnnnnnnnnnnnnnnnnnnnnnnnnnnnnnnnnnctccggccatggccgccgacgctcgtccagtctaagcgggtggtgacgacgtgccacaccaggatctggtcggtgagcttggggaacgcgcacgcccactccagctgcggcgtcaggccgtgcctccgcagcgtggagacgccattggtgaagtggccgtagctcgccttgagcgacacgagcaccggtcgtcggacctcctgcggcaggcgctttctccggccgcgcttatgcccctggcgccgcggctccaccaagtagagcgtagccacgacaggatgttccatggccggtggccgaaccgcttgaggagcacgtactggccgaccttgtcgtaccagtacctcgtcgtcggcggcgtgatgctctctttccacaaaaggtggccgggccgcttgtccgtccacggttggtcgtcgcgcacgcaggggtacaccgtcttgacgtacttccagttgctggagaagccggccaccgcctggcagagctcgaggccggcggtgatcacgacgatcagcaccgtgacggagcggtcgaggccgcgcacgccgatgcggaggcggtggtagcccgggccgagcgtgccgaagaacgccgtccacatggtgatcccggccacggcggcggcgatgcagacgtaggtcctggcgccgacgagcacgacgttgcgggtgtagaactcgtcgtagaggaacgcgagctccgcctcgacgacgcggaacgcggcgtcgggccccgtgacggccggccggatgaggccgccgcagacgaggtcccgcgccctcggcgagccggccttcgccgggacgaagccgtagaaccgccgcttcagcagcttgaacagcgcgaacgcgaggcagaagtccctcgccatgtccttctccacgccgctgtacccgggctcgtcgtcgatccaccggtacacgcggtcgatggtgaccaccgacttgccgtcgctctgcctcaccatgtcgtcgcgggtcgcccgcaccatggtgtcctcgccgtggaaatgtacctgtagcccttcatcgtcgtcgggttcggcggctcgccgttgccgacaccgcgagcgacttcttgcgttc

SEQ ID NO: 15716 - DNA, 1775 bp, Oryza sativa
  unsure (1)..(1775): unsure at all n locations
agggcttggcaatgaaccagagcacgagccggtttgaagaacgtgtgcaagcaccagcttctcccgctggctgaactcgcggcggctgtgcaccggcccngcgtacgcgctcgcgtgaatcacaagcagcccgccggcccccagcacgaacgtctcgccgcggacgggccggtcctggatcagccccacggggtaggacaccaccacgtaggacagcgagtaggccatccacatcacgccgcggaggagcttgtcgctgctccggcggcgggtggcgccgtacagcaccagcgccgccaggacgacggcgctggcgaggacgaccacctccagccgcagcagccgcccttccaccgtgctcagcctctccacgaacccgcgcgccggcgccattgccggccaagaagctcaagctctcccatagctttcactgatcttgattactccatttcttatcgaatttgatccatgcgagaaggtgatgagatagggattgaagcaagaacaaaaatgggatgtggagtaggatgcaagatagctgctgcttggcggtggcactccatggaagacaagaatctctcatggttgcacaaaactactagtacagtacttggtagaactaaaacctttcttctgtctgtgagtttggcagatatcaatcagatcagcttatctttacgcctggatcagtgaggagcagcttcaagactgccgaccaaatgaccagtgaaacggcacccagtgaagaaaaggatatgccccatactacataccgtatgatgcatgggatggaggtgaccaggcaaagaagcaagactgcaaatagtaaattttaaccagagaagattggtttcaaaatcaacacaaataatcaattgtgcaaattacagtcacgatcttatagggttggaccacccagtaatggagtactggtttagtggcttgagatggttgaggatgacatgagctactcttgttaccgaaacaatttaaatgagactccaaatgaattactcttttcattttttttcacaagttaacaaggtttgccacattactacaatggtgatgtgcaactttcttcactaatcatgatgaaagctaaacaactctcaaggatccaacattctgatatctcacctgaaagaaaaccatcatatgcaaaacacaggttatattattttgttggaatattcaaagcacaaacttggatcaagcaaggcattatccatgaactagacaacggtaagaacaatgcttgatactagaagcatatgaaaaccaccacagacagaggcactaatcctttcagagcctgaaggcccgttttatttaggatatcagtactaatccactataacactacatggccatatgtagctcaagcttgctcgccagttcatccttcatagcaccgacaaccctgtctttaacatctcccttcttcataaacaggaatgttggcatagcctcaacactgaattgctcagcaataggctgtttgttacataaatcttcattaggataaagccagataaggggaaaaccaacacagcaaccgtactactgtactacataaaaatataaaatttggggaacagcaataccttcagttcatcgacgtcaaccttcagaaaaacagcatttgtgtgcttctttgctagatcggcaaaaacttagcaatgatgcggcattgtcccgaccatgatgcaatgaagtcaatcacaaccctgtttgacaaanacagggttacacacctttgtgggatttgttat

SEQ ID NO: 15717 - DNA, 864 bp, Oryza sativa
  unsure (1)..(864): unsure at all n locations
tgaaagaacaggtagatccggatccccccccggaaggggaggagaaaaacccctaatctctaaaaaaaaaccagacgcgaaaaacccacctttgattacccaaaatttcctcttcaggtaccccattcacaaaattggatatgagcataatctcaattaagtaaaccttaggccagctacgcacaccattgatcacaaaactcaaaaaacttagcaaaaaaagaaaaaaggacaggaaagaccaaagaggaggagagcgacggttgaattaccagcttcttggcgctgttggcctcctcgatctggatggtccactcgtcgaggctgtggatcgcgatcaccgttccctccgcctgcgccgccgctgaggccgccgccatctctagctctctctctctctcttctctctctcctcggcgagcagagcagagcgccgcttatctttcacgcgaggcaggacacacacttgctctgcggtgttctgactatgtgctccccttggccatggctcgccttcccaaagatattgtcgttgggagaggaatcgaaactttatcctagctggtgacgtgacgaatggtcgaatatgcccctctattctgtgcgaaattaccggcccccaattggccaaacggtatatttacaaatgaaaaataatatgtgaataaaacttttatatacgtgttcttagcaatctaaaagcaaagactgaaaaataaattttgatgaaaaaactctaaaatcaatttcaaatttaagcctgaaaatttannnnnnnnnnnnnnnnnnnnnnnnnnnnnnnnnnnnnnnnnnnnnnnnnnnnnnnnnnnnnnngtcttcgaaacaaannnnnnncggcacact

SEQ ID NO: 15718 - DNA, 5180 bp, Oryza sativa
cacgcgggtgggagctcgaagccgccccccgccgcggaggaggaggagaagaccatgacggtcggccgcgccgattgccgtcgagtggaagccgctgctgatcgaggtcccctcgcaggtgatcgacggcttcaactgcgtcggcggcggtggcgacgccacggccacggccacgctcagcgagcagagcaaggaactcgaaatgctgggcaaggagaaggacgttgtgattagcatcccggcgccggtgtacgctccacggtccgtgtcggtgtcggcggcgtacgaacaagagggcgcgtatataccgtactccgtgtcgctgagcatgccggtgtcgccgtcggggttccacttctcgcagttcgggatggcggcggcgaaggcgaaggccgtccaccgcgacgatgcccgcgtggcgtcggcggagaccaggttcgacgacgcgcacccgccggcggtggggagggtggagcgcactccccgcggctgctgatgaagcagacgtggttccactcgcagcccatcctgcacctgtccaagaacgacgagacgacgcggcggtgcgacagcacgcgcgacaagcgcggttcgaccagttcaagaccttctccggccgcctcgagcggcagttctccaccctgtgtggccggccggcgcaggagcagatgaccaacggcgagggcgccctgttgtggcaaaaccctcacacacgcgatcacttggataaacacaagaaaaacaaaagtgtagacgcgcgtgaaagcaacgaacacagatgaacacaagaaaacaggttttggtgccgcgcaacgtcttgtggcttttctggtttttctatctcatttattctccaaatgcataacaaactaacagcttcacctattcagccgctacaggcagccacttcctccgcgccatcccacgaagtgctgatcaacgctgcattctcggcgagccacacgcacacgcactctcggccatgacgcgaactctgcgcgcctctggctcatgcaacatgtaacagagaaactaactcgtgacagaatccaatgacctgccacggatgcacaaacaaatgaataactaaccagctaaatgtgacaggcttagtctaacacgcccccgagccgaacatcgccgaggaggagacggagcaggtccccggcgccgaccgctacttcgacaccctggaaggccccgagctggagacgatgagggcgacagagacgacggtgctgcccaaggacgagaagtggccgttcctgctgcggttccatacctgctcaaggtcgtgttctactttgaggcggtgcggcgggagttctaccacccgatccgcgccgacttcttcgcgccgtggatcgcctgcctcttcctcgtccagggcgtgccccgggcggtgacgaaggtgcaccacggcgtctggtatgcgctcatgacgccatggcggaggcggcggcatcatggtcggggaagcgtgggtgccacgactgggggcggaggcaacgacgaagttggagtaggccgtgggatgccgccggcctcgacggggttctcgcggcggctgcatcgctccccctgcctcgtccccttcagccggcgacgaggatgctgacggtggcggcgttgcctccgccggtgcgacgccggctgccggacctcctcctctcccctccccccgtggcctcctccccacagcgccgcccgtcgccggctgagagaagtgagagagaaagggagaagaggaaagagatgaggtggcaccctgacatgtggggcccacgtggggtcccacgctgactcagccactacgtaggacaaaaccggcgtcaaaaccgccgagggacctcgggtgaccggttttgtatagttaagggatcccatatatctggttttgcggtttgaggatgattttgtatctcgctgacaagatgagggaccttcggtgtactttttccacagaagaatgtgtgtgttgtcgagttgttgggcctgcgagcctagtgcggagtgggcctgaaagccaaagggaagactgtagatgccatcgaaaatggaaacgaaaactttgctactcttattcggttgtggggacttgttatagtggtatgagattcaggttcatggttgcgcttctcacattctctcgatccgaccagtaaaattttcatacgctatggttcgtggatacctttgggtgtggttgcggtaaatctagttatgatttggttggatttggagaagtcaccacaacgcccatgaagcttagtgcactgttgcgacaatctgtggagactatggacactggtggagaaaccatctttcgtcggtcggccgatttccacaatagtcccggatacaataaaaaccggggctaaagatgatctttagtcccggttcaaaagggtaacgggcatatttgatctttagtcccggtttgtgttaccaaccgggactaaagatcatctttagtcccggttcgaatgctgtcaggacctgtcaggcccccccgggatctttagtcccggttggtaacaccaaccgggactaaagatcttaactttaccaaccgggactaaagatcccggtgatctttagccctggttggtgctaccaaccgggactaaagatcttaactttagtcccggttggtaataccaaccgggactaatgatcccggtgatctttagccccggttggtgctaccaaccgggactaaagtcccacccctatatatatgtcttcttcctcctccagctgcccgagcaagcttcaaaattacttcaaaaaagaggggaggtcatgccaaaatttctattgaatttattttggtgattacatacaaatcggaggtgcctaaaaggtttgcaacttcatcctccaatgtttttttttgtcatactacatttgcacctatgttttgcacacttttttttgtctccaaaatttagttgtaagttgatgagagagaaaatgtgtgtggggaagaaagaatatatagaaatttagttcatttgctaaacaaggttttataaaatagttgagaaggaaaactctagtgaaagttaatcttaaataatagaaaacaaactaaaatgaaaattaaaagaagtaaaacacattaaaattagtttaaaactttacaaatagtttttaagaattatttggtgtaatattttatgatttttgtatgaataaagatatcttataattattgtatgactgtcattattgtaagaataattatttgtgtgcggtttttttgactcatgtagatggatcggcaatggatgtacgctgaccggcggtccaaagagtttattgacggcgtgcactattttttgagagtggccgaagctaacaggcaaaggggttttatttgttgtccatgcaataagtgtaaaaatcagaaggagtattctgcatccaggactattcatttccacttgtttgagtcggggttcatgccaagctataattgttggacatcccacggagagcaaggtgttgaaatggaagaagatgaagtggaagacgacaatattccggactttgctcagtatgttggatttgaaggaaatcaaacgggcgaggaggaaatagctgctgatggtaacgacgttgcggatgatcttggtcagatgttgcaggacgccagggaggactgcgaaagtgaaaaggaggcccataaattggacaagatgttggaggaccacagaacttcgttgtacccaggttgcgagcaggggcacaaaaagttggataccactctggaattgttgcaatggaaggcaaaaaatggggttagtgacaaggcatttggcgatttattgaaactcgtcaagaacattcttccggggggaaacaaattgcccgagacaacgtacgaggctaagaagatagtctgcccgttaggactggaagttcataagattcacgcatgtccgaacgattgtatcctatatcgcggtgaggagtatgagaacctagaagcatgccctgtttgcaaagcactacgatacaagattagacgggacgatccaggagaagttgacgggcagctaacaaagaagagaattcctgctaaggtgatgtggtatttccctataatatcacggctaaggcgtttgttcaggaacaaggggaatgctagaatgttgcgatggcacgctgaagagcgtcaacaggacgggatgctgagacaccccgccgatggttcgcagtggcgaaacatcgacagaaatttaaagaatttggaaaggacgcacgaaacatacggtttggtttgagtacggatggcatgaatccttttggagagatgagcagcggccatagcacttggcccgttacgatgtgtatctacaacctccccccctggctatgcatgaagaggaagtacataatgatgccgattattattcaaggccccaagcaacctggtaacgacatcgacgtgtacctaagaccactggtcgaagatcttaaacagttgtggaagaaggaaggtgtccccgtgtgggacgaggacaaacaggaggagtttaacctacgagcgctgctgttcgtaaccatcaacgattggcctgcacttagcaacctatccggacagtccaacaaggggtacaaggcttgcactcactgtatggatgaaacagaaagtacgtaccttaagcactgtaggaaggttgtatacatgggtcatcgtcgattccttgcagcaaaccacccggtacggaagaaaggcaagcacttcgaacataaggccgaccaccgtacgaagcctaaacatcgcagcgggaaaacaatgtttgctatggttaaagatcttaaagtagtgttcggaaaggggcctggaagccagcatatagagagcgaagatggtcacgcggcgatgtggaaaaagaactctatattttgggagttaccatattgggaattcttggacgtacgccacgcaatcgacgtgatgcacctcactaagaacctttgcgtaaaccttcttggcttcctaggtgtatacggaaagtcgaaagatacactggaagcacgtaatgatctgaagcatatggaacaacgcggcgaccttcacccggaaccaaaggagaaaggaagccattacttgagtccagccagctacactcttagcaaggcagagaaggaaagtatgtttgaatgct

SEQ ID NO: 15719 - DNA, 933 bp, Oryza sativa
  unsure (1)..(933): unsure at all n locations
attgttgcttcggcgtgcacggttggcttattatccggcctttgttgggggtttaggtcttcaccgaccggcttgccttcgccgccgccgattggtggttccgcctgcacggctggcctttatgccgccgttgttgggcgtatacgtcttcaccgaccggccgcctcgtccgccgccgactggtgcttccgcctgcacggctggcctattatgccgccgttgttgggcgtctacgtcttcaccgaccggcttgccttcgccgccgccgactggtgtttccgcctgcacggctggcctttatgccgccgttgttgggcgtctacgtcttcaccgaccggccgcctcgtccgccgccgactggtgcttccgcctgcacggctggcctttatgccgccgttgttgggcgtctacgtcttcaccgaccggccgcctcgtccgccgccgactggtgcttccgcctgcacggctggcctttatgccgccgttgttgggcgtctacgtcttcaccgaccggcttgccttcgccgccgccgactggtgtttccgcctgcacggctggcctttatgccgccgttgttgggcgtctacgtcttcaccgaccggcttgccttcgccgccgccgactggtgtttccgcctgcacggctggcctttatgccgccgttgttgggcgtctacgtcttcaccgaccggctgccttgtccgccgccgactggtgctttcgcctgcacggctggcctttatgccgccgttgttgggcgtctacgtcttcaccgactggcttgccttcgccgctgccgactggtgtttccgcctgcacggctggcctttatgccgccattgttgggcgtctacgtcttcaccgaccggcttgccttcgccgccgccgactggtgtttccgcctgcacggctggcctttatgccgncgttgtt

SEQ ID NO: 15720 - DNA, 24395 bp, Oryza sativa
gagccaggccgcctttccccccttttgtgacactgcccagtgggcccgcttgccagccgccccctctccctctcttagtgccgctgaccagtggggcccgcatgtcggcgccgccccaccccttcctgacgtcagccctggggcaatattgcgcaataaattgattaaggcttttctttaatagtaaaaacacagagaatcttctaaaaatcataactaattcatccgagctccgattaagtccattcaagtctcagtaaattcataaaaatgtatagaatccattaaaaatggctttgttctctgtttcagtagtcttatagcatgttttgcttgggtgctttgtttgtcgcatagatttcggccgtttcgtcgattcgcggattctcgaagacgttgctatggtctcatcagtgcgagagcaaggcaagtcatacattgcaattgatcatattgtacccaatttacaaatgtcccgcatttctattaaatattgcactgttttacaatatcatgtgggatgggtcctattactcagctatatgttgtttcccttacgcctaccttgggtattaaaatgactaaatgttggtttaggagatgcttagccatgcgtagttcaactagtgcacaaaagggggtcacattaaagcatagactttgattattggcaatagctttggattagtgccaccgcaatggtgttggttaattaaagtacactacatggtgggctgtgggtgcatggttttgctagacgtgcccatggcgattaaggaccggttcgcgggatgccctggaagaacttatcgtacttaccacaagccagcgtgggcaacggctgggcttgtagtgtagtttttctctagccgacgtacccaggcaagggtgggcgtgatggagttgggtcggccggggtgtccggttgatcggcttccggattcaccgtggcacgaaaggggggctgcccgttgcctgctggggacgggggcgaaccctaaggtgtggtgcgatcggttagatagggttatgcgaagggtcctgtcacggcctctttccggtatgtcgtggtggcatgtcggcgcacgggaacgtgtcgtggggctgtgtcttgtgggtacagttgtacacctctgatcagagtaaaactattcgaatagccgtgcccgcggttatgggcggtcgaccagattcaccgtgattagtctcatccctagtttagcttaatgaactggtgtagttcaggtggttggttgggcctgttgcaacgtggcgtagcgttggacagtgactggttaatattgcttaattactacaactgtttttactattttcaactactggttttaaatgcctgctttatgcaaatgaaccccgtagcctcctttggttgtatcctgcatcatacctcctcttccggtatgacttgctgagtacagtgggtagtactcagtcttgctctcttttcccccacaccagagttgaagtccttctcagttgaagatgtctcgaagaggttggtttcgtcgctgccatcaaggatgcctgtggaatggagtcgcccgctgcaggagtcaagtcttcaggcttagctcgcttttatctttttccgctgcatttgtaatcttttatatttttgtaagacgtggatctgtatgtcaacaattgtcgtttgtgtaccctggctggtcctggacaggggtttaatgcacattcagcttagaaattctggttcgtgaatttctgggcgtgacaccccgccgcgtcgtcaagaccaccgcatcgccttgctgccagacactgctcccgtggtggtccgactgtactgctacccggcgcgccacaaggatgaactggaacgacggtgtcgcgacatggagtctcaaggcatcattcgccgcaagtcgtccgccttctgctcgacggtcctcttggtcaagaaggccgacggctcgtggcgcaggagtaaaccctaattaacaacgtgtctaataatcggaattgtcagggaaattttttttcgaattctctttgctttataccattaacatgatttttaatggaatattcagagcagaggaagcaacagtgttaattaatttgaaatgtcaggatttgaattaataattttttcctctccctcctttggtcctgaaccgttccaggttcactccccgttcgcggttcgtcgcattcaccaacccctttcgccgccttggtttcgttttgtatggcgagccgagtcctattccgtcttcgattatgtttctttttcctttcccgaaaatgcaccgcatttgtttccccctccttcaaatccctcattcgttttgtatggtgagctgagaattattccgtcttcgaatcctttttgccctccccctctccttctgccgagccgcgcgccaccctaccctcctttgccgcgtgcgccctcctctcccccttgtcgaacccacaccggccccaccatatccatctcgatttcctcatataagtcatcataccccctctttttttttcttcttttcacccgccaattcctagccttcacctcctcctctcccgtgcgccaccgccctagccgtcgccgccacccggagttccgccgccgtctcgccggtgagctcacatcgctcctatccatctcgtcggcacagtttaccgcggtggtttttccctaggttttaatctaataatcttgtttgtctagcgttgtcgttgtctctgtgtgttgccgcgggaccttcgccgccccctctccctctccggtcgtcgtcgcttcttggtgaggtccttgtccgttttaggtgtagtcataggttgtggtttttattgatgacattttggtttacacaaagtctgaagatgagcatgagcaacatcttcatttagtgttggaaaaattgaaggaacatcagctttatgccaagttcagcaagtgtgatttctggttgaaagaagtcacgtttctcggacatgttataaccgccaagggtgtagcagtggatccatcaaatgtggaagcagttactaagtggtcaccaccgaagacaataacacagatcataagttttctcggactatcgagtttttaccatcggttcattgagaatttatctagaattgctaagccaattacgtagttgctgaagaaagaagaaaagttactatggactccacattttcagaaaagttttgaggaacttaagaagaggttggtgtttgcttcaattttgatcttgcccgatcagaggaaggattttcaggtgtattgtgatgcatcccgtcaaggattggggtgtgtgcttatgcaagaaggcaaagtggtcgcatacgcttcacgtcagttgcacccgcacaaagataaatatccaacccatgatttggaattagcagcagcagttcatgctttgaagatttgatgacactatttgattggcaaccattgtgagatatattgatcacaacattctgaagtatattttcacgcagcctgatttgaatctccgtcagcgaagatggttagagttgatcaaggattatgatgcaggcatacactatcatcctggtaaagccaacgttgttgctgatgctttaagtagaaaaagttattgcagtgcattgcgtatgaaaggaatgtgtagtcagttgatataagacttagagcgtcttagtcccattatgtggagaagatcttgaatcgctttggctacattgatagtaagccttctccaacaccttatgatcctagcttgttgcttcgcaagaacaagagaattgctaggaatcaactggaatactcccaaatcattggctcgttgatgtacctggctagtgcaactaggcctgatatctcctttgctgtgagcaagttgagccgatttacctctaatccgggagatgatcactggcgtgcgcttgagcgagtaatgcgctatctgaaaggtactgtggaattggggcttcactatactaggtatcctgcggtactggagggttatagtgattctaactggatctctgatgtggatgagatcaaagccactagtggatatgtcttcacactgggtggtgttgctgtttcatggaggtcttgcaaacagaccattttgacgaggtcaaccatggaagcagagctgacggcactggatactgctactgttgaggcagaatggttgcgtgatctattaatggatctgcctattgttgaaaaactggtgccggctatccttatgaactgtgacaatcaaacggtaattgtcaaagtgaatagttctaaggataatatgaaatcgtctagacatgtgaaaagacgattgaagtctgtcaggaaattaagaaactccggagttataacgttggattacatccaaacagcgaaaaacctggcagatcccttcacgaagggactatcacgaaatgtgatagataatgcatcgaaggagatgggtttgagacccatgtgagttatactatggtggtaacccagtcaatgtgatcggagatcccgtgaattagatcctgggaagaacaaaccattagtaaactagaggagagtaccaatatataccctctccaagtgaagatgcatgtactctcgtgagctacaaggcaggttggctatgccttaatgagttttgttggctttaattagcgaagatgttgtcctgcagagcattcttgaaagaactcacctttgtgagcttgactgttggtcgcagtctatgaagattttgggtgaatcttctaggaagcttactaaagatctaagagtatgacttatacgctccacccgaggggtagtctacagacggtctagtaccagataagactttgagtgaaacttgcttgcacaagacttgcaattcaaggcgtagtccattgttcaagttgtgagtaagtgtagcttggagttctaggtggatgttcaaccttaatcggtctccatcgaaccgctggtatataaacagtacattggaaaagacaaatctagtgggattttgagatttggtgggggattgttggaattaatgaatgggccttagcccactcgaagattaattctttggaaaatcacaaaagcccacctcatgggatggcatgcatgtggagtttagtaccaccttgcttattctaggagagggggacctccttaaaagggaggatgccctcctagccacttgaagcatgtgtggtggagagaagaggggaaacacgcgcgcgctcgctcgcctcgcctcgcctggcagggcaggcggcgagcgtgcacgatgtacacgtcgaatggtccgaaaaattggctcctcacccttgcgcagatgcagcctccttttgcagttttgttttgctgcaaattcggattcgtttttgttttggaaacgttccgaaaaatccggtgcgtgccaacggcgtggagtccggataagttacgcgcgacttatccggttcggttacgcgcagtagagatcgtgcaggcgtttttgttttggaaacgttccgaaaaatccggtgcgtgccaacggcgtggagtccggataagttacgcgcgacttatccggttcggttacgcgcagtagagatcgtgcgggcgccctgatcaagcgacccttctctatataaaccgacccgccgtcttcacgcaacacacgcgaaatcaaaatagggtttgcctcctactctgtactgcgccgtcgctcgtagactactctatcccgctcgccggcgtgcaccggcgatcgggagagcaggtctccggaacctctgccttcgacgtcctgcaccgggagaaggcggcaataaggtttttgggaagcgcttcgcgcgactgctccctattcgttcgcgacggctcgccttcctcttcgctcacgtgtttcgtgcgatcgtagacgcctgcgaaaagtttcgaccaagcaaccggtctttccgtcacctcggtacgtgttcaatatgttgcgcacatttgatctgttcatgttatactgtgtagtttacatgtgtagatctaatgatgcgttcatgctagttttcatctgtaatgtcatgatttatttatggaatagattaaatcattatatgcctataatctcaacagtggcggcggcgtccaggcgatttgtttgagatgatggcagaggcatgggcagcatgggatctgtgattgagtctgtagattgggcatcgagcaaaagattggaacatttttttcggggaattcgattttttcgatagtggttttatctgcatatgttttttctaggggatagtttgtcacttggcttttttgagaaagctggttttctagaagagtctctttacgcatgcatgaagcacctgcagcagttgaggattagtctcctgcacgacagagtagcagaagacagacaacctccccttttagactaagattaattcatataggagggccgaacttagagtatttcacatgctaaatgcagctttactacgcttttccagtgtcgtatatgctaaatgagatatgttattgaaactgatttgattactgcgcctaatgaaatatcttatgccattatgaattaaattctaatatcttcatctactcacttaattcaggtgccgcaagttgttgaaagtgaaagtggccgcttcaccctatcatatgttactttggcaaagctgaagtcttacgtaccatatgcatggggtttgcaacacatagagactgttttggtaaacgtgtggcagttggagaacttgcaaaacgtataatgataagacaaccttcagatgtggttttcaatgtgaaaaatttgatcggaaagcattttaatgactcttgcgtacaagaaatgaggaaaagactccctttcagcattattgaaggaccagaaggagaatcttgtgtagagattcatggaataaaattatctcctgttgaaatcaccacagccatatttacaaaactgaaggatatggttctgatgcaccaatttcatcacaaatttaaagtggtgatatgtgtaccttcctttttcaatgaacagcaaagggaagacatcatgtcagcaggtcgacgagcaggtttagagatattacaattgatagatgaaccgatagccgctgctctttctagcacaacaataaaagaaggtgttgtggttgtttttggcatgggtgctggatcatacagtgttgcggtccttcatgtctctggcatgaacattgaggtatttctttaagttcatttttatcttgtgcatagttttctagatcattctgatgttgctgaaccctgggtcaattgttttgcatgaacagatgatagcacaatgtggtgattcttgtatcagtggggatcagtttgacaatatactactacagttgactattgtgttacgcagatgatcaaacttcattcggtcgatgttcgtggagataaatgtgccatgagacaacttgtggaagttgctgagcaagctaaagtgaaactatcaagccaacctacagctacaatttctatcccttacttgacttcatctggtcaaggtcatggccctgctcatcttaacattaccatttctcgccaagagtttgagaagttagtgaataatttaacagaacaaattcaagagaagtgtcagatcattttgaaagaggctaaaattgctgccaaagatgttgatgaacttgtattgtttggggggatgacaagagtccccaagatacagagaattatttatgaagtttttggcaagcatcagagtgcaaaggtgaacccagaggaagctttggttattggttctgcaatgcaagcagctctaattgtagaagatcagcaggagatgagcaaagacatgattccactgtctataggaattgagtgcgaggaaggaatttttactaaggtcattcctaggcacaccagaatcccaacaaaaaggatggttaagattcctgcatggtgtgctcaaggggagtgcctacatatcagaatttttcttggggagcatgtaatcgttgatcataatacacttttaggagaagtagaattaatcaataatagaagatcatatgaaggtggtgttgattatgaattgacatttgaagtgagtaggaactatttggttgaagtcagtgtcagcaatgctgatgatgggagcaaaacaatcaaggccttcccaatagatgagaaggttgtatgcaagcataatgtgaacagagctgtcagaaatgctttacgtgactggtcaatgtatgcagcagaaatttatgctgacatgagaaacctggcaagacatacaataaacacactaagtgatgccttgtcagccagaaaggatgaacttcctaaggacctttatgaggatgcagtgacagcgttggatgatctgctgaaggcaatgggtaaggatgttagtgtgttacatgataagatacgtgctgccatgtctgttgaagtaactattctgaactggaggccaccatcaaaatctcatcctggtgattatgatgactactcagattatgaaaactaaggtagggtgtgcttagttcacgtcaaaattagaagtttggttgaaattagaacgatgtaaggaaaagttgaaaggttgtgtgtgtaggaaaattttgatgtgataaaaaagttataagtttgaagaaaaagtttggaactaaactcggccgcagtgcgaccgcagaaacttagagcccgtagaatttatgtttaaactagcttgttaagtggtgatgctatttatgcgacatgcaacttgtccttcaaatctataaaatccatacgcggatgggattgaagagaatattccctatcaaatacctcgcaatccacttgtgggtgggattaattgaagaaggccttgtagtttcacggtacattgtgatgtttcttgctgcatgcaccctgctgcaccttgcaacatgattgccgtgtttgatggcacattttggaggttttttttttttcatccagatggtgctttcctccaaagatgaccctgggatattccgtgtcgtgctggatatgagctggaataagtgcttgtctatatattatttcattagaaaaatgctgcgttgcaacccaaaaaaaaactaatgttacgataatgattatatttattttttagttccatgggagttataactgtaagcgacgacggcgcgcatttccctaccgcgggcggtgaaataatagttaattttaataatacaaacatcatttcagcatttatttaaataaaaatctaaatttctctattggccattttcagtccatttaatgtctgagcgcgcaataaagtctaatttacctcctccaactcctctgatttcgtttgttggacctgcccgccttccctcagcccataaagtatgcgtggcccgacaatggtgtcagcccagacggctcggatcgcctccacaccattgaaaagcctaaccctaaccctctactctctcccaagcggcagggtcgtgcgagcagcgtcggcggcgcgcaaacggtggcggcggtgccctccaataccacgtgcgacggcggcgacaccattccccaccacgagcggcgtcggcggtgcgcgaataacggtggcggcgccctctcataccgcatgcgactgcggctacacccttccccaccacaagtggcggcggggtcgcgcgagcggcgtcggcggcgccctcccataccgcgtgcgacggcggcgacctccttccccatcacgagcggcagctgaattgagataagttttgtgcgctttttattatttttcccgttctttttcctttttttttattgtccgattggatttcaaacggatttacggatggaaattgaatgcgacgaaaggaaaaatgctaatcttttaattagttatatatatagagagaggacgtgtctactaactaactaccttaatctcatatctagttgttacacccaaaagtgcatgtatttttttctacttatgaaattttcttttaaattacttatccgattacaccattacgttcgtaacaattaaatctttataaacatttcacattattatatttttatgaaaaaaatacaaattacttttagatttcattaaattattcttagtcataaaactaaatttaataaagcctgagagtaatttacatatattatataagtaacttaaaacaaaagtaaagtaacttgttatggctttaaaagaaatttattgtgggggtaaaaacataagtgtatctagaaattagatttaatcaacaattcaacatatcatagttacccccataacggatttacttctaatgtcatgacaagttactttctttttcttttaagttacttctataatatatgtaaattacttttatgttttattaaaattacttttatatgtctaatatgtaacttaatgaaatataaaagtagtttattaatcatgtgaaatcttgttataaatatttaattgttacgaatacaatggtgtaatcagatcgtagatcgggtgagtaagttaaaaagaaaattttatttgaagcataggttttcttatacattcataatgttgtgggttgtttattctataatcatttttagtcaatgaaataatttgtgctaattaaatttaatttctatatagactcatgtttttacctccgtaacagatttacatttaatgtggtgacaaatttactttctttttgttttaagttacttctataatatatgtaaattacttttaggctttattgaatttacttttatatgtctaagaagtaatttggatatattataaagtaatttataattttcatcaaaatataatcatgtgaaatcttattataaagatttatttcttacgaacacaacggtgtagtcagatcgttgattgttgtgtaatcagatcgtagatcggatgagtagtttaagagaaaattttatttgaagcataggtgaatagggtctctcattagcattaaaatgagaggcctcttgatttagatttttccattctctattctgaccgactcgcccaatcgactaattgccgttcagttggggttggggaggcggcgctgggttgagccgacttggctaatatttcgttcacgtattattttttgagcgtaaagagatattttattaatggcagaacataggattacattcatggttaagcggtacaagaatttctgacggagcctctactttgcttcaactcctgatctcataaccatttgagctaaaatatgagctatgttatttgaatctctctttatcttgtgcacttacacctgcaccagacattgcaccgcagcttttacttcagcaataatacctctccattctgctcttgagtcttgtgttgcattcagtcctgctacgacgtcggcgttgtcggattctaagattattggcatctgtacccaattggcagccaattggacaccctccaggcaagccaaagcttcagcctgagcagctgaactgcatcttgatagtttcttacaagctgcaagcagaaccaaacccctgcaatctctagcgataattccagcgcccgcttcacccatctccttattgaacccagcatctacatttatctttgccactccctctggtggaggttcccatttcattttttgtgcagcattgatttctgctctcgctgggggttcttcaaacatcggtcttttgcccttcttatcttcaacattttgtcagacaggcaacatgcacccctcataattggccaagaagttaactgaagctgctattggactgttctcacttccatgcatcatctcatttcgaaggtgccatgctctccacagcatatatagcgtgtgtgccctttctatctcgttcgattcatccagaagcagcaaaagccaatccggtccagttttaacaaatttattttcgaggggtagtcgccagacatctctcaacaccttcctaagtgctttggctttagtgcattcgaccgttgcatgaaaaccatcctcatcagttaagccgcacatttggcatgtgccctgtctttcaatttttcttctgcatttgttgttccaggttggtaacctgtcaagagcaagtttccaggcaaagatcttgaccttggcctgtacctttgttttccatatggacagacaaagtttcctttcccctaaaattgctctacttgaggtagcttccacaacattcctagacagattccaggccaatctgtaagcgctcttaacagtgaacaggcctgttttttccaagtgccaagcagggaaatcctcaagttggcgagtatataatctaatctttagaatctcatcagcatcttccttcttcattacatggcgaatcagattttcattccaactcctggaatcaacatccatccgctcggcaccgcccgccgccgccgcgtcctccccgcgctccgccaccgcccgcacaccgccgccgcatcctctcctgccgccaccgctgacctgtttgagagagagaggaagagagagagaaaagagagaggatgaggagaattgcaggtgggtagcacatttttttaataactagagtgctgactgggctgtcacgcgtatgccacgtagaccaaaactaccgcggattgggtcgaggggggtaatttgtccggtttgtatagttgggggtgaagaatgcctggttttgtggttcagggggtaattcagacgaccgtgatagttcgggagaggggggtaattcgtactttttcctttttaataaaacaataagttcgcctagtccaaaagtttttacagggcatcaagaccattgcaacgtatgttatctattgcaaagtggactcgggcattgcaagatactcaatctttgcaacacatgttctgcaacacatattatctattgcaaattggactcacccactaataattgctagggtcgcatttcagcaacgcatgtttaatgcattgccaagcatgtattgctagaggggggggtcctgttgtagtgtaacagcttgaaacctaggattatgagcagttttaatgtaattttcaaatgcaccactctcaccaaagtttaagggtaaatcttgtctagcaattaggcggggaagagattcttgagctaccataggatcgtactcccatgtacgtaccaaaccatcaggatttagtagcagttgttgttatcgcaactggatcccttgcttctttgcacaacccttagcatgtcatctcaaagtatcctgttccaccatatgattttgtggataaattatgcttgcatattctacatttcgcgtatgttacctgccttctgtcaggacctgtcaaggcggtcacctcatcaaaatgttgccaaacctccgaagttcgtgatctctttgagacagtgttcgtcgatgtagtcccactcatagttcatgaaactcctgaagccctcagtacctcatccaaaatcggtggttgttaacgaccaaatttggtaatccaagtatcggagatgaagatgggatcgaagcggaattcgagatggagatcactctggaaatagagaagggatcgactgaagttcgaatcggctgcgaccaggatcggccgagtccgagttggacatggttagccgattgagccgaatccgacaatatgacacggcatacattgtcgggttgagttgatgtacttcatgaggattgccacgtatggatagagtcctgagaaggcaattgtatctattaattagatattttatgtaatttccttagagatatgtttgggcaaaagtctgccgcaaagacttatggtatcttagagtttgttagagataagagtcgtatccgacatggacatattttgtaatctcaggtataaatagaccccgagctccatgtaatcaatctaacacacgttcaatacaatctcggcgcatcgccacccttttactttcgttttgtttcgacgagttcttgctttcgggttgagctgcatcggtttcgatcttcaactagaggtaaaacttgttatggcggcttgcgttctcgggattagtgcttccatctttatgatactctaatcttgtttatgtaactcgtcgagttatcatatatcttacataatcttcggcaatatcgctatctaaccttcaatcggttagcgtctgttattagaaggcagccgattaggttatatatcgacgttgatttagattatataggatatctaccactttatgaaacatccaacggtttgattatctagatattgtccttcttttcatacttatagctgcatcagttgagttagaccttataagtcgtgattagaatctcaatctctagtctgcttttggttgccaattagagtagtatcggggtttcagccgatctttcctgatttaactaaatttttcctatatgtttgattgacatattaaatctgccctttatcttaagattttgttgcatttaagtatattaggctttcgtttgatatattttacttgctttgatatcttaatatagagtggtatcggagtattagccgatacatgctagatctatttgatcggctatgctataaacatatatagtcttgttgttaatatatactttgatctaagtgatttatattgtctcggcatggcgaccgatctatcccaatcacttgatttaaatgtatatcgacataaggattatatattattaatatctacagccgatcgagtagatttagttctttcttacttattcatgattgccgatcgatccacatatgacatcggctcaaagataaatgatatgtcatcggcaactagccgatcgactatcgtttatggatttaacagcggtttctttgtctttgtttctcgttgattgcaggatcaaatcaactggcacgctcatacacctaaaggcaagcttttggacctgcactggagttaagcagatctcccaggcctcatgtttttacatcaacagttgtgttggcgccgatctggtggcatcatgcttgctaggtgggaatgaccccaacaggtaagtaggctcgaagccagataacgtgaacaatggataactcaaatcgcccatgctgaaatattacaaccacatgcacaaaaattcagaaactttattcatataacataaaatatgaataatgcaaaagtattatccacttcctttcttacctcctttacaccttgtgcgtgcagctttgttggaaaattgtactccacaaactatttttttatttttgaacataactcagaaaatcgaactagcacacaagaaaacacaaaatggggggtttggatgatccataatgttgacggtgcgtgccatgtccattcttgacggtccttaaatcataatatctgaccgtcaatacctgcatataatgaaataaaacatggtatccaacttagtggtaggtattattactaatcatttccactagtgttggtgaaacatgtgtatgcaggtaatttgaggagaaaacacatccgtcatgtgacaaaatgcacctccgcgcattcaggacgcgtttacacggattggagggccaataagtcagtaaaaaccatttagaattgggccaaaacatagcccaggttgttgggggcccattaagcaacctctcggtcgaaggagaggccgggaggagtgtttttgggtttggccgaacccattagttcggccgaaccattcctggcgcctcccgccatctgcttccacgtggacggcttggattcctcccctatggcagttgcatggtgttttggtcatttcccatacccctaaccgtcatttggagcctatataaggaggtcttcatctcacttcaagaacacacaactttgagctgaattacaagaggctctattgtatcttttgtacattaaaataaggtagagagtgaggggaagctctagaggagtgcccggaagtttggcgctcatccgacttctacctcgacgagtgtagcttcctaggaggaattctggaggaataccggagttgtcggtacactctgctccgggctcagagaaacttcttctattaaataagcattcatgatcctttcttatgttatttaattacttaatctgaataagatatatttccatctttgcgggttcattgtttagtattcatattaagtgctctagtactaggattctggataaagaaggaagttcctgtacaagtattagagtagtaattaataatatagacgtggtgtctaggttagagattacctttgtttgttgtgtatatcccatggatttgttagaggtagacgtcaggtggtgacagccctgaattccgtcccagtaatcctccacgttcagatacatcatagagctatagccggaaccacgctggtaggggtgggcccacttcaattcatgggtattcaaatgaatacccaagattttggaacaaaaaaatacatatatgaactatatattccatatgtatacatagaaacaaaaggaaaaatgcttatatctattcaaaactcgaaagaagcccaaacttaaccctcccaccacccaccatttcaggcccgttggcccaatagcaaaaaaaaaaggcccaattcctctctaaccctatctcatctcctcacctccctccccttcccatcctagccgccacgcccacaccgtagccgcacacgccgacggagccgtcgccgcgccatcccagccacctgcccacgcgcctcgccgtccccccgcgcccacgctccttgcccgtcctcgctgtcgcgacgtcgccgcccgccggtcgtgctacccagccggccagcctactagtcgtctgcgcgcgcgcgcggcgcgcctcgccgtcgcccggtcgccggctgcccacaggccatagccggctccgcacctcgcgcctcctcggccttcgccgcttcgccgagtcgccggacgtcggctcgccgcctccgcgtctccgcatgaccgcacctctcgcctggccggcggtggcacctcgcgcccggtggccgcctgcacgcctcgcgccctcgccgcctccggcctcccatcctccgtccttgagacctcaacagcagtctgcaacggtgagtcggtgcactgaagtgttgattattttagcttcatattttgtgaaatgtgaatgactatctagattactagattaggatttaggaaccaccgaaccactactgctttgctcaattgctctttgataattgatattgttgtttgtatgtttgaaacatgaagagaaaaaaggttcccatggttaatttaaatttgatatgttttgtcaatttatagtttagtaatgtactctaatatgtttaatgcattcaatttatggtaaattctatccatttatgactttatgaactcatacttataccgttacatattatacaactattagaccttgggttagaaaattttctctcttacaatttcgaatacccaagttgcaaaacctgggcccgcccctgcacgctggcagaccagcaggggtcggtgctcgaagcaatagataggaaattacctttaacttagcttaggtaactaaaatacatagaaagtcctctctagcctgcctagcctacctttagttgttgtccttggatagtcttagccttaggtagattacacacgttccctgagttcgatatccttttggggtcacccgaaggtgaagtgctacagcggtatcccgtgcgcttgcggatttatctgtggttgtaagaaataccaacatccataatgctacaatgttcacttttaaatctcgtgcgatttccattgggcaggcggggacgcgtgagcgcgagaggattggcgtgcggcaggcgtgtggcacggcgaccagagcgcaatgagattgggttggggcgcagggcaaggcgccgcgggagcatgcatgcgcggagattgggcgagagaggtgatgccactcgtgctctgtcttggcgggggcttgcaccatgcgcgcccattggtgttgacgggaagtggcatggccgcatgggcttgatgtgacggcctactataggaaccgtgaagtgtcgtgccagcccacgggctgcaacctcggcccaggcacagcacggcccagaaacttccatgaccattccttgcagggccgggtactgtagtggtgtgccagggccgacccattaccgttcagcccatttggtcagctataggctgggataggtaggcccctcttgtcatcctcgacctccagccgccgctagctccaccctatcgaaccctagcaccgccattgccactaatctcatcgctcccgatagtttctacctacgccacatgggggtggaatactcctcgtgactccctctcccatttcccctacttttaccattccatcttgcgctaaatcgctcacattcaatcacgttaatctcgccggtgccattgatggaggccgagatttctatcgtcgtttccctctctccttggcctctttccttcccactaaccgctataaatcgatgtacgcacctctgtcgccccttttcgttcgccattgtagctcctcgcgctcctattttagctcgtaccatcactccctctctttgccacaaccgtcgacctctggtcgggctttgccgccgtccgggacctcatctcaccttggcgtcaatgcctccagcttcgctgcatcgccaccgacattgtctacccattcctcttgcttggagaccgctagaacctcgccgtccctatcgaccagagtttgtctgccatcttcttcctcgccggttgttgttcctccgccaccgtcgcatttgggtgagccatggacctctctggccctttttcctccttcccccatcaccacgcctatggtcgccggtggtgtccataggggcacgggcgccgcctcccaccggctgcgcctcgtggccgcttcacgtggggcccgcccatcagccaccatcgtccgcctcaggtggctgacatgtggggcccgtgagcgcccacccggtggccggtgcgtgcacccgttccaccttggtccgtgagaatgacacataggtcccaccccatggactcgatccatgcaccatctctcctctgctggcacaataaatcatttttttaatcacaaataattcaagaatttggaaatattcatttaaacaacacctaaacttcgaatatccatatcttggtcgtttaggctcagagttgatccgttcaagtctctatttttcccttaagaagtcaagaactcatttttgtgctttgttactgtgtcttatgtggattttattagagtaaaagcatttttcctttccattggtcgtgtagacgctataagttcggaagatccgttttacttttaggaaagcaagcaaggcaagtcacatctcgattgaaaatattgttgtccgatgattttaaaagcattattttaatttaaattattatattactgctttatctaaattcccgtgttataattgttttatttagccattcttactgcttttgttatagctctattattacttagtgaatactactttgttcaccctaggcaaaaacaaaagccccactagtgaggactctatatgtagtacctctagtgaaactagtgaaagtgtaggtagatgcttagcccgctaattggacaattagttatttcacaatcttagattttgggagttgtattaacatcattgagacatcattaaagtgtaggtagatgcttagcaacgcacggggtttctgctagcactaacaagtgagagagtccccataggccacctgaaacaaaggagtaatgggctgaaggggtaaccccagcaaccaagcaaaattgtaatccagaaaactgtgagacctaccagaatcaactaacattagcaacactttgttttgcataagggttctcaaccgaatagctctctgatgactagaacttgacaatacgtacagagaaatactcctttcgttttttaatagatgatgccgttgactttttctcacatatttaaccattcatcttattcaaaaattttattcaaatgtataagatataaatcacacttaaagtactatgagtgataaaacaactcataacaaaataaattataattacgtaaatttttttaaataagacgaatgatcaaacatgtgagaaaaagtcaacggcgtcatttattaaaaaacagaggtagtatgacaatcctcctcatggtcagactcttcctcagctataacagcattcaacaactcatcaggaatcacttaagtaattttcattgatctgatctgaccaatcactgcgtgcatgtgtttaggagaatacttatccccacacttaaagcagagcccattagctcttctctttgaggtttaatggccaatgtttcagctacagcaggtaacccttccaacgtaggaccaaccctcttataagtcagtttcttcacatattgctgagattgttccaacgaaacacattcttgtgtcagagcaacagcggctgcttgctgaattgtatcaggtaattaagtggaccatcactgcatttcagatttcctcgagacccaacacaaaacgacaaaccaaaatcatgccacccactgagggatcaaacaatctcactttgtaaactaatgaatcaaattgttgtttatactcagccacagtgcatgtctgagtcaacatttccagagctagcgttttctccctgtgtgtgttaccctcaaattccagcacgactgcataacgaaaatgagcccaatcgtgcatatcttccaccaccattgcgctgcatttccagtcagatgcaacacagttgtagaaacattaaagttgacaggaattttatacttctcaaaataagtttcacacatcaatccaaatacgcacataatgccgatcaaaacgcgaaaaatccttttttggcaagtaactctttgatcaaatactgccttcatgaggtctacttgattcagcctcaggtggtggtggtgcatcagtgctggccagagaaacaccgaaagaggacccaagaatagtcacttaatcttcaccaacaacatatgtaggtgtggaggcgatctgcttctgcagccgcgcagcttgtgactggtcctgctggctgctgcatcttccccaccgaatccaatgtgagatctactttggtgatcacttgatccaatcgcccctctgctcctccatcttggaatccagcgtatcaatccactgtgtgagtgtgcccaacttctccatgagtttggcctcccactggtggagtgtggagattatgggtaccccatacccacatggcatagttatccgactggctataggggataacttatatctatggaatatgtaacagatcatgacttgggtattacgtttccttgtatgttacggaacggcctaaagtcctggtttgataatattgtaaagtagatttaggaaaccgataccgtattggttaaggtttctatcttgtaatcctgccccccaccctatataaggtgggcaggaggccctctagggggcatgagacaacctgatcatcagatctatactacacccggcggattcaaatccccaaacaggagtagggtattacctctcattgagagggcctgaacctgtctaaatccttggtctctgcatccatccacttttaggtctcgtgcgctacccccttttattattgccgaaatcatgtttcgacagttggcgcgccaggtaggggttgcgtcgagtttcctatcaacgagcgcgatggaatcaatttcatgagtcgccgacttcgctttcgctttgggagttttcacttcctttccgtcgaccacttcttcaagctcctcttctctgacttgatccaaatcagtcagggggaaactcaatctgatttttatcattatttatcatattgatttttaatctcagattaatttcttgctattttttgttgttgttcgcatataactacgcggcactattgaggcgattgatgctggtcatggactcgaggcgtctcagctttccggtcgatcggccgcgagtccactccgccggcttgtcctcgccaccgccattgctgatagcaacaatgacttcaccgccggcctgcctccgtcgccgccgactggtgtcatcgcctatacggttggtcggtcacaccaccgttcatgggcgtccatgtcttcaccgaccggctggccttcgccgccgccgactggtgtttccgcctgcacggctggcctattatgccgccgctgttgggcgtctacgacttcaccaccggcctgcctccgtcgccgccgactggtgtcctcgcctatacggtcggttggtcacaccaccgttgatgggcatcgtcatctacaccgccggcctgcctccgtcgccgccgactggtgtccccgcctatacggtcggttggtcacaccaccgttgatgggcatcgtcatctacaccgccggcctgcctccgtcgccgccgactggtgtccccgcctatacggtcggttggtcacaccaccgttgatgggcatcgtcatctacacggctggcctattatgccgccgctgttgggcgtctacgacttcaccgccggcctgcctccgtcgccgccgagtggtgcctccgcctacacggctggcctattatgccgccgctgttgggcgtctacgacttcaccgccggcctgcctccgtcgccgccgagtggtgtcctcgcctacacggctggcctattatgccgccgctgttgggcgtctacgacttcaccaccggcctgcctccgtcgccgccgattggtgcctccgcctacacggctggcctattatgccgccgctgttgggcgtctacgacttcaccgccggcttgcctccgtcgccgccgagtggtgcctccgcctacacggctggcctattatgccgccgttgttggatgtctacatcctcaccgttggctcaccttcgctgccgtcgactggtgtttccgcttacacggctgacctattatgccgccattagtgggcatcttcgctttcaccgtcgaccgccttcgtcgccgccgactggtgtcttcattgttattgatggacgactttgttcccacattggccacttctgccatcaccaaggggaatattacaaagctaagtcatcatttattttattctttatatgatatttttccttttcctctgcctcactacaccaattggtcttccattgagtagtgagtcgggggctacagatgttatatcatattttttataatatttatcttgattgcttgcgacataatctgagtacaaaagtacctatcgagttatggagttctatcttcctatgctttccgtttggtttgccaatggatggttgcctttgggccgattcctagcacccgggggctcgttggatggaccgagtaacgcaaggtgctaagtattattcggaataaatcaaaagcatagagatgagataaatttattttctgctcttaataattgcaaaagtacccgagtagtaaactccgatccgtgaaactttgttccattaatgacgaactcatgtcactcatatgcatgtttgggaagtgcttaggccgactcccagtgcttggtggctatgactagttgggcagagcgtttaaacgtaatgagtcatctgctcggggaaatcaaaattgacaagaggagaaatacatgtttataaatattttaaaatacttgattttttctcgagtattatatttatatcagatactactcatcctatatgtttgttctgcaggatccagatccagatatgcataaaagggattcatggctttaggcttatctcttacgctccaggaatggatcagtcagaacatcaccgactggcttgccttcgccgcggccgactggtgtttccgcctgcacggctggcctttatgccgccattgttgggcgtctacgtcttcaccaaccggcttgccttcgccgccgccgactggtgtttccgcctgcacggctggcctttatgccgccgctgttgggcgtctacgtcttcaccgaccggcttgccttcgccgccgccgactggtgtttccgcctgcacggctggcctttatgccgccgttgttgggcgtctacgtcttcaccgaccggccgcctcgtccgccgccgactggtgcttccgcctgcacggctggcctattatgccgcctttgttgggcgtctacgtcttcaccgactggcttgccttcgccgctgccgactggtggttccgcctgcacggctggcctttatgccgccattgttgggcgtctacgtcttcaccgaccggcttgccttcgccgccgccgactggtgtttccgcctgcacagctggcctttatgcc

SEQ ID NO: 15721 - DNA, 3993 bp, Oryza sativa
cgatgtcctcgcctgcacggctggcctattatgccgccgttgttgggcgcctacgtcttcaccgaccggcttgcctttgtcgccgacgaccgatgtcctcgcctgcacggctggcctttatgccgccgttgttgggcgtctacgtcttcaccgaccggcttgccttcgccgccgccgactggtgtttccgcctgcacggctggcctttatgccgccgttgttgggcgtctacgtcttcaccgaccggccgcctcgtccgccgccgactggtgcttccgcctgcacggctggcctttataccgccgttgttgggcgtctacgtcttcaccgaccggccgcctcatctgccgctgactggtgtcaccgcctgcacggctggcctgttataacgccaactgatgctatcttcttcacggctggctacatcgctgtcactactaataggcatcagtatcttcaacacaagctgcctacgtttgccatggctgccgactggtttcttcacttccatggctgcatgattctgctagtgttgattggccttaccatcttcatcgccggtcgtctcgtctgctgctgactagtgccctcgcctctacatctggtttatacagctaccactaatgatggacatcatcgtcttccgccgccgactcgtgttatgccgccgccgactggtgcttttatcttcacaactgcgcgtcttcactaccggttcacttcatcacggcaacacaactttgtcatcatggtggagcgacttcatctttattatcttcggaaccagcaaactctattgctgctacttcacaagttttgctacatcaccaaccatgacgttgttgtgaatctcgacatctcggcatgcgatgccgtgttattttactacaacaagtggctctccaatattcaggatttctacttggacatcttcaacacatatcttcaatcaagcaatgactactcgacgacaagaagctataattctcgactctatgttcagttgtttcccaactaaccaaagagtcgggggctacacaaatataaggctcaaaatttgacaaattttatataagccaatgagtcaactccaggagtcattatcttcatctttgcttcggaacagacattctacttcaacaacttcaaatatttcggtttgaacgagttggacaacaacatcaactctcctccaagtgaagcatctacaacagctataacattaatttgatggattattgtcactgacatcatcaccagcacctctgcttcatcgaccctgacatctccgctgttgctaatggatgattatgttttcgccgacttattatttcaccttcacggttgacctactatgcaaatgctgatgagcgtctttgtcattatcattggttgctacactgctattggctggatcaccgacatcgtcttcttcatcatgtcggttgcgtttgtcgtcgtcaactattttcttcatcttcatgattggtggattttgtcatcacctttgatctacctcgtctgtcaccgactgattattttgctgccatggctacacaattttatcgctgggttccttcatctttattgttagttgatctgtctgccgccgactggtttcttcgcctccatggctatgcgacttcattactttagattggtatcactatcttcactaccaccagtattgttgccacctctggtgggcaatattatctctatattggtcgtcttgtctatatgccaactgcgtcagctaccatcaatggacgattgtgactacgacagaaggacaagctatatgctcaggggctcatcaactcaagcgtgaggattatatctccaatttggacttattccggatacattccacatggattcatagtcatgagtctattttctatgctcaaagactggaccaattattattccccgtaagggctatcaaccgaatacttgcgccagtcgggattcaattgttacacctattttggagtatcccataagggataatcattcagatcagaagctattcatatgagctacacctggtctatattacccggaagatttattactcggaagcatgttacatgcgtcatcctttaaagggtgtcgaaggcatattttttggcctaggcctaatatgtctgcagcccatattttcaggtgtgacctgtcacgttcttttagggacttaggcactttttgcttaggccaaagtgcgcgtgatcaagtgcccaataccttaaaatccttttataccgcagttacttaactttttaggagttggtacaatgcatcttaaaaggtgtcaaacagtaaagctttatatagctgtcccgctgacttttttatatataagtcaaggtgctgtttgggtttttaagcaattgattggatacaatatcattgcttttcgccacgtaagtgtgcatttttattgaccaatattatggcttaggctgattatatattgtggtcattttctaggcggttggtaaatcctttatgagtttattcactcggattttacaccacatatgccatatatttccaggtgtggtgaaaccatgtgtcttttagggactaaagcacgtctgttaaagcagtgtgcgcatggcgtatgcccaatactttagaaatttatttattcacaacatacaagcttctttatagctgttttgctatgtgaatttttaatgatgtaaccaactttaggttacactcatcatattttacaaagcggtcggtatatcactcggatcatgttattcagggattcacaccgcatatgctacgtattaatatcaggtcgcttggttgactataattattaaaaccactcggttggttggattatttattccttgactatatgcttggtttgttcaattaaccacatagtcgggggctacacctattaggtgcatctagtcgatgcacctgactttatttttcagccctccacagtcttcatatttggtaaaagtacttcggagaccatggcgaagataattgaagcactcagctttggagtaatctagttcgagagaagattatcttttcgactgtgaaggtctcaggggctactgtggagattatgggtaccccatacccacatggcatagttatccgactggctataggggataacttatatctatggaatatgtaacagatcatgacttgggtattacgtttccttgtatgttacggaacggcctaaagtcctggtttgataatattgtaaagtagatttaggaaaccgataccgtattggttaaggtttctatcttgtaatcctgccccccaccctatataaggtgggcaggaggccctctagggggcatgagacaacctgatcatcagatctatactacacccggcggattcaaatccccaaacaggagtagggtattacctctcattgagagggcctgaacctgtctaaatccttggtctctgcatccatccacttttaggtctcgtgcgctacccccttttattattgccgaaatcatgtttcgacatggagaaaccctttgtagtcccggttcgtaacccccctttagtcccggtttccaaaccgggagtaccaatccgggactaaagatcgagctgacctttttttttttttttgcatggctgtcgcgaccgggaaaattgccttttcccgaacgctagtgtattaatccccgtcccaggaaaagccggggtacaccacacaaacatgatataaaagacacatctttattatatcgataatatttacattattacaaaggcacttcaggcctgacaataaaaaataaacagcagcggactagcgggcctacggctccatcttcacaggcgctcaactggggtataagccaggactccacctaagacttcttctccaaagcttctcttactgaaggggggaaagattgagcaagaatgagtacaaccacagtactcagcaagccacaccggagatgcgtaattaat

SEQ ID NO: 15722 - DNA, 10915 bp, Oryza sativa
cggaagatccggccgccattgatgcgccggcgaagtttgcgggagcggtttccaaccgaatccgagggagagagggagggaaaattggggggaaagggagagggaatcacggggaataattccccccactttattgcgcgcggggacggcgggaggcggcgggattcgcggcggcagcggcgctagggcgcgggcggggcggcgggagcggcgggaggatagggatgacaggtgggccccacccgtcagcgagagtggcgggcgggcccgcccgtcagcggcgcgcgcgcggggagaggccgagtgggccgcggggagaggagggagaggggagggagatgggccgggctggccagagagagagagggaaggaaaaagagagggagggagagaggactttggccgcgggccgagagagagagagagggaggtctttgagccagacttggcccaaagggaggagggggattatttttagcttttcctttttataaaatcattttaactttgtttatttcttaacaattattatttgtgctctgaaaattccactaaaatttgagggctccttttagaccaaggagaatttaacaaaaattctccgggccacatttgaattcttcttgtacgtattttaatgtttgccaatttcttttcgaattttaattaatactattattccttttagggaatgatttttaattcgggatgaatttatcaggacgtgacaaatccaccccccttacaagaatctcgtccccgagattcgaggaggctagcaagaagataggttgggcggtcttctcttcttgtctgacttcttccgtcgcgtcttttataacaaacttgcctaacaaaacttctccactctaggctgcttggctcgatcccttgttgcagagggaatcttctcttcacctgacttgtccctggttgaacctttagctgacttcgactgggttgcggcacttgaagatggggcttcagttccagaacttcgcatagttcaaatctttggagtcaacctcatacaagttacccacttcatgtcatgcgtcgagatcagctcgtcattactaggataccatgcttgtcatcgggagaataccatgcttggcgtttccttccagcttaccaccatatgctttagactatgatatcccgcttactaagaataacatgattgacaacttgccactaattgtctcatattagctttcctggtctccggtgctagatatttcctctattcaatgtgagggtcgataactttgcctttgaattatgtttcccaagggaaccaaattatcctacttgacatgctttgacgtcttcccaaatgactttactgctggacttgttatggtctgatcgttatcctgccaaatctgaagcttcgttgttagatgcgattttaatctgacctctatagactatcttcgaacatatcacttggttcataactgggaatagctcccatgaacagacaactcggattcactttctttacattcagtttactttccactattctcttcatgttgtcatcatttagcattcaacgtattcctttgcaccttcagccttgatgtgttctttctcgatggatcgattgctaggaaagtgcgttgaacgatactagtgcaagtgcttttattctagtagcatctgatacaaagcccaaggttgaaccgagctttagattccactgttcaggttttacttcttgacttcttggtcatgtcacaaaagtttccatccttgtccccatagaagtacttctacctgtggtcatctctcttactcgtgaattcacctactttaatgacaaggcaactgttgtagggttgtttgctatcgggagtcttcctcgagtgacacaaatcatggttctcgttatcctttatcaatcacctttcgacctacttcttttcccagtaaccaaacatcttttccgatctcttccattaatcacctttcgacctttctcaaccaggtactcttcgctccgggtgttgaggatgcttctggggcaatgaggtccttgggcgtgctgtctttcagagaaaccttgaagtagttcgtcaaaagctagactgacaattgttgcctttgatccgaagaagacacatctgaaactcttagtccaaacaaatgtctctttggttgatcacttgattttcttcgctatcaatcgctaggttatttgattcctaacagattatgggtttacggaaatgagaccctaggtctccctaatcaacaacaaaatgtacacaactcacagcacttgcaatcttaacatggatccttcataagcttatcaaactcattcattatctcatgtttctctgttattacatgattgacggggaacaactataaaacaaaagtatttgaacactgatataagagtattatggttgcttctgactagcgctaggcttatcaggtactgcatttgctccagtgaccacttggcgattggcatgtctgcttccttaacaggtactacagtttgtaacaggcaataactttcttacgctcgggttcttcatcttgtacttgatttctttggctgctgtgctggaacatccaaaggtacaatgccgatactggcctctgtcttgtcaactgatggctggggctgaaattgagcattgacaccttgtggtaatgcactcgctggagttggagctgttgcaacgcgggctataggactgcttcgggatgcatggatgacaattcgctgaggagcaagcttctgattgcagggagttgcgtggactgacgtgctggcagctatgtttctcggttttgggcacttgtcggcgaaatgacccattccttgacaattgaagcaacagatatcttcccggactcggcattttcttttctcattttggttcctctgtcctggcactggagttaggctgaaactgtaatcttggcgaggatttgtgttgccttgatgcttctctccgttggaactggcgggttggttggccatcttcttcgtcagcagaaaactggattgacaatcttttggtacatgatcagttccttcacaaaagaaacaagtgatcctgctcgttggacacctgtcgggtggatggtcttcctcacaatgaaggcagagtgtgagacacatgctagcaacgtgtccaatttctccacaacgggtgcatgcctttgattccatctcttcctcgccgagatgtcggggagactcatcttcatcatccgaggagacttgatcagatactctgccaccatggcttaggaggtgctgggtcaaccgtcgtgcacctcggaaggtatttcctctttgacgtctaggaatagttatccctgctggaggccattcggcgctggtaatagtcatcttacgtacttcttctttagttcgcatcggcgcttttctcttctgactcttactcttcttgcctttggcttgcttagtacgtgaccccacgtggtacgaaaggctaggaggaaagcaattctcgggattcaatggattctctccattgggctctctaccttgcacactaggctgcaagcttgacttggtgcgaggaggcgggtttagcgatgtctgccctgctaaaccaaaggaaggggcttctttggcatatacccatggacaattcagggcatagtgtccttgctctctacaatcatgacaaaaggggacatgctcttctggcattggaagctcattgacctgggtggcaaatgcttgatcaaacacatactgattttggtcttgacttccaaccaatggtagctgtgaaccaagcagcatgctcggaatggaccaagggtgtgcccttgttaactctcttgaggccagtggtggattgagttgaaaacttgagttactggaggcataccctctgacattcttttctttttctctgttaaacatctgttacagggattgaggtgagagaggaaacaagctaggaaagaatagaccagaactagagacaggaccttaaaggaactaactcttcttgttgatgtgttgtttgtttcacttattctgcaagttgattaagcaaacaacctagcatggttacatcacaccccactgatgaaaaccacgcgctacacacacaagcaaggaaacacacgactaacgactctaccctagagggtggcttaggttctgcgacgggttctccaagatcttcactcctgctttacagctggcttcactgcttccttcgcttcgctagcggatcctgcagtcttccggagcttcggcaaacaattggcgacatcttcttcttcgcaaaactaaccatctagtactagtggaaatccgaagaaggaagaagggagtaaaccttttgcaaatagcattaggggaaggagaaaaaaggaactttcgcaaatagttttatttataaaatatgtccttaggttttatccactgggcttatcctacagtcgagatggctctgataccagcttgtcgcgaccgggaaaattgccttttcccgaacgctagtgtattaatccccgtcccaggaaaagccagggtacaccacacaaacatgatataaaagacacatctttattatatcgataatatttacattattacaaaggcacttcaggcctgacaatcaaaaataaacagcagcggactagcgggcctacggctccatcttcacaggcgctcaactggggtataagccaggactccacctaagacttcttctccaaagcttctcttactgaaggggggaaagattgagcaagaatgagtacaaccacagtactcagcaagccacaccggagatgcgtaattaatgcaagggagtacaaggggataataatattggggttaagttttgcagtaaacagcatttaaaagtcacttagttgcccaaagccattttataaagacgatcctagagctacacaatattattaatcaaggccgtgaaccctcacgaacctgccttaacccaaggcctacgatgattcagaccgaactggcaacccgaccctgggtcccagctcgtcccaagccaacccaggccaaccattccacattttagttgttaagcaaattttaagaattaaaacactgacttgggtacattgctcggcttgcccataaccgagggcgcggctattcgaatagattatactctgatcagaggtgtacatctttacccacaagacacatcttcctcacgtgtaaccacgtgccacataccaccacggtatacggacggaagacgtgacatagtttccaacccatcctagccatagacaagagtaccgacccaaccccacctacggccggaacctccgggacaggcaggcaggattgagccccctagcagcaggacaccggccttgtgccatgacatctcgactaccgggccgcagctcgtgtagccttcatttgtcctagagatgtccatcgacccccgacttcgtccatctccatccgtgtacttttgtttataaccaaactgagccacaaactaagccttacccactagacatgtggaagtacggtagtgctttgcaacagaggcccgagcttaatccttatagtacccgaggtacgactaacaaaacccaaccacgcacctcgagcccagcctaaaaccattttgggggttttgaatagagggggaggtgtgtgtccaattccaacataagccaaccattccatagtgtccaaatgatatgagaattcccaaagtctaaagttataaaaccacctaatgttgcctaattaatcagcgaagcatctacctaaattcatactagtggaaccatgaatagagtacccactagttggggttttatttatcctagggtgaacaaggtaataataacaataacaacaataataaggtcataacaaaggtaaataggcatggctaaataaaacagtgataacgcgggaatttaaataaagcgataatgcaataatttaaatcaaaataattttataaactgggattcaatatgttcaaggatgatgtgacttgccttgctcgctttcccaaacgtcggcttcaacttccacgaagagcggatcttccgaagctgcagcgtctacacgaccgacggaaaagaaaaggcttttactctaataaactccatataacacgcagaaacaaagcacaaaaatgggttcttgacgggggaaagggagagggaatcacggggaataattccccccactttattgcgcgtggggacggcgggaggcggccggattcgcggcggcaacggcgctagggcgcgggcggggcggcgggagcggcgggaggatagggatgacaggtgggccccacccgtcagcgagggtggcgggcgggcccgcccgtcagcggcgcgtgcgcggggagaggccgagtgggccgcggggagaggagggagaggggagggagatgggccgggctggccagagagagagagggaaggaaaaagagagggagggagagaggactttggccgcgggccgagagagagagggaggtcgggattatttttagcttttcctttttataaaatcattttaactttgtttatttcttaacaattattatttgtgctctgaaaattccactaaaatttgagggctccttttagaccaaggagaatttaacaaaaattctccgggccacatttcaattcttcttgtacgtattttaatgtttgccaatttcttttcgaattttaattaattctattattccttttagggaatgatttttaattcgggatgaatttatcaggacgtgacaaatggatgtaacaccctagcccaagacataataggattgataggatactcatgctaacaagttgtaacttcttttccggaagcccatctccaaagaactctaaagttaagcgtgcttggcttagagaaatctagggatgggtgaccgaccgggaagtcttcccgggcttcccgggtgcgcacgagtgaggacaaagtgcgcaggcactggacatgggtgtgtcgcagttgcgcaggcatggtgtgcatggctgatgtggacccggtatggtcacacagcatggcacttgcgctggcactggacacacggacgtggccaagagagggagttcctggattggggttgatcgacgaggacgtcgatctcttaagggggtgaggatgtaacaccctagcccaagacataataggattgataggatactcatgctaacaagttgtaacttcttttccggaagcccatctcgggtgcgcacgagtgagcacaaagtgcgcagaaaagactggtgttggtttgtgagggcagtctatgtcctatttaagctgctagatgtaagcgggcccggcctcgtggaggcgggacgttacaatggccctgttgctgcatggtttatatatatataaaccatgcatatatatgtttcaatacatatatatgcatacatatatatatgtatatatatatatatatatacatatattatattatattatattatatgtatatacatgcataatatatatgtatttatacatatatatgttatgcaaatgcatatgtatatagatatatatatgaccaaaatatatttacattatagaaaatgtgtacacatgcatatagaaacatatgtagtcatgtattaattacaatccattatatgtcctagctagctacgatttcgacgtagtagtactcgctgctagctcagaagctaaggatcggtgaattgtgtttccgtcgtagtagaattcacccttgggatcaaggatttcttcgttgatgaatcccatgagttgttcttgaaccgccgtgataaattccttgtgtgtggtcaggttatccctcatgcgaataaactatatgaatgtatgaaattgattagtaattaaacaagaaatcgctacgtaatgaaattttgaatttatttgtacgtacatcgagctctcttgtggtgatgatttggtttgcaaggcagtggcaatactcgcacacgtaatagccgcacaagttagttccctgcttttgctttgcgcactacaaataaatgacaaacaacgagagatctaattaatatacacttgtatgtatttgaatcggagaaatataaatgtagagcatgtgtactcacaggaaatttgaacttccgcctaagtctttctctccatttgccgcggaccaaatgacggaaccgataccaagccctacatggagtttaaagctatgattcgtagtagcaattaacataacaagattttcttaattaacaaaggaacttatgacggtacctgtctataagttcgaaaaccttgtcaaacgtagactcttttttatccattgagtcatatacgttgacggtgcaggcctccaggtcgaagagtaaaagcacccagtggaatctgcaatgtgcgtgggatgcattacatatgaaacacttagcaagttcgtacgggaatgaaatttggtatgtaggaagacagtaaaattaaactaactctgtgttgtatggcaacagtatgaacgtcttgtaatgctgcgccttcaggagatggacgagattgtcctctgtttcttgtggatattggtcgagcattgcgacgtttactttccgagggtcgatgaatccagtatcgaaaaccctccgccgtcgggccctttgaatctccattctacaacgataaaagggagtatattattttctatagtctacttatatacaaggacctaattaattaaaggagacgtatagtaagaaatctaactgaacgatatacttacaaaatccagcaactcataatagagacgtcgagggcgtccagctggtatagttcgtagattcccctgaaattgatccagagaatgtcatctccttgcaagaagtccgtgtccctgatcctcgctccgatcatctctctaccggtggcgctcatctccatgtacagctgatggaacttgtacatttgtgtgggtagggactgcagcagctcaggcttgacaagcggtttaccgagttcgtacatgtatttcacttccgccttttcgattggtgcgactcctagcaattgatccgtagttagaccggtgtcagtaataaattgttctatcgtcatttctttaccggtcaccaacggctcgatctcctggtttggttgctctccaagctgagggattggtttggactttccagaagatgctttcttcagcgttcgctcatagtccgatagcttgatggcctccttgacaggtgcagacatacccctgaagaagttcctgacactggggtctataggaatcttcttttctggacttcgagacttgaattgtctcttgacttctgatgcaacgtaagcgtcaagctcctcttgcgtgcaatcgtaccccgggtccttgttcttggcggcgtcaactttcgccttcttcgttgcccttgtgtgggcaggcggtggagctggggggccgttgactttgaaggtgccggaagaggagcttgcgggggagtaggtgtaggagcacgaggaggagtcggtgcaggatcctgaggaggagtcgatgctggagcctgaggtggagacggtgctggcggagcatgaggaggagacggtgcaggatcctgaggaggagatggcggagccggaggagatggtgcacgagacgccgcttgtcgcccagggaggatgatgtaccgcctgcgccatagaataatggcatggcttgtgtctcgtagatgcgtctcaccgtctcctccagggtaatccagctcgaggtcctcgtacgcgccttcgaccaactcaacttcgaccttcgagtatcctgctggaatcggcctgcagtggtaagtacctgaagggtccgttgggatggccatgcccgacgccaccttcatgttgtgagagattatttattagtaatcaacatatataagcagcaactagcggaatggctaaatcttacctttattgataagttcttgaaaggaatatgcagctcacatggtgtccgctgagtgatgtcatcaacgggacaggtcgattcgtcctgtgtttgcatggcgtccatgctctgtgatcctacctgccccgttgaggcgcaactgctacggtttcctgacgggctcaccattgcaggaggaatggtcggctggggatcatgggaccgatgtgcggccatgcgttcatcaaccttccttgccacctcctcttgcatgttgagttcgtagctcgatacccggaactctaggtctgcaatcttcgcctcggtatctctcttgctcctcatccgactcctgtacgtgtggatgtcctccttgaaaccaatcttccaaggaatcacccctttccctcgagttcgtcctggatgctctggagtctgcagggcgagtgtcagctcgtccctatctctgtctggtcggaacgtgccctgagaggaggcttccactgcatctgttagtcgtcgcgcagcctcttgtatctgatagccgaagaccagtgagccatcagctgggttgagcgttccaccgtgagcatagtaccagaacttcgatcgttccggccaattggctgttgccggttcgatacccctctcaatcaagctagcctccatctgctcccacttcggcatcgcgacgctatagcctcctgaccccaagtggtgatgttacttcttcttggcggcattttctttgtttctttccatcatcgcctgcccttgttcacctgtcttatatgcaacgaactcgtcccagtgatcccttagctttgggaatgtgtcgaagttcggtgtctgccccttcagtatatacttctggtacagatctcccttgaagctctgaaactgttctgccattttcttcagagtccaccttttcactttgtcctctgtacccgcaggaagggtgaatgtctcgagca

SEQ ID NO: 15723 - DNA, 896 bp, Oryza sativa
cgaatctgggacaaagctctcatgatctccgcgtgcccttgttcttcgccagtacaccgtactgacaggcacgttatcccgcacaacccaaccgctgtgacgtacatagttcttggcggcttcggccggggcactaggacgtccatcttcttccacttccgttatgatgtgccgaccctcaagcttcttcgctgcacctcgttgcccgcgtgccctcttctgtccaacagagggttgactaccactagcctcctcctcctggttcctctccacatccctttccacgtgcccctgctggttcccctccgcatccctctccacgttcccttcctcgttcaagtactggtttggatcctcgttcccctcttcttcattccagtactggctgcttccctccgcgattgtatcgtacaatatctgttcctcatcgcggtcagccatctgttgatacaagaaacatctgctaagtcacgagacatttatgttttaacaatctaagtcatgtatgctaagtgtaaatgtcgtacattagaaccctacacaaccttacgtgctaagtctaattacaaatcgtgatataagctaagtctaggtgacgtatattatacaaccctagctagtaaataattatatactaaatctaattacaaataaaataatcttataataaaactcaaataatattacatgctaagactaaaatagtcatgtatatgctaagtgtttcgtgcgtatatgctaagtcacgagacatttatgttttaacaatctaagtcatgtatgctaagtgtaaatgtcgtacattagaaccctacacaaccttacgtgctaagtctaattacaaatcgtgatataagctaagtctaggtgacgtatattatacaaccctagctagt

SEQ ID NO: 15724 - DNA, 1064 bp, Oryza sativa
aacaaaacataacatcaaacgaatcgaccgattgttaggtaatcgtcacctccacaaagagcgactcgctgtataccgttggcatgctagctttatctgttcgggcaatacgatgcccattgtacttgttgactggtctgatatccgtgagcaaaaacggcttatggtattgcgagcttcagtcgcactacacggtcgttctgttactctttatgagaaagcgttcccgctttcagagcaatgttcaaagaaagctcatgaccaatttctagccgaccttgcgagcattctaccgagtaacaccacaccgctcattgtcagtgatgctggctttaaagtgccatggtataaatccgttgagaagctgggttggtactggttaagtcgagtaagaggaaaagtacaatatgcagacctaggagcggaaaactggaaacctatcagcaacttacatgatatgtcatctagtcactcaaagactttaggctataagaggctgactaaaagcaatccaatctcatgccaaattctattgtataaatctcgctctaaaggccgaaaaaatcagcgctcgacacggactcattgtcaccacccgtcacctaaaatctactcagcgtcggcaaaggagccatggattctagcaactaacttacctgttgaaattcgaacacccaaacaacttgttaatatctattcgaagcgaatgcagattgaagaaaccttccgagacttgaaaagtcctgcctacggactaggcctacgccatagccgaacgagcagctcagagcgttttgatatcatgctgctaatcgccctgatgcttcaactaacatgttggcttgcgggcgttcatgctcagaaacaaggttgggacaagcacttccaggctaacacagtcagaaatcgaaacgtactctcaacagttcgcttaggcatggaagttttgcggcattctggctacacaataacaagggaagactcactcgtggctgcaaccctgcttactcaaaatctattcacacatggttacgttttggggaaattatgaggggatctctcag

SEQ ID NO: 15725 - DNA, 1506 bp, Oryza sativa
tggtttatatgggctcgggaggggcggacgaggccgggaggcggccggatttctcgccgacgtgggggatggagagagagagagagagattcgaattcgaatccctccgttgcggggtgcacgcgcgagtgggaggagtggggatggtgggtggcgacgtgggcgcggggcgcggagtggggcgcggaaggcgggggaggcgggcggcgtgggcggctcggcggttgccggcttggggagcggcggcgggaggttgaagaaggggccgacaggtgggccccacctgttggtgacccggaggggttagggaggagggaggaaccggcttgggccggcccagccgaggaaaggccggcgcggaaggtgaatggactgggccgacggcccaagaagagaggaaaaaggaggaaaaagaaaaagaaaaagaagaaaggatttttccagagatttaatattgccctttgctcattttaattggttaaaattatttccaaggctctgaaaattccactaaaaatcctgttagcgtattttgacacgtagaatccaagaaaaattccacatgtcgattccgattattatttgcatttattaattagggattcatctctaggttaaattaaacaatttcttcggacgatttattttatgaatttagagcaagggaggggaacttcagggcgtgacagggggcaggccggtgggcgtggcgaagatgtcagcgaactcaaagagtcagagaggaggtcgtccagcaggtcttgagtggtggcggcatgcgccaccagcggcgcaccggtgggcagactgcgccacaacaccatgtggtccttgtgccagaaagacatggtgagttggccaaaatcccacaatatttggcccagggtagacagccactgcatgctgaggacgaggtcgtagctgcccagtggaaggacgtataggtcggtgacgaacacctcggagtcgatggagatgcgggcgtcctggaacatacccggtgaaggcacctagtcaccgttggcgacggtcacatgcaggcccgcgcgttggatgagcggcaagcgcacgcgtgcggcggactcctgtgacaggaaattgtgcgtagaccccatgtccaccagcgcgtggagggtggcgtcgccgagacgaatggagaggtgcatggcgttggacggacgaacacatgtgacagcatgcaggaagatgcgaagcgtctctggatcggcggccggtgtagtgtccccctcgtcctcctcatcatcatcataagccaaatcaagaaggaagaggcatttgcaaaccttgttgtggccgcgtgagtaggtctcgtcgcagttgatgcataagaccttgcgtcggcgttcatcaatctccgacggggtcagacgacggaccgtgcagccagccacctgagtcgacaattggcccaccgaagatgcagtatccgggagcgaaaggatgggcgccaccgaagaagacgctggctcccaggcggcgcgacat

SEQ ID NO: 15726 - DNA, 2918 bp, Oryza sativa
atggcgaactctatggtggtgagggtactgcagcagcacgtcgatgctgaggggttcttggagtcccgtggtgaagaggtccaactgctgatcctccatgagaggtccatcgcgagagagcaagtcgaggaagcggtcgatgtaagcggccaccgtcgtcgtgcgccggtaggcgtcgagctcgcccaagggcgcctggcgcaggggcggcccaaagtgtagattgagcatgtcagagaaacgacaccatgtcggggtgcccaagtcgcgttcgacgcgcatgtaccactatcgtgccccgtcgagcaggtgatacgacccgagccagaccttctcctcctccggtgtatgctgtccttggaagaattactcgcaacggtcgaggaaatgaagcgtttgccttggccgtcgaacttgggaaagtcgatctcgtggtagcgcggcggccggtctccgtggcgactgtcacgtcgtggtcatcatcggcgtcgcgacgcggggagcgatcgcggcctacgcattccagccgctggatggcgatgtggtgcgcttgctgctggttatccaggtcagagagcttgccctggatggaatcaaggacctcagcaaggccctttttccaatcttcgccaatgttggtgacggtggacatggcgcggcggcggcgaggtcgagcaggatcgtggaagtctgataccaagatgttaggagggcgaggttgcagtgttgcacacctcgccgccccggagccgtggtggaacgaacaggaattgtgataactttcttgcttgattcattaatctgatcaaatggcatatatagccttacaatgaaactaatctgctacttaaaaggaactaacaaaccggcaacaaacttaatccactaacaaacttgatctaatcactaatcttaacaaacttaatccactagctcatggtgcatgcgccggggccttcctcccgttcccggcgtcgatatgaaattccccacataagagcacggctaataatacagccgacctgctggctataagattctttgtagccttctttcagcctgcccatataatagttagctctttacaattaatacagggcccacttatctctcacacagggtttcttggctcctgtgtctaagccggctataagtttacagtctgcttctcttctctctcctctcttctctcctccacctcagcatttagccggcttatagcctactattatacttgctgtaacacagcctgaagtgaaacaaacagtgatattataagtaatgataaagagcgttaacttgcatagtagtgtgtccttttataagtgaacaaagtgacgaagcctcaaatgacatatttgtttgtacaaatgaaataaagcagcaataaataatcaattgtctgaatctaacacagttcttgcaacaatccctgcaggctagaacaaagagctttcaatacagatgattcaatcaatatgtggattcatttaccatttaaaaaatttccattgggcttataccatagtaacttcaatgcaagcagtacgcctaaatcctaatgtagtgataatattattactggattagtcaactaatgtttggtagccaacccagctcccctgtaaaacagcaaaaagaggaaagaaaataagaagatatcgatgtacaagaccagaaatgcagaacggtggaattgaaaccacaacacaaatatcatttcaaagctaaaacgtgtactaacttctacttgttcatctaaggggtgaacatggaaaaacaagcaggaaaaaaacaaactagctttcattaatgaaaaatccaggcagggatgttccccattcccagtgttgatcatcaaaaaaacaagcaattttagcaatagtatatccaaggttatggaaaaaaagcgttggtatttactctttcgatccggcgcataaggcaaaatacagggattgatgaaaaaataaattcattgctgaaagtgatggaccaaatataaggtgagttgcttgatgcttcatggtgtcactttatctagcttttgtcccccatttagcatttttattgttttagctctgagatagacaaacaaatccagctttagaacccgtcattgggcaagcaattataaagaaaaatagttataagaaattttaattaccttacaaagtagaaatacttgtatactattaaggttctatctagtgatgactgcgcatgtcacagaaggcgagtcccacgaactttgaccaccaatgtaccccgaccaaggtggtaagaacccacagattttgacaacctatctaccccaaccaagaatcttaacatagatacatgtattgcagcaagacatcagtacatgttaaaccagcagtacgacaaattaccatgaaacacgggtggagaagtgctttttactctcggttcatgacccccctgtagtcccggtttttcaaccgggactacgaatccgggactaaagatcgctatctttagtcccggttcaaataaccgggattaaagatggatctttagtcccggttggtgttaccaaccgggaaccgggagtaaagagagaatagcggcagttccagacggtccatttttcttttttttttaattttcttccaaatcaagtgggaagcatatcctcaaatcaaagtaacatcccaaatccacatcacaaataaagtaacatcacaaatcttaaagttacatatacacacaaatcaaatacatcacaaatcctaaaaaattacacacaaatcaaatacatcacaggtcaaatacatcacaaatcctaaaaaattacacacaaatcaaatacatcacaggtcatctcagatccatccaataaatcacaaaattatacatgtgaatcacaaattaaaaaaaaaagagaaaataacgct

SEQ ID NO: 15727 - DNA, 3857 bp, Oryza sativa
ggggatcagatgaggaaggggagccggtgcaggggatggatcgggatgaggatggaccgatggaggaagggagtaggaagggagagattcgatctatggaggagaggataagggatagggattatatactacgcttcgaattttaattccggttggtgttcccaacctggactaaagatcggtttgatctttagtcccggttggtgttcccaaccggaactaaagtggtgatctttagtcctggttggtgttaccaaccgggactaaagatcctcggcccccataacatcaatttgacagaggatgaaccgggactaaagatgatttttagtcctggttggtatagaatgtctctgaggttttcaaccgggactaaaaatcatctttagtcccggttctttttagaaccggaattattgtggttttgggtcgacccagcaaagatcatttctccaccagtgaaatctaaaatctccagtttgttcttatcagtttgtgattggtttgagcgaacaaataaagtatctaattgaactagctagatatatgaattaatttaagcaatgtagtgaagtcccagaaaaaaactgtgtcaagaggggcttactcataaggatattgcgcctgccaggcatgggaaagaaagtccccggacagtatcgcatatgctgtaaacctgtttccattggttggagatcacaagggtacgagtagactcgaggtaatcttgtgacaggggtccctctgttgtgtatgctctaatggtgagaagctccttggtgtgctcaggtaaagatgagaattggagagggtcatcgttggaccatgtaaatgaacagaagccaggtctgtcagggaggtgatcgaggaaaataaatctgccagtgctaacaatctcctcctcatcctcaaagttggtcaccattcggatctcaacaattgacaaggacaggcaccctgtaggtgtgatgcttgggcttgcaacggcggaggctggacaggcaccctgtaggtgtgatgcttgggcttgcaacggcggaggctggactgcagagacgactttgatcctgtaagcagtgattgcattggtagtgttcgataagccaagatagagcgttcctgttccctgaagagggacggcacgtccatgaaacggcaggtcattgtcgtcgagtttgcgccattcctccgtctcgacgtcgaacatgtgggtgcccgtctgcccggttatggacagcagaatgtaggaggcaactgctacatgggacttgacggtgaccaccggcgggaagatgtagtcagttggggtgaggtcccaggggaagaatggcgggcgaggcagtggtctccactcgcagcccaccagacggtccgaggcatcgtcgtccacccgagccacggagagatcgagcacctcgaaccaggggacgaaattgacgtcccccgtcacggctggcctgcgcgccagggcgtagatcttgtcgccgaatggtagcaagatcgggcagagcttggtcgacaaaagcttgggtcccgagatctccttgcgcatcacggtgtcgaagacgatggtctcatcagggccgtaattccgggctgagctgccgccgacgccaacgatccacggcgcgtgcctcctcgaccgcacggaaacgaaagacatgtagtgcttgccggtcaggtgagcgaggtagggcaggaggggtagcggggtgtcgccgccgtcgtcagcgttagctggaaggtgtgggttcaccttgaacaaggagtaggaagggcgagtgactccatggccgaccaccaggtacaccgacgacggagactccgtatctctgatacgagcatcttcttcatcttctttggccagtttctgcttcttgctccggcggagcatctccacccgccgccgctggttcgcaagttggggttgaggatcgatctctctgtctctctctcgtgaatagtttttttttttttatcttctctcgtgaatagttagggttggggattgatacgcatggagtgaccagtgtgcttatagatggccaaaaggcccgtccggcacggcccggcccaggcacggctgggatcggcacttcatgccgggccgtgccggcccatgggctgcacctcccgcccaagcatggcccaccagctgtcgggccatgccgtgccggcccgaaggcatgggtggcccatgggcctttttttcaataagtctagctttcgtccctcctcttagggctattacatatgtatagctaaaataagtctatttttcgtccctcctctttgggctgacatatgtatagctaaaataagtctatttttcgtccctcctctttgggctgacatatatagataaaaaaagtctattttgcatccctattctttcatccattgctataatatgtcatttttattcccctagtttcttgtgtatcgggcctggctgccggcccatcgtgccgggccggcccatcgtgctggtggaggggcccaggcacgaccccgacctccgtcaggccgtgccgtgcttgggccgggccaaaatgccgtgccatgggcctggccgtcgggcctcgggccttttggccatctataagtgtgctatgtccaccgtaggtttgcatcaggattcggacgtcctagctaagatgggggttagtattttcatacgtgggctatgtattctcattttatgtagggaaaaagtcctatctaactctccaccatcggtgctagttgagaacccctttggtgtcgattttcccaatcagtaccacggaggcagcatgatgacttcggtcatcggtgccagctttcgaaccagcatctatatggataaagatgtcggttttttatattttaaaactggcacctttaaggtttcacgaataaaaaaagctggaataaaaaaagctggctcgatgcatcagcttgattcgagccgagcagctccctttcacccccaaacaatctcaagattcacatgaacaagaattcttttgcatgaacaagaacaagaacacatgagaaacaacctgaccaacactacaagaaatatgaccttttgtgatgaattcctcgtgacatcggaactattcatcattagcacattccattttatgacgattagtatgagataggatggcttagtgacgaaaaaaaaggtgttcgtcgttaataccaactagaaattgtcataaagtattttaatggaacattgtgacgaatattaatttgttataaggggcaaaaatcaaacgtcacatatttatataatacatttctagaaaaactatattaaaagttaaagcaatttactcaagtgaattaacgaggaaactaaaattttcctttaaaaatcatggtcggaaatatttttgtaatattctatgtggtctaaattattctctaaaattttccgtgaattttcagagctcaataactagttttaataccacaaagttcatttaacctattgaaataaatagaaaacaaattaaaatccctctctttgtgcttgggcatttttcggcccaagtgttactctctccctccctcagcccacagcctctttctctctctcctcgggccggcttccccttcccctcctccctcttcgggtcgtctgcccagcccttttactcctccctcgccgagaagtacattttgcctccctcctctcaattcaaataatttttcgggtagtaaatgatttcaaatgaaaaaattgtcaacaacaaagttgtataactcatcaagatctacaacttttgttttggtcatttttgctatatgactttgtttcaataatttgaatttgaatttcaaattatgacaacttcaaacaa

SEQ ID NO: 15728 - DNA, 19266 bp, Oryza sativa
  unsure (1)..(19266): unsure at all n locations
attattaaaacaaagtcatatagcaaaataaccaaaacaaaagagggcgccaccacctccaccgcggcacctcgcgccggtccgacgcctcccctcccgggtgaatctgccgcggctgcctccaccgatgttgggtgttgacggtcgttatcgatcagtttcgaccgtcaatattaccaaaatagaggagaactagtgatgcttgccatgcatatatatgttagaataataatattccactagtattaggtttactaaccttggcagagaatgaccataaagtggacgaaaatcgacatcaacacagaaaataaatcaatcggacgatgtcgagaatcaaacttatgcatgaatgggccaataactcagaattgacacgacaaactgggacaaaattcacaagtctgcagagaagaacaactgaggaggccacctgccgaatttgggccaggttgggcaggcccctggttcggccgaaccccctggcgccgttggatgcagggttgcggctggacagtgtggattagctcccaatgacggttggagggtatttccgaccattccaaccatcacaatcgtcattgggaggctatataaacctgtcaccttctcacttcactcacacacttcaagcaaagctctctcatattctctcaagtttagtttagtagtatcaagctagtggaataggaatagattagaaatcaagagtccggaagtctttggaagagttcgggtatggctctagtagctttcctttcctcttttgaaagctttgtacttttattagaatactcttctatatacatttatggtattgaaatactttccgagtatataaatgcctactttacattatgttcatgttatactgaatatgctgctagcttatctgggagatgctttggtgcgggtataatgtttgcttatgcaattactctatgtcatgacgatgatattagagtagtatctagtagtttagacgtggtgtctagattacgggatatcattatttggggttatatgctgcggatgagaggtgtgccgctgatgatgatagctcagtacgggtattcctccgcgcgtgtatataatcctaagttaattccctggggagggtactcctccgtatttagcctcggtggcttctcgaagtactaggagggcatcggatagagggtattagctagtatatcggataactagaatgtatgtatactatgtatactagaagtataggagtagattatctttctcttttctttccacttagcttagataatatattatgagaatgagtagctactgcttgtgtgtcactctacccttggattatcttaacctctgcttagaatatgattatcacaagtaacatataaattattagtcaagttctctctacatgatcttcccacgggataaaataaatacgatacccttggaatactctcgggtgaaatgctacaatggtatatccgtgcgtttgtggatgaactctgtaaccataatataccaggagtatttctgcgtcattgctgggaattatatttctggtaatgtcattaagaaataccaacactgggtgcgcaagagggctgaggagagggagggatgaggagaagaggtgagaaagagaaggaagaaaatttctattgaacggacgcgtgtgtggcagagagagagagagcagtggatggataaggagagacagagagcgcggtgcgggtggatggataagaatggacgcgctcccccgtgtggcttggctcggttttacgggttgtcggtttttaaaaaactagcacctataatatattatataatatattacaggtgtcagattttttaaaaaaacggcaccttttcctttaccacaaatatgtcggttctttggtaggccccgcgccaactaaaagatgccggatttaataaaaaaccggagctttctttgacaggggtaaaaggacaggggtaaaaggtgccatttttttaggagataaagatgtcggttctcgactttttggcgggttgagataggcactataggtgccggttttaccacttccggcacctatagtgccggcatctatttgatgttttgtagtagcgctcgtcgaatctgatttgtatccctcaatagaaaaattaggtgtaaccgtgtaagggctcctccaactattaaaaccatgcaaaatagcttcctcggtagtgttaacggtggttcttgctcacgtggcagtccagtctcctccaactattaaaaccgagcaaaacggctccctcggttgtattgttagtggtttttactgacgtagcgtccacgtggcagtccaaacatcaagaaattaaaaagaatgtaggctccgcctataaatgacaagagaaaataaaaataaacaacacttgcctatccgctcgtgccgccggcttctggcgagtatgcttagccgcccattcgggtgcacgacggtgtccgtcggcgacctccccaagcgttgagcttccactcctcctgctgcttcgccgctgcctcctttcccctttcccccacgctacacccgtgatcgaggatgacggggcgggaatgaggagtcagctagcacgggcaaaagaggagtcggctagcatggccccaactttgtcgtcgtcgccctcccaacctcatgtcgatgccaccgccctcccaacctcgtgtagccgccacctttggagaagacgaagccgcaacgagtcagagaagcaaaacggcagtggaaaggtagcagcagcggtagaacggcattttggaagagtagcgaccactgcctcatccttttgcgccttccgctccctccccgcctctgatggcctcgccgtgccaaccataggagagaaaggagggaggccgctcctcgccgcggccttccgtgccctccccacctctgatgatcccgccacccaaccatgggagagagaggaggaaggcctctcctcaccgccacctttcgctccctacccgcctctgatgtcccctccaccttgaccataggagagagaaagaagggaggccgctcctcgccgtggccttcatacccacctcgagcatgggcgagggacgcatggacctcatccaccaccacgagcctctcgttgagcctacaaacatgggggagctggactcggagctctagtgataggagaaagagatgagagggaggtagggagagaagaggggaggaggtgctggtgcccttcccagctttggttcgccgttactgcagccaccctcctaggtctcagcctctctgttgtgaaagagggaagagaaaatggagagggaggggggatggggaagaagatgggaagggagacttacatgtgagccccattgtcctttttttattttctttcctgattatagtgccacgcggacaccacatatgataaagactatgttaacacgcgccacgtagaacaaaaccgctgtccaaagcacctgaggaggcaaaatgaaccggtattgatagttaggggagttgctatatccgttttttgcggttgaggaatatgaaatagatccgagctatatttgagggagtcaatttggacattttcctttatgtggctcgcatttagcgtgcgcagggtccactgtgtgtacgacggaatcatgcgctgacctagggatgcacgtggactaggttgacctagcccaggaaatatggggccaaaatcatatggtttacccatcaaatttcatgggtcagcatagatcgacccaccacggcccatggtatgtgggtcgacccacctgcatccgctccactcagtcgtgtgaaactatgttgatatttcttaacgacattattagaaatataagttaccaacaatggcgctagaaatggtcctggtatatatatggttacagaaggaatccgcaagcgcacggatataccattgtagcatttcgcctgagagtattccaaggtatcgtatttatttaattccaagggaggattgtaacagagaactatgctaataatgtatatatgccacttgtatgatcagagcctaagcaggggttaatatatttataaagggtagagtgacacgaagcaaagaactcatatctctcattaatcaatcctaaactatgtggaagaagaaataaaaaagcaatcatttcctataattctaatatacactcaatcttagtttatatatgctagtatactatcatgtagccaatacccctaatagtgccctcctggtgtttcgagagaccacccccggttgccgagttccttacgacaacctgttatggccgaccaaccggagctaaatacggaggagtaccctccctaggaatgtttcttaggaatatatactatcgtggaggaatacccgtactgagctgtcaccatcagcgtcccacctcgactgacctgtagcatatatgcccagataatgatacttgataatctagacaccgcgtctacattatcaaatactactctacatcccccgagatgacatagagcagccgaataatcggagactaaacccacaccactgcatctctctagtaggctaactacatgactgtaccgatacaaatataaagcaaagccgatactcagataaactaaagtaccgagagtatataaagaataacatttcattactttcgaaagtcttacaaaagaaataagaaaagctactagagccatacccgaattcctccgaagactctaaggactccatgagctattctattctactccacttagcactaggatactaaactaaagtgtagagagatatcttgagtttgcttgagtgtgtgaaggagtggaggaggtgaaggccttttatagctgatgaaatgactattatgacggttggaaaggtcggtaataccctccaaccgccattaggagtgaatctccaccgtccatccgaagccctgtatcaaacggcgccgaggggggttcggtcaaacccatggttcggccgaaccatgggttgggccaacctggcccattttcgacagacttactcctcaactgcttctcagtccagaacagtgaattatgggcccatttaatcttgtcatttctgagttgccggcccatttatccacaagtctgattctcgacagcgtctgactaattcttcgagtgttttgctgtcgattctcctccatattatgtatctttctctacaaacaaatagaatccaagtacaagaagaaatagattattctaaaacaaatatgcattgcaagcatagctagttctcctttattttagttatattgactgtcgatattggtctataacgaccatcaacacactagcatagaaatgcagatgcttgctcgcaactgttgccgtcgcagcctgcatccacctcatgcccctgcgctgacaccgccaccttcgtctcgcccctgctcacctcaacctaggggcccacatgttagcctctaggagaaggttgatggagagaggcagtggctctggttcagccgaaccagggtttggctgccctcatccccaccctccacgtgacgcttcctcagccctccctaatgacggtcctcggtgaaccgacttggataactgccttaatcaactgtcattggaggctataaaaggagaagaatgtcacactctcaacacactaatcaagaagcaatccctctatttctcatttgtattactctatagattagtagagtttaggctaagagtagttcttcggtttcctagtcttctcaaatgggtatgtttttagtacttttctctcattgtaagactttgagcatagtaatgaaattatcttctttatttatcggtgtttatagttcatatactgctttggcaattatatgttctatgagtagtttttacttttttggtatgctttacatgtgtaggctagtcgatatatgtcacgatatcggtccaataatcttaacggattgcactagttcttacttgtctatccgaaaagtgggagtcttaggaaaagtaatagtattatttagcaatgtaagcatggtgcttaggttgattaaatgtcattggatgtgggtgtgctccacgggttgtagaggtaggcgacaggtggtgataaacgttgtatgccctttgtaatcatctacgttcaggtttgacgtaagagttcgtaaaatgtcgtaaccacgttggcagaccagtatagggagtgctctctctctcggtagtgtctggatgcatagaactaagtcataacttgtaacttgtacatgtatgtgtttgtttgagtataatcgaagcatcctaaatatataagtatataaacgaaaccatagctctcttttgtctttctcctcaatcaagtttatctttattgagattattcttctatgtcacactacctatgcgtgaaactacgtgtgcatgtcacacaccaagtggtcaaccatgggaggacctaattgccttgtactttcatgcatgacgaaggtgatggtcgaggatttgctgcatgggccatggaattgcactagccagatgtagttaggtgcctgacaggagcaacagtgtcaccacaccggcctccgctcactctgctttgcacgctgacatcaatgcctgaactgctggtcggtggtcaagaccgccaattgatccctagctagcgaatgtgcctaccttggtgtcatcgctggcgccgtagttcttgacattgaacgttgggttaccgtggtacatcgccttagccaatgtcgacgacatgttggtggcggaatatagcgtagcagcaacgatgacgaccaaccgttgctgcgtctccatattcatagctagccctctccacagctcacatctgtgcggcggacatgagagagaaattaggggatcgatggggtttccaaaaatgaagacgtgtttccgtctttgagcgatggggatgtgtgatggagtagccatagtcaatgcgatcttaggtgcaagcgcgatttggcggggacagaatcatggataagttgtgtgcagtggctgatgggaggagggaatgatccagagcgttgtacctggtgttggtgtgaataatattgggcgttggatttgatgaatgaagtatttagtagtagaaggacttgagttggccaactatccggtaataaatactacctctgttatataatagatgacgctgttgactttttgtcatatttttgaccattcgttttattaaaaaaattacgtaattataattattttattgtgagttgttttattactcaaagtatttaagtatcatttatattttatacatttgaataaaacttttgaataagacaaatggtcaaacatgtgttcaaaattcaacgcgtcatctattaaaaaaagaatgtatgggactacctatacatttgtcgacaaatttttccctaaaaatttgacagatgtaattatagtacaatcgtagtgtaattacactgtaacttatatgtaattacactgtaacttgcatgtaactacagtgtaacttatatgtaagtttcacataattttgaatcgttggatctattacaagatttgttttggtgaggaagaaaacaaatcatagcacacacatatgtgaaagaatttgttcccacgacctccattttaccgaaataacatgtaacggagagatttttgaaagttacatacaagttacactatagttacagtgtaattacatgcaagttacagtgtaattacagtacgattgtactgtaattacatctgtcaaattttgggggaaaaatttgtcgacaaatatatagcaaaatcgaaccagaaataacaaaacgagcaaaaagaaggaaaacaacttccttccttccctcctccctcccttctccaacctgaagacctgaccgccagatctgacacctcaagctttggctcgcttcgcttccttttccggcctcccagatcccgatctctccctccccatgcctcctcctcctcctcctcctcgcctcccctaacccccgccgccgccgcgcgccatggcctcgcggcctccgctccgcaccacctccgcctcctcctccaccctctccaccgactcccccacctccgctccccccggcggcgtcccgcagtccatcaccgcgctcctcaacaaccctctcccctccgcctcctcctcctcctactactggctcacctggccccctcccaccccgctccccgacgcgcccccgccgccgccgccccacccctgcgacgtctcccgcgccgacttcgccccctacctcgccgccgtcgccgaccccttcggccgcttcgctgatatccggctccacgcctccgcggaggagctcgcggagtcccaggacggcgccgccgccggccccgcggcctccggcctcgccgcctgcctccgcgaggtccccgcgctcttcttcaaggaggacttcgcgctcgaggacggggccacgttcaaggccgcctgcccgctcggcgacgccgcgctgcaggagcgcctcggccagcacctcgacgtcgtcgaggcgcacctcgtgcgggagatcgcgcgccgctccgagtccttctacgaggcgcagggccggctgcgggggctggacggggagatcgtcgccgcggtcgggaggatccgggagctcagggaggtggtccgggtgctcaccggcgatctcgtgggtgccgcgcgccaggtgcaggagctcaatgcgacgcggggtaacctcgtcgcgctgcagcagaagctcaccgtcatcctctacgtcagccaggcgctcgctgctctaaagctggtgagtgggcaaactgagcattgcgaaacaagatatctcccgcattgcattttctctgctgatcagcaatgtgaatgattccctgaactggttgggaactaagcttagctcagtgatgtgctaatctcttattaatacccaaggcgtgtgcttttgctggcatttccctcacttttctttgagtcagttggcaatttggttagtgcgagaatgagaagtacgatagacaataaaactgcatgcacacgctgttttcttagtttgatagtctgatgccatgcgttatggtttgttcacattattttgttctcggtgatttatatgttgatgaatagtactgtgcatggaacgccagaaaagtgctaggctgtctgtatctcattaattttctggcaacaatctcggtggatttagatcttcctaccttggctgctcaattatgaagtgccaatgtaccttgacacggaaaatgaaacttgatggttctgtatgagagttctagatgagttacgactttaatttggagggcttatagactaacactaggcaagcatatacctaaaagctcaaacaaactcaattattaagggaacaaaactttgatatacttaaggtttagtttattgtgctgagtcctgtaaggcatgtaggttgacatgtgggccaaaagataggctagtcatggtacccaaagataggcttgtgaggctgaaatgaaattgtatgcgccttactggcttccatctcttccattgtctctctattctttgatgatccttctaatttcctctctctcgatacctacatccctttcccaacctctgctcagtagtgaagcagtgtcacaacaaaattcagtaaaggagaggggaggactagaggaggatgttaagggttgagattcacagaccaaacttcagagggtgtctaacaaggtgtttgagattcagtgctttatgctgcctataccatttatgttgcagcctagagcaggttggtgggagactgtgaggaggacgtgcatcagaagttcagagcatgaagcaaaaggatgcaggaggcttcgctagttcaattcttcacaatgtactccatggagtgatggaagatggaagggagagaggacaggacagttgctgggaccaaggagttaggaagaggaggcagctctagacaccatgatatgcgaggaggatccacacagtcgggctgagtggaggtgatgcgctgagtggagtgtgcctgcttgcagttgggaatagttgggattggttcttgtatttgggtacgctgttgcgatgctctgctcatgagcttctattataggggtattgcaccaggagagattgggaagtattggagctttacttatttattttttaaaactgtaattaatggtactcgcttcgatctgtgtccagataccaatttggctcttcacttgacattctagactggaataaatgttttttatactagatcttttagtcattgcgttaaatctttttcttacatttcaagccctttattttatcgattcctaattcagtgctttgatttgttaatcttatatgtgcagcttgtggcagctgcggattgtgctggtgcccttgacgtaattgatgacctgcaaaacttgctagtaagtttcttatacaacaagacgccaatgtttccttttgtattcctctatggcagctttacccttcgtcaaccatcttttttaacattgtgaggtctaaaagtaaagacgtgcagctaaaaagataaagttaattatcatacttctaattcattccatgtcatcaaagctgagatataccctactattattaaatatattacgtgggtctgttggactggggatgcccaaaagttaacttcaattggcaattttaatatctaatgcgtcggtttagaataatttcttagttaacccaacaaaagtgtttagcttctcttttccccttccctaaagtaagtactctggagtacatgcatgcattttggtaaaaatagcaagactgtcagagaatttggcctcatctctatttgcttgctgattgtctgtctctatataaccatgatatattaatggtatgggattacaacgtatcaaattagttgattgaaagatgtgattaacttgtaaatacgcctttttactcccatctacttgctcatgtctgcagcatatgtaacttgtattgttatgataatgttttccttttttcaaacaggatactgatgaactcactgggctttattgctttcgaaatattcgtgatcagttggggacatcactagattctgtcaacaggtactctcttagaacttgagcataggttcctatgatatgagcacaccttttagatttcaggagtattagcacaaaatatctgatattgagataaaaagcctttttgtgcatagaaataaatcatgaatcagtgaattgtgatcaaaagctcgtggcatgttgtagcaatgtaggtaagctgatcaatataaaaaagaaataattagtgattgtactcaaatggcatgtttgttgatactgaaaatgtgcctacacccggagggtaaattttaatgtcgttattaatcttgggctatatcaggatattgatattttgttttttttttcaatattatgcccatcagtaacttgctgtttgacttgataatattcattcttgtagcattctttcagcagaatttgtgcgggctgctgttcctgatggaaaagctgtagacgcattgattcaagcaaatgtgaaaagaaaggcttctgtcccccttaatgggacggagcatgaagtatgtttcagttcacagtttaatctatctcttaattggcttatatttactggattatatatgccgatgcactactatctgtttattccatcgaaatttctactaatctgtattttctatgtgttgtctgttcactgttaacttattctaggttgtcatttgttgtatcagtgcattctcactgaaatgtaaactttcactacaacaaatgaaccagaaaatttgaacattcctgctgtatagagtatttttttatatagcatagtgaatgctgttcactttttggacccttctgttaggttgttaagaacaatgattaatcataaattcataattgaacaatatcaatttagggacttgccatattgaggccaaattgtctgcttttaatgtttgttttgttgatgttaaggttcaatgcatgataggaaagcaatgttatgcggtaggaagtgatcatgaactaattaccatttaatactaattttgtcatggctatagctattcatattcttgtggctactttggccatttctaggcaaattttgttcttttccaatctttgagtgaattgctctgtagcaaacacagtttagcagaatatgtagttatttcgtaaatgtttgacgcgtttaatattttcatcagattgcattaatacaccgtttatgttatttcttccatttggtgttccatgcttacagtactgtggtactttaagtaaaggttttcatcacattttctctaattttcggcatgttcattggtttaccgtaggtaaacatagatgaggaagaaagcttcattctcagagatcggcttctccccctcattatttgcctactgagaacggttagttctgtcatttactttcattaaattgatattgcagcgtgcacaaattggatgcacaaatatatctttttcaatactgaatgcaaacaatgagaggttttagagtgataaatattccccaaacaccttaaaggcatgttcattggtttgtgttgatgaataaaagcttgtattttgggcttattacttgcatccgcatgtctaagtaagatgctgtttcaaacttgtattggatagaatatcaagttccttttttcgcaaaggctgatctcctgtgagtatatttgattagtagcagcatcatgtttctttattcctggatgtaacttgcctttttgagggtatattagttagcagtccatttttttggtggaaactaaatggtatggttcatttttatattttgcaggacaaacttccagcggtgctaagaatttaccgtgacacactaattactgttatgaaagcttcaattaaagccacagtagctgagctgctcccaattttagttgccaggacaatagattctgattcagtaactggagacagagctgctgattctgatggtgtcatgttttctccatttatcactatttctttcccatgctatttcttccactaaaattcttacatagtttgaacttcaattttttcttaactgcagctggaggccagtctttagcaaataagttgcggagtctatcgtctgaagggtttgttcagcttttatcggctatatttaggatagtacaggtaaaatgattataagaattccatttaacctgttcgaagtggaggccatgcatcaaatttaatctcaatgaggatatacttttatagtatttggtagtgtagatattttagccttgcattgatttatttgttagctttagttatccactttttgactgcatttattgtatcagcttaattgttctatgcaattattatcagcattaaaggagccatgaaattggcgcaagtcccttactacatgctctgtatttgctgattctattggttggagaaccaaataaaaccagaatagattgtggagttagctatagaagttatgtactagcatgtagcatcccaacttccaagtccaatttctctttaaaaaaaccttccaagtccaaattgaatcagtgcaaccaattggttcgcctttgccccccgcgggggnngngggggggggggggcaggtggtgaacctgcctgtccgccggttctgctggctaccgtactaggggtcttcttgaagtcatcacctatatttgtatttctatttttgataaaagatatttagcagtggctggctggttgcttgaggatgtggggaaaagagttttgaacattgctatgctacatgtaactaaatgaaaataagagttgttaacttttaactataatttcttgtgccttttcccatctgaaaaccatgtagcattgacctaatatttttcagcatgcttgaaatgtttcttgtctacttaaatcatgtacaatttctgaagatttaaagaaaaaacttgaggtaatcagtattcttttgtcaattcaggtacatctagtgcaagcagctgaagttaaaagaatagttgaatggatcatgggaaacctcgaggggagcttaagttctgatgcttcaaattctgtacaaaagcacagtggctcggtttctgatttttcccaagaaaatgaccacggtgtcacttcacgggtgtctaatactcttaccaggagtaattctaagtttcccttctttcaaggaaaaacgaatgacatgtccagtacaaattcaataaagaatgtccggtaagttaaggtgcaactagttattaaatcttgcattcacatgggctagatatcatatacatccgcatcaaaactctatggaaaaacatatttgaacttttttttaggtttggaataaaaatatttttatgaatagatccaaaattaaaaattaggagctacaaaagttatatatagaatccatccgaatatagtttttgttactttctgtttttctggttattctgaaatttgaaattaataattacaaaatcgtacctgacatggacttttgttgtaatctgaaccactgtaatttcgtcccaccttgaagaatggctagattttatttttcacctttttctgataaatgcgaaaaatacctcagtttgcctaaaagaacctccctttgtcccaaaatatagctagttctaaagtttttcacttctatattttgggacacccttttgtactctagaagtagctatagtttgggacaaaaaattgaatgctagaagtagctatattttgggatggagggagtagatatgctttttatgttatgttagctgatgtcatggtagtgctgtggacagattcaatacaaaattagaatattgggtcaaattctaggctttacctcttttatatcataattatatttgacaacacaattgctctctaatatttgcctttggtacagagctgatgtcttgagagaaaacacagaagctgtttttgctgcatgtgatgctgcccatggacgatgggctaaacttcttggtgttcgtgctgcccttcaccccaaattaagacttcaggagttcttgatcatctataatgtaacagaagaatttgtagctgccactgaaaaggttatttcttttcctgtttgaaaaatatgcacaaacgctcattatgctcatcactgcatacatgcaagttatgactttattgtatcttcttattcctgtagattggaggcaggttgggttacaacatccgtggaattgtacaacaacaatcaaagcaatttgttgactatcagcatactgtccgggtgagtgataaaatttgttgactatcagcatttgttgaattctacaatggtaaacaacttgcatgagtttactgatgatgaaaaattaaaaggccattcttcaaatgtcatctataaggagagaataatattaaatataagactacaaagcatcattgtacacaaacttcaatggataattgtgctattttgaaagaatataaatcactcaactttatccctgacccctcagttatagatatccatcaaattgaatataatgctgtacctttattatgctttttaattggagaatattacttgcggaaagtgcatttcaccatcaaataccctgagtaaaatggtagtgcaaacggagaatgtaaggcttaaacaagtacttcctccggttcacaatgtaagtcattctagcatttcccacattcatattgaaaaatatgaatgtgggaatttcaatatgaatgtgggaaatgctagaatgacttacattgtgaaacggagggagtactactcaacaattgacactatagtttgtgaaacaattaacattattaggtgtcactgctgcttttttttgctactcaacaatcatcataaatacaaatttcaaggttgtgcaaacaactgtgatttggatttcagactgatatgtactttgtctgcagttgatgcacaacttatagtatttttgtgcactaaaacttctaatattcttttgaagatggcaaaaatcaaggcagttcttgaccaagagacatgggttgctattgatgttccagaagagttccaagcaattgttctatcactatcatccacttattccgttgctaatggcatggagatgcctagcactgatgacagctcaaagctccatgaaaatcgggttacaagtcaagaaccagtaaattcagctgaaaataatactgataatggcaacgcagtatctacttctccttcgactgaaaacaatgttgggcatgctagatcaacacagcaaaccattgtgcatgggggtgtaggctatcatatggtaaactggttagtcatctatattttctacttaatagttcaggtcaagttgcattctcttcttgcgcaccttgcagtgttgcaacgtgacacttttatttcccaacattttgatagctagagtcgtaaaccatccctctattgatttgtggtcaaccttgttttatttgttgtgtctttttgttaacttgtgttctcattacgtgagattctcaatttaaatcatgttcacccttgcagtggtttgatattgttgaagatgttatcggaatatgttgacatcagtaaatgcttgccatcattatcttttgaggtggtccaacgtgttgttgaaatattgaagctcttcaacactaggacgtgccaactggttcttggtgcaggtgccatgcaggtagtataactgttacatgcaatttgagtcattaagttgttaacagtataaagtcttttctctatatctgtactcatttaaaagggagtagcggtggtggtgagtctgccaccacccccaccaccaactctatttttttgtgagaaggaaggacaatgtaaggctagaggacccacatgtcagtaacaaatatatccagaaatttagagatatatgcagaaaattatggtaataacaggttaatgataattttctttaatcaaaactagttgaatgcccgtgcattgcaatgggaattaaataagaaaaccacaccgtacactctaaagcctcaaaaattaaaataaaactaccctcattctaaaatcttagggtcatatatttgtcatcattttcacctcacttcaaaagaagtttttcctgtttgatggcttgaggttaggaagggacaaaagtccatccacctcactgtttgggggacccacatggtagtggtggtgggtggtggcagatttaccactcaccaccaccattgaggtctttgaaaagagtatatagatcctgttgtaacgcgagggcgatatgctagtttttttacaacatatgtaaacacaactctcgtgttttcatgggtatgtaacacgggttaaggacactagaagttcttatggatcatctgctcacttaggctgcattcatttctggagattgagagagaaacccattcgttttccacacccacaatacttttttgcaaaaattttctataggaaagttgctttaaaaaatcatattaatccatttttgaaatttaaaatagttaatactcaactctccttgtgggcaagattttaccatcagttatgggttagtgtgctatcaaaagcaagatttgcatgcttttatcaaatgctaaccttgcttggaaaagcatattgccttagcttttagatccatgcacaccttaaggcttggctgggtgtccttggacataagtggtgcagtggcaccatggaaccatctgcgcctaaggcagggagggagatgggattatgagactaatgaacttctgtttgttcttgtttgattaagatataatgatgtccttttaataggatagccttaggctggacatagcacctcgtttactgaatgctgtacctcatagcgtaccatgtttttccattgttttgtgtaatctttatctccattctcgaatagtatgagttgtttatgctcaatgaacaatttgtatcactttgttgcacaaaaaaactatttgtgcaatttgttctacctatatggaaatgctgttgcaaacagttaattattctgtttgaacaatcgtacttcaatgtctgattagtttaaatgcttctgatcctgatcaatctcgatagctgattttgtgtagctactcaacttgttttccactagttcggattggtgagttatattctccattgttttgattttcaggtgtctggtctgaaatcaattacgtctaagcatttagctttggcaagtcagataatcagctttatatattctttaattccaggtaagcactgttttttactcttctataaagcatgatgtgatggtactctgtcctggtgttggctatgtccatgtttgctcactcaacattttcatcatactgcagatatccggcgtgtacttttcctgaaaatacccgaggcacgcaaacaactgttaatgtctgaactggatagagtgactcaggtatgatcattaatttacatactaacattttgttagttcaagcaactcatgaatgctactactatcttttagttgtttttctatcaatgccatttcttacatgtttcaaggaataacaggattacaagattcatcgagatgaaattcacaccaagctagtccagataatgagagagagattactagcaaatctgagaaaattaccgcaaattgtggaaagttggaatgggcctgaagatactgatttgcagccaagtcaatttgccaagtctgttacgaaggtacattgtttaactgttatcgttgtaaataatgttatcatatggttgcatatttctacttgtatgtggttgtttaaagggttttgccatgatttaagtaagttaagttcacgtgttgctaggtgaaaataacacgtggtttatggtctttttgttatgtgaccattactttcatttatctctttggtagtttgaatccacgcaagggatatgttttttccaggtttcaggtgttttaacttatttatgctaactgttaaattttttcacaaaaaaaactattgcaggaagttagttacttgcatcgcatcctttctcaaacattgcttgaggcagatgtgcaattgatattcaggtattttttttatactttttactactgactttagctccatgctatcattataatcattgcaccattttatatttcagatgagtgatttttagctacaacatatgcaggtctttacctgttttaatt

SEQ ID NO: 15729 - DNA, 12105 bp, Oryza sativa
  unsure (1)..(12105): unsure at all n locations
ggattaaaatacatgggagaaagctcattacgactggaaaaaaaaagcattgccctggaaatatgatggaagctgggctcacttagtgtgtcccagccgccactctgactccccacactgataatcatcttaagcttgtcgtctgccctgctctccacccttccccatcccaacattccttcgccctcctccctgccgcctaacatctctacccgatctcccgctgctcttaccttgctttgttcctagctgatggctcctgggtatgcatcgagcttaggatcctggatctgcacaacagcagcctcattctgcctcaccaccacacccatcgtgtaggagtccaacgtgttccttaattctgcagcaacagcagctactgcgacactggagacatgctctggaccaaggtgtggaaccagttttggccagtggatttcggttggaatttgttgctgacttttactgttttattttgattattggtctgcaattcgataatgttcactatttactctttcatgaattgattctgagtcctaaatcctcctgctatctaatcttcttgatgatatgcacttgatagtgcagtggcaaggagtgtgtggtttcaactttgaggtcccgtgttcaatccccaacacgctcacaatttcttaaaaaaaaaaaagtttggagggacgtctctccttccaaatctcatctaatcttcttgatttccacatgcttgttaatatccataatccaaatggtcagtatgccaggcatttgtatttcactggtaatggtaattatgggtaacacgaaattactcttgtatttcaatcacaatattatataaaatacacaactcccaagcaggccatatttgtcatgagttatagaaccagcatctgtatttttgacttttatgcttgccctgaacaagttttcatctgttcatataatatgtttataatctactgttttgctgcaaggtaatattgcgtgccgctgatttctttctaccctcttgttcaatgcaggcaagtagttcaaatattccattcacatatcacagaagcattttcgaagttagaactcagtacacctcaggcaaagaacaggtactcctaaacttgttgcactctctcccacagggagatggaaaaaaaactaaatttgattctccttgtgagctgtgggtgttctgtaacatttatatttgacccgttattcaatgattgatgaaactcagattgtgccgtgatgtccaacatattcttgtatgcattcggaagttgcctgctgagaacttcagtgcagaagctattccgaattatggtcttcttgatgatttcttggctgaaaagtttgggacaaaagttgatgaatgactgacctgtacattaggaactgactgtgtctgcaaatgttcagtactcatatggtacatgggaagtactccaagacatcgccgttattggcgtgaaatcctgtgcaggtaacaactggaaccaatctgttctgacttgttgccagtcttcatagatgtcaacatctaatccttttttttcaacggcatatgactatatactccctccgtttcataatgtaagactttctaacattatccacattaaatgaggcatgtaatattaagtttatttggtgctggcttcgtctccccagaagtcatgttaaataatgtatatcaaagttcatttgttctattccatgtttttgaaacccagatagagaaatagtggtattctgggagaaactaattctgtatgggatgtttcataaagggtagattttatacgaaacactgataaccaattttataatgcaggcattgctccccaggatacaagtacatagcacttaaatgacagcggagtacaatgtcaatactcccagtaatgccgtgtgaaaatcatagcaatgtttttgcccttttctgagctgaaattgttgccccatactttaaccatgccaggctgcatttcaattttttaattgttccatccctttttggggacccgatatttgttactagaagttcgtatagagggaactgagttttggcatcacgatctattcattgcagcatgcttcttgctgtgtaggtctggtgtattcaatatcctgtcgtgatggcagcccatgtattttgttcatgtaaggttttgtaattagtctgatgaatgagataataaggtatttttaaatgttagaataggaaaagattccagccatgcatggatatataacaggaaattgaagattactacatatgtccctttctaatgtgatctatgtatgtatgcatgttcttttgtgagtgatgtactgtaattggttaaattctttccttcccgaggtacaaaactagagagttttgttgtaaaccttaaattattatggtcttttttcgtaaacctttaattttggcaaataacctagaacgataataattttgaaaacggaggtaatacatgattagattactttactcgtcaatgagactcctgtcgcgcgagtgcgtgatgcacgcaccaggtcgctgggcgcaccactgcacacaggccacagccacacgcattcttgccatcctaggtgggtcgcgtatcagcttgtaatcatagctcttctctaaagcaaaagacacggaggcagaggcggtatgttgctacctccgttctctcccaataaatggctgaatcatttggtgatcatatttgagtgtacaaataaataaattaactattataaaattaaaaaataaatataaaacaccattttttatataaaaaaaatcacaccgtttaggatcaggaagcttgtctcattaatttgttggctatcattccttctatctaggagtatgtgagtacaattcactaatccactaaatgttatgaacaagttcccaacaaataaacacttgcacattcacaacataatgtaacacttattacaacaaaatgtttaggcaaatgtggcacaaaaataatcaaatcacttctcctggtttgtgaccttgatggtatcttgaccatgttcctccatattgcgctggagagaggccagagacgggggagggactcatggatggtgtttacatggattggagctcatgatcttagataccttatcaggatttacacgacacaagggaagaccaaggttcattggagcagctcctctcgttgagattcccgcagacattagtggggaggaccgaaaggttggcatgtgggatggacaacaaaagtaaacagataaggttgagtaaggttatcaatataccgattgtatcgtacgattttacgattctatatagataatgtatctatatggattttatgtatatgattatacgattgtgatcctacttggaactttcgatgccattggtgcctacagaggcatcaaagcgcttccttgagagctacatcaacacgctactgatggtaagacaacacccaaaggcggatgtaaacaccggcaagcaagttgttagctactacctcggggaagaattgcatcgacaagggaagaaggaaaaggaacccagcgggaagagatggagccgtccaagtctaggatggaccaatttgattgttgttggattctacgatgcatgtgatgatactggaggtttgctcttatgctcttgaagctgaacttatggcctgcaatgagggggtgaaaatggcactgcaatggacaatcctaccagtgataatagagaccgattgcctctctgtaactcaaatgttgcaagaaggcaaaatggacagatctggtcttgcttttgtgaccagggagacgaaggagctcctgtccggaaggtggaatttcacgatccagaagattcatagagatcaaaatagagttagtcatcaattagcaaatatcgctcgaaccaagaagaaattccaagatgtctaatttctggtcgggcgatgattgtaatctcattgaacagatgatccttcaggatcaatctgagattcatgattaatgaaatccctttttccccgcaaaaaaaaaagattatgactttaacaacattggttgggcttgagcatccaaaagtcaagatggtagccatatgatgaaaaggtgaaacggacggtggattgcacactccatgttgcccgatcgcgaagtactataataaagaaatatgtgctagctccaatgtgtagttcgatcataataaaatgtattacacaattaatttcatttttaggcaacacgtggcaccacaaaatatatgttgggcccgctcaattgatatgtgcatgctaaacatcaagcctttggaaaaaaaaacttaatatccggcccatataccaaagcccaaatgctattattctttgcacgactatacgatgtatattaaccctcattttataccctagacaggcagttattgttcccatctcctattttccatgccgccaccgccgccgccaccaccaccaccaccgctgttcgcctactcctctccaatggattcaggtacttcatctccataatatctaccacttgaactgtgaactaatcttggtagcccacatcctccctgcatcaatcgttgttacaccattcttattgattccttccatagatataagacgttttttgctagtcggatattactatgattgtctatgtcattatccctctctggatggcaccggactcttaggtttaattttaagtagttggttatgctcttattttggtctattcttatagtttagagttttttctagaccttcttactaggttatttcaatacaggcaggttagcatttgtcccaactgctatacttttggttgggtgcactatgtaaatatggcgaagatgtgtttttgatcttccattttctaaaaaggaaccactataagtatgatgaattccaatataatcacccggtgaaacttgatttgcggtatgtagaagaaaacaatgatatctccttttgttaaatactatattatagctatctttctatttcccttgcacggttgaaaaatgtaaatatgcttttttttcctaggaaataaggcaccacaacaaatttacacaaacgtcacctatcaggaagactcagataacaaaatgaatcaatatttaatctgttttatgtcgtagctaactcaaattttttattaatttgttcctgaaacatattatttatttttcagttatatcttttattttaacccatgtgtacaaccgaagcagtcgaactggattgaaaaatttgaaatgctatactactgtagcatattactatttttttaagaacagcttatatgaaatttcacatatgtacaacacattttggccatcctggctggctaaaacactggaacataccggatgttgccaacagcaaggcacatctggaatttagaggacgccattattttccccattaatgtaaatacatctgccaactttcgtgcactaatattaccctttttttcctcaaatatagtgagcccacagataaaatgcaaaaccatccacggttttacatgcaaaagtagcaattatttattgtgtaatctggatgatccttgttttgaatgtaacaatctcccttatcatcttagagtggcataaacagcattctttcatgtcataaatctgtacttcaagaaacgtgatcacaaacctggttggcaattaaccttgtgattaatatgtttcatcgaatgaaatctttcagattcagcatatcaccaacttttgatctttgtttggcctataaataccattggcaaacaggagtcccattgcatccaaaactattccaagcaaactcttccagttttctgtttttctcatcttctgcttcccctgtgtagagcacagtagaggttccatcaggtgattctttgctcttctctctttgtttttaattcatcgttgatgtaagagtaatcttgaaaattatttggtggactacggggaataattaatctcttttcattatattaatctgcagcttgctctcatggcgttccaaacccaaggatccaacctgagggcattgctcgttgaggacatcaaagtgaaccgcatgatcctgtcgcagatgctgcgcaaattccaagttgaaaccactgtggttcagaatggaaaagaagctgttgaactattccttggaggagaaacatttgatattgttttgactgacaatcttatgcccatcatgactggtcctgaggtataacttataacttactccaaaagaataatgtatttcctttcattcagttaacaaataaataatcaagtagttctgatactagttaaacacttctaattaatttaagaagttttaattcttgtgtcactgcttgacaggcaatatccaagatccgtgccatgggtgctactgatgtgatgattgttggagtctcagttgacgccaacagcatggaagagttcaaagatgctggtgctgatctatgtgtgcccaagctgaagcttgagattctagagcacatccttcaggagaccaggagcaagaagaacaagagcagcgcttaggtttcagaagaaaatcaagggactatctgtcatcatttagtgtcatggttgttatcttataagaatttaggtttcatggttgattaatgcctggtttggtgtgagttctgatccttttagttatggttgttgtcttgtcatcatcttttttagagtcatggtttgtcttaaaattttagattcatgtttgatttatgcatggtttggttgtaatcctctcggaacaagttaaagttatcaagaatttattattgatgctcagtttatggtgtcaacattccagcaatgctgtgtgaaaaatcatcaactgagagttttggcagcgcacgattttttttggcatatgttaaatgctgacaggcaggtgtattaattcaatacccttttgagatgcatgacagcccatgcattccattcctatatatggtgcatttatggatttatataaccaaaatttagagattattcataaaagaaaataaatttactgattttgtaggaccgggatggcgtctatccaacggggttgagtaatcgtggttactttttcaaaacaacgaagcaaacaaacagcggaaataaaaacaactaatattacagttattctaatattactaaataaacactaaagtaaccacccttatagcaaaaggcttagcacagtaaagaaaccatatgctacaatgccgaacagtgtagcgcaacagtgccgaacagttaaaacaacacgatgcatttaatcaaaaactttagaacttcgccaattcaaatatgtttggtgtgaaacttcaaacacaagttctagacataaactaggttcaattttaatcaataaacatgaaaagtaacagataaaatgttgattattttagagattaatgtttttttttaaacctaattttagagattaatgtaggcttttggggggcgattagcaccaaggctaggagataagagagaaggagactggagattttggggaatttctcacgatgcttctacatccatcccttgctctattccatctatatttatactatattttacattctagtccttgtacacatatataattacacccactaacactaactctcaagatagggcatatacattgtaaagacccatcttgctaaaaaaatgagaaagatttctcaggtaacccttttgtaagaatatcatcaactcgacttgttgagctcacatatggcatgcatattatccctccatccaacttctctttgataaagtgacaatcaatctctacatgcttagtccaatcatgttgcacgggattatttacaatgtctacagctgctttattgtcacaatataacatcaaaggatagctcaaaagagactactcgtacacttgctaatgccttcttgaagatttgtcattcttctagagagtgggcgttagatttgtgtattgggcaccattgtcgtcgaggttcttctctttgagggtctgggcacttagtgggtgggtccgtctgctctgtggacagaacctcagtcccaactttgcgtttccccactggtggagaaatgctttttagtcccggttcgtaacccccttgtagtcccggtttttcaaccgggactacgaatccgggactaaagatcgctatctttagtcccggttcaaataaccgggactaaaaatcaccaatcgggactaaagatgggagcatctttagtcccggttggtaacaccaaccgggactaaagatatttgttcttttttttctgcttttaatattgaatattgatttcacaccatcccctcccatatccaaatcatcacatattacagaacatctccaaatcctcaaacaaatcatctccaaatacatcacaaactcttaaaaaaattacatcacagggttctaaaaaattcatcacagattcacatctcacacaaaaatacatcacagattcacatctcaaaaaaaaaagaaaaaaaatccggccggcggccactgccgcctcccctcctcccctccacgccggccggccagcgccgagccagtcgccgccgagcggccgcccaccgcagccgccgcctccgcgcagcctcctatcacgcccagaaatttagcccaaatttccagactattttgtgtattaaatccctgtccaggaccagccagggtacacaaaccgacaagtaatatacagttccaaacgtaaataaagcgtaaaatacttacagaagaggcacttagtcctcacaccgaaacaaaagcagcagcagcggaaaaggcgatcctagcggggcttcagctccactccacaggcaaaactcaactggggtatgagccttggtcctttaactccatcttcagctcagaagcactacacttctgaaagggggaataatagcaaggctgagtacaaccaccgtactcagcaagccacaccaatgatgcagacgtgcaaggggatacaaggatggtttgtggctatttgcataaaggcggttgtaaaacattttattgagcaaaacagtaaaactgttgagtaattaaagtaactttaaatctccactgatcaacgctacaccacgttgaacaggcccaaccaacccacctgaactacagtgcattgagtcgatttattaaggtgggactaatcacggtgaatctggtcgaccgcccataaccgcgggcacggctattcgaatagttttactctgatcagaggcgtacaactgtacccacaagacacagccccacgacacgtttccgtgcgccgacatgccaccacgacataccggaaagaggccgtgacaggacccttcgcataaccccctctaaccaagcacaccacacctcaggtttcacccccactcctcgcaaggcagcgggcagtcccctctcgtgcctaggtgaatccggaagccgcataggccgtcgcagggcccatccaaactccatcacgcccacccttgcctggatgcgtcggctagaggaaagctacactacaagcccagccgttgcccacgctggcttgtggtaagtacgataagttcttccagggcatcccgcgaaccggtccttaactgccatgggtgcgaccagcaaaaccatgcacccacagcccaccattcagttgcattttagttggataattacgaccatgaagcatggccagatgtctcgagcacgcagctcaatctgatactaaaaaggtctaatactgtaattatcccatcaactgagctagtggtaattaagcatggctaagcatatagttctagctaggtcacataagtaacatgagctagtcgattcattacccaaagttgacaaagaacagatatcaagtaaacatagcacaagcgaacagataggtaatacccggatcccatgtaattagcaaaatatgcatatttatttgcaaacagtaaaacatttgtaaattgggatcaacatgctcaaggggaatgtgtgacttgccttgcttcttcaaacaatcttccgaactcttttcctcgcgaccgcggacttccgaaacgacggattctacacgctggcacgcaaaacgaggaaaaactctaataaaaaccaagaaaaaagtacataaaaagtaaacaaacatgtagagctcaattttagatgaattttgcaagttgaacggctcaattcggagttcgaatgaattagatatgaattttacaagttttgagccatttaaatgaatttctagaattaaactcgatttattgcgcaattattatttatttttacaaaggaaatggacctcgctgacgtcatcaagggggaggggcggcgccggcaagcgggccccaccggtcagcggcacaagggcgccggtccaccgtggaccgggaccaccgaggcggtccaccgccggtccacgggaaccgacggcccggatcggcccaaagccgatcggacggccacgaggcggcgcggctggggcacgggcacggcatgaagccggctcggccgagacatgacgcggcggcggcaaggggaaggcggcaagggggaggcggcaaccggctgcagcagccggcgacgtggaacggcggcgggcggccggaggacagcggcgcgcacggggacggcgacgcaccccaagaggcggcggtcggcaagaaagggggacgggaaaaaaaagaagggaggagagatcctcaccggaagcggcggccgacgcggaggaagaggacggcgacgacgattgcccaatggcggcttgcgaggacggagggcggacggggtcgcccttgaccttcagaaggagaggagggagttagggaggggaggaccgatgcggggtgactggaaacgaaggccgatggcgatgacaagaggtagagctcaccggcgaccgaggaaggaggagctccggcggatttccggcgaagaggggcggcggccgaggtcctcctcgtccttgcggagctgagggaggcaacggcgcgagtcgacgtcgaccgaagcggcggcgcgacgcggctggagtcggcagcggcggcggagagaggtggttcgcgtggctacggcgctacggaggtggagaggggaaatggagcggtggccaagtttgcccgggcggcggcaaagctgncggtgtcggcggaccagtgcggcggcgaccctagcgacgggaaacgcgggccggagttcgccggagtgtgncggcgcgtgggagtggcgtgaggagagcaagggagggcgcggcggcttggggaaaattggggaaatgagagaggagaccacggggatcgtttttattggctcggggcggtgggatcatggccgcggaggacggaatcgaccggcaacggtcttcggagtgggctccggcgacgtgggcgaagtggggtggttcggcgccggttttggaggggggaaagtgggggaggagagtggaggaggtggggcgacgcggtcccgcggtcggggcgagcgcgcgggtgtagaagaagccggaatcggcggcgacgtggggagaccgtgccgacggtttcggctgagggagccggaggttagggatggccctgacaggtggggcccacctgtcggcggctcggggggaaggagagaggaggagacggttgggggagaagatgacaggtggggcctcgggtcccacctgtcggagagagagggagggagaggccggctggggagacaaagcagacttgagggagagagagagccgagcgggccgagggagaaggccggcccgagagggagagagggggggggggaattgggccgaaaggggcccaaagagaggagggaggattttatttgttttctttttattttaattggttaaatgatcttcgtgactttaaaactatttctcgagctccgaaaattcacggaaaattccggagagtacattagggcacaaagaatattacaaaatattcccggccaatgatttttaagggaaaattttaattctcccattatttcacttgattaaattgctttaacttttatttaatttccagaaaatgcattattaaatgatttttaatcccgaacgaa

SEQ ID NO: 15730 - DNA, 3534 bp, Oryza sativa
aaccgggactaaagatgatatttagtcccggttggtaacaacaaccgggactaaagatcttcctcttattaaccgggactaaaaatcatttttagtctcggtttttaatggaaccgggactattgtggatataggtcgaccgaccaaagatggtttctctaccagtgcccatttcttctgttcatcttcttgctggactctagtgcatctttgttggttgttttcttcccgtcacccgttttgctctttccttccttcctcctgagggtatcatccgcatgagcgcatctgtcaatgatctcgaacaacttgcgagcggaggtgacccgtcttgttgccaactcttgagttgtatagcgatctcggacgcctgatctgaacacgcgaataactgaaacatcggtgatttcagggatcatatttcggcatttattgaaccgccgtatatagtccctcaaagattcacctaggttctgagttaatgtgtggagctcgtccttgagcgtgtggcacttgtatgtcccttgaaaattggcgacgaactgctaccacaagtcttcccatgaagagattgagcggggcgggagatgcacaagccatgaacgagcagatcctttgagtgcggccggcaaatagtttgcgagtgcgttgtcatctgctcctaccgcatagagaaccgtagagtagacgcgtaggaattcctcttggtcagtgctcccattgtatttctctttggctcctggtcgaaacttttcgggccacctaacttctcgtaaagttggagtgaacgccatgcatccttcttcgggtatatggggtggtcggtgccctcgcggtgttcgagaaccgctagccgctgatgatgatgacaaagacgatgaggggtcactgggatttgggctttgacctctgggtcgacatccttgttctcgatccctctgtggatctggggagtgtgaatcccgtcgtcgtctatcggcttggcatcgtcgacctcgtccgttgtcgtcctgagctcgctgcccatggtggttttcgtcatggtggttttggcgatcttgtcagttttggtccccacttgggcgatgtcctcgacttccatcattgtttcgttgtcgatatggtgaacgtcgctgctgatgattagcgtcctcctgttttcgttgttcccccccgacgcccatttaggtggccgtgtaagtcacaattttctcgtggtggtgggctttgctgacgatgtcctcgtggagaggcattacgcggattgcggcctagatcgtgacttgggtgactggggatctccgtgggttcgtggttcccatcctcctgcacctcttccggttgtcctggaagtcgtgaagggccctgagctgctggtccagccgccgctgcgaaagcgctgttgaggttagccattgtagattgtattctttcaaccaaattattagcgtcaaggaacgtgattgggtcaaaaggtgtcacatctagaaatttggtctaaatttccagactattttgcgtattgaatccctgtccaagaataagctagggtacaaaaaatgacaagtaaatatacagatccaaataatacttataaataaaagaggcacacaatcctcacaccgaaaagaaagtagcagcagcagaaaaagaagatcctagcggggcttcagctccactccacaggcaaaactcaattggggtataaaccttggtcctctaacctcatctccggcttagaagcactatacttttcacatacttctgaaaagggggaataatagcaaggctaagtagaggaattagtccggtgtgtccccgggcgtcggctcttgtgccgcaacgagcggttctaaggttagtgtcatccatccgccaagaactgcttaatttgtgacgatatgttctcacttgattgcttacttaggccacagaagttggcggaagagcaccgtctcatcgaagtcggtactcaggaggtgctgtctgagctcgcccttatgagttcaatctccacgtcgtcagatgggcgggaggctcaactcgagagtgaactcaatgagacgtgtgaggaccttcaaaagatgaggaacctcgttgccggacacgaccaacaacgatagggcacctagagtcaatccgggatggcttgaggcaaaattatacatgacttgaccagctggcgcggaacctaggggtaaacgtgaaggtcccaccacacttcgacgatacgacgctggtttcctcgctcatggatcttatcaagggactggaaacagtccatggtaagcatgcggaccacgtaaccgaggaaatctgcaccggcttgcgcaccggtcccagccatgtcctcacttgcgtccggcacatgcaccacgagatcgacctcatggaggtccttgaaaagggtggggccgacccgacgcgcgaggacgtgttgtcgggggtggcggacttaggggaaagcatgatccccttctttgaggagtaatatttttaaactcgatggtttgtattaacttaaatgtaatactttgggcccgctttgtccttaggtagaacaatttcgcatagaggtttttgtattctatagaggtattgttgacgaggatgtccagcatggaggaggtcctgatgttctcgatgtcgagcctgtttctcccgtgactttgtccgcctcgaatgtcaacgaacgcgctctagtggcggtggacccgacaatgtgctcgtcccatctggttagcacttaagctcactcattcggcgtactctaggttgggtcatcagcctctgaatctcagtcttcatagataaccacgaagttggatttgctaaagttgttcccttttgtaggcctcgaggatgcacttgaagagagaaagtgccgtgccacatattggaagacgaaatttgaggtggccaagcttgagctttccatcgagatcgccaaaaaggatcaagacgttgagacgctctgaggacgcaagatctggctgtagaactcgtatctcaacagccattgcgacgccatggcggatgtttgcagggatctacgagtagcgcgtcctcctttggaagaatctgtaaaatcaaaggtgtttttgattattattctgtgatgaacaattgggcattggagattattggttttgttatttggaatttattcacgaagtggttttggagatgattggatttacaggtgatcgcaggatttgtcattttatatgaccggtcagaccgggctctggtagccggttagaccggcgtgtaacgcgcggtcagaccggcgcagcctgcggtctgaccggccgacactgtgtcggtttcggtttcgggttgtttatttggatatccgagtttatttcatgattatgacttctagatggatactatacgtatgtaatactattgtttgctgctaataagtcaagttggagatagcttggtctcggaatatggtttctttgtttgttccatgtgtaggtgactcgatgtctcgggagagtatttgcggtgatggaccgggagtcg

SEQ ID NO: 15731 - DNA, 5465 bp, Oryza sativa
agccgacctcgtcgtcgtcgtcgtagtcgctctcgtcttcaaaaatacgaccatcctccccctgaacctgtgacagtgtccctgcaatttcaggtctagtgccaggactagcctcatcaaaagaaacttcgcaagtctcaataattttgttagtccctaaaataagtacacgatagccacgagtgtgtgcggggtaaccaagaaacaatccatcggtagagcgtgcctcaaacttatccaaatttccagatttcaagacaaagcacttgcaaccaaaaacacgcaaatgtgaaactttgggttgatgtccaaatcgaagttcataagaagtttttccaagtttagatcgcaagaaaactcgatttgaaatatagcaagcagtgttaatagcctcagcccaaaattttctaggagttttgtattcatccaacatcgttctagccatctcaaccaaaacacgattttttctttcaacaacaccgttttgttgaggaacacgaggagaagaaaattcatgttcaagacctctttcgttgcaaaattgttcaaatgaagcattattaaactcaccaccattatcacttcgaattcttttcaaagaaccaggaaattcaagctccaatcgtagaaacaaaccacgaaaatgttgaaaagcttcgtccttagttgccataaagaaaacccaagaatatcgagaaaaattgtcaacaataaccaacacataccactttcctccaatagattgcactctagctggaccaacagtgtccatatgtaatagctgtcccggtgcatccgtcatcacagaaacaataggagcatgtgaagtagaaaccatcttagcatgacgacactgtgtacagaccaaatcatgatctttcttaagtttaggcaaaccacgaataagatccaaaccacttaacctagtgagatgatcaaaaccaacatgtccaagtctacgatgccaaaacatcacatctttatcaaatttagcaaccaaacatattatcacaggtgaaacagcaaaaagtcatgacaacccactcaaataagccgattgcaccaggacattgaaaggctgttttatgtatatcttcctcagccataaagatctgattataacctgcattcccatccataaaactcaaaatcttgttttctgatgcggcatcaaccagttgatcggctactggcattggatattcgtcctttggtgttgctttatttaaattacgaaaatcaatacacaccctgaccttgccattcttcttaataactggaactatgctagatacccactctgcatatcggcatggacgaataaatccagcgtcatataatctcttaatctcagccttaacaggttcgagcatatcggctttacatctcctcggaggttgctgatgtggcctaaatcctggtttaaaaggtaaccgatgttcaacgatcgatcggctgagtccgggcatctcatagtattcccaagcaaagcaatctctaaactcttttaagagctctattaacttggttctgaattccgaagacaaacctttgctaataaatgtcggcctcggccgatcacccagacctatatcaatttcttccaaatcatcggccgacataaaaccttggccctgcttatcgtcgagatcatctactgtatccttagcacaggcctctgaaccctccacaacgccctcaaagtaatagcttgggttctccatcttcaatcggctgtatatcagaatcggatacttttagaaaatctccatcccaaacttttccagataaacaatcaaggccatccatctcccaaagagctaaatcagcattggcaacattaactgacctgtcggctggcacaacctctatcttgtcaccttgccactgaatcaagcactgatgcatagttgaagggatacaacaattggcatgaatccaatctctcccaagcaataaactatatgaacccttcccatcaatgacaaaaaacgtggtaggaatagtcttgttgccgaccgtcaactccacatttaaaacacctttggtctctgatggattactgccaaaatctttgagcaccatatttgtcttgatgagatcctcggcgttcctacccagcttcctgaatgtagcataaggcatcaaattcaccgcagccccaccatcaaccatcattttagacatcggcttcccattgatgtagccatttacatacaatggcttaagatgccgattctccgttccctcaggcttctcaaataccgcctgctctgatgatagggctagcttagctgattcttctcccacttcatcgacatcggcctagctgatcccgaactcggctggcagcgtaaagaccatattgattagtgctgtaacaacgctctttccttttgccaacctctttgcttcatcagctgtagcatcatcagctgcaggagcttggctcttaacacgccacacctgctttggttttggtttcctcagccgatggttgatttcctcttcaacctcctggaaacgttccctgctcctcaatctctagaccctccttttctgattcttcgtaaaaataccagaaggacaccattgattcttcctagtcgactcatcttcttgattatgatcttgactcatcggacccaacctttgatggacgggaagtcttgtctgtctaggccgatcacccctactatgtggtcggcttgagctttcaatgatgtcgctacacccaggacaatttttgatggatggcaacctcattctttcgttccagcagaatctgaagaactcgcaatcccaatgaggatcaaaaccattgtcgttctcttcataacgtctcccctgctgcttatcatacctcctttgatatttattaataatcttagccgaatgtacttggaaacccttcgcacgagatccatcggctgcttgacttgctgtatgcaccatattgacaggaaaaggattcccatcgaccttcatcggcttcttggaatcgtcaaacttaatttttcctccttcgatggccacctggatttgctgtctaaagaccttgcaatcgttggtagaatgagatccagaattatgccacttgcaatatctcttcttgcctaattcctcagccgatgggatcgtatgaccagcaggaagctgaatctgcttttctcggagtagcaaatcgaagatcttgtcggctttagtgatatcaaaatcatattttttctcctttccaggactcttcacccattgacacggtataacctttttgctcctcacccattcggctgcagctatctcagaatcatcatcttcatcgtccgattcatacatatactggcagacatgattaaccttcttagagctccttctgacatcagccgacctatgctcatgcaaggttaccttttgtatcagatgtgataagctatcgaagtcttcggatgagaatttttccctgatcggagggatcataccctggaaggccaaatcggctaactgggcatcggtcaagcttaagctgaaacacttgttcctcatctctctaaacctctgaatatattcatgcacgggttcatcataccgctgtttgattgctgttaagtcggacaacttcatctcgtgaaccccgctgtagaaataactatggaactgcttctccaaatcggcccaactattgaccgatccatacggcaaagatgagaaccaagtaaaagctgacccggacaaagacaatcggaacatcctaaccctcaaggcatctacagccgatgcttctccatactgggcaagatatcggctaatgtgctcataggttgacacgccctcttgtcctgaaaatttagagaaatccggaattttaaaccgattaggaagaggaaccctttcaaaccactctggataaggctgccgatacaagcttccagtctctttaagtttgagcccgaattgtttcctcattacatcggcaatcacatcggcccattgtcgctgctgagctgccccttgtggttgctgctgcatggattcaaactgaccaaactggggagcgaactgctgctgagccgatcctcctggctgatattgggcttgtatagctgaaggctggtatcgataacttaagttacccccttggtagtcgtgcagatccgactgaatattgcgtgccaagtgctcggggaccatctgaggtatcacagtgccatctggttgtatatggtgaactaaatgttctggagtagcttggttcccaaatggctgcacaagttgcccccaaggtgctgcgaacccagccgatgcattagccgaccccaggtgctgaattggctgatgccgtaccggagtctgctgaatcagctgaagccgttgcctcggcggtgtttgttgattcgactgaaaatgctgttgcggcaatgacgcttgctgaaccggctgcgcgacctgttgttgaactggttgtaccatcggttgaactggtggcgcaacttgttgctgaaccggctgcactgtcggctggactggcggtgcctgctgaatcggctgctgttgtactgaattaacaacgggtggtggcaggaacatagcagcaacctggtcttgagttggctgattcgtgatctgttcagcaggctgtgggtactccctcattagtaatctgggattcatcagctgagccgccgcagtagccgatgcagcaggtacagatgttgatgccgacgctgttggttgggctatcggcgcgacagatggagccgcctgcacaactggctgagcatcggtgatcaaggtccggtaatttggaaaaactcctcctggcaagtaaaccgggctgtagcttgatgctcagctatcgagccatcggctattgccttcaccatgttcgataacatattggctaacaccccagactggttaattaaagcatggtgcaccgcgtaatcaatccgatcttgaaagttgttaaaagaatcctgaagaccttgactgaaatttcctcctggtagttcttggtaaacacgatttggagttccatgcacctctggaagattatcaccttgatttcctgcagaaccttcggtagcccctttgacactcggctgagccgagccatctgggtctcgcttaacatccccatctttagatgaaccgatcccagggatgtcggcaactagcttcaacttgtacttctgaacgagtgaccccttgcgggtctgcatgtaggagctctgatactgatcccgtgcttgttgcatcattgcttcgaagtcctgcttctgctctggtgtgaacttctcggggtcaaccggcaggacattgtcatcaataatgtcggtcagccctggctttggcggtttgcctttgccggagcctgggcttggcggtgctgttttttcggccatgaggaagatataacgtctgactcctaatcaggtcccaccaggcgtgccaaaagcgtgttgaca

SEQ ID NO: 15732 - DNA, 2133 bp, Oryza sativa
tatctttagtcccggttgttctcaacaaccgggagtaaatatcttttcccgctatttcgaaattctttttaaacccggttagggttaagaaccgggactaaagattatagcactgcatatgattttcgcttacatatgtgtttataaaatagaagttaatgcattaacattatttaaagtacaaagattaatgacaattacttcgaaaaattatttttggctgtaataaattaagtggataaatcgtaataagcaaatataattaataaaaattccaataatcatatatacttagcatatatatgaatgatattattatattggtaaaaactctaattaagatatgtatgtacatactgcatgatttaaaattaataaaaattgtaatcatcatatgtacttagcgtaggaattatattaaattaaatgctaaaaactctaattaacatatgtaaatgccacatgcatgattttaaccttttaaaaattcgaatagtcatatataagtagcatatgaaagatagtaaattaaattgtgaaaaactctaatatatgaatgatagttttaaaaatatattaaatttaatacttttaaaaattctccagtcaattataattagcatatgaatgatagtaaattaaatgttaaaaactctaattaacatatgaaattgccacttgcgtgatttaaaacttttaaaaatcctctagtcaattataattagcatatgaatgctagtaaattaaatgttaaaaactctaattaacatacatatgaaattgccacctgtgtgatttaaaacttttaaaaattgtaagtatcacatataactagcatatacatgatttaaacttgttgaaacctctaataatcgtgcgtaattaacatatgccatacatcaattgatttatatggataatcaatacatccaaaatagtttacatcgtgtacacaataattacggcacgtactttctcctcactattgttccctccttgtgatcgctgcgtgagtaaggggtgtcttcatttgataggaggatgctagggtcaatcgtcaccgtgaaagggggttgcccatccaactgatcgtaatcctcgtcagtcttgtcctcaactccgacgatttttcttttgcctgggagaaccacttgacgcttaggctcatcaggccctctgcccttctttcctttgctagacatgtccttcacgaaaaagacttgcgttacatcattggcaaggacaaaaggttcgtccgagtatccaaccttgttaaggtcaacagttgtcatcccactgtcatcaatcattacgcctccaccagtcaacctaacccattggcaccggaacagaggaaccttgagaggaccatagtcaagttcccatatgtcctcgatggcaccgtaatacgtggcagttgttccatcgtgtcccatggcatcgacacgaacagcgctgttttggttcgtgctcttcatgtcttgggctctcgtgtagaatgtgtacccattgatctcatatccctggaatgtcgcgatcgacccagacggtcccctcgccaggaaggcaagttgttggttgatcgactcgttacccatgagatgttgtcgtagccacgcggggaaagtatcaatgtgatgccgtgtaatccatgcatcggacttaccgatgttcctggcgtgaactagagccaagtgctcctcgatgtaaggagctaccaatgaagagtgttgcagaacagtgaaatgggctttacggaataaattgttgtctaccgtcgttattgctttccttccgagagttccctttccccgtagtctcccttcatggcgtgattcaggtaccccgattgggcgaaagtcttcgataaattctacgcaaaattcgatgacctcctctgttccataacccttggcgatgcttgcctctggacgagcacggttacgaacatacttcttcagaacgcccatgtacctctcgaaaggaaacatgttgtgtaggtacataggcccgagaatacggatctctttcacaaggtgacaaagcagatgcgtcattatattgaaaaatgaaggtggaaatatcaactcaaaactgacgagacattgcaccacttcattctgaagggcttct

SEQ ID NO: 15733 - DNA, 625 bp, Oryza sativa
  unsure (1)..(625): unsure at all n locations
ccccccgncgttaagacactttgatatacaatcaatagcagccatagcatccccgggggaacctttcgggattccaacctatccgttttcaaacccttttgaataaacattatttaagaaaggcaagggtattgtttttgggagaacggaataaggcttatatacaaagggatagaacaataggttcaggttgttcctttcaatatctccctgtgtactgttgttggaaacaggattgaaaattctagactaccaataggcctactttgcagcaacagtcatcattgtactgaatgctttgaaaaaaagaacaccttaccatgcagatcaaatagagttgtccatatactcacatacggtttgtatgaatgtgcggttgtgccctgtttggactcctcatctgaaggtttttgttcttctcaagagataaaagttcttccataggcagcaaaccatagacgccgagaacagtgttattcttaacaacaaaactaaaacaagaaaatacaaaaatacacgactaatctcttctgttccacatatagaagaaccagaaaaacaaaactatttaagcattttaattattgaaagaatactatttaagtggatagcttcaggactataa

SEQ ID NO: 15734 - DNA, 633 bp, Oryza sativa
  unsure (1)..(633): unsure at all n locations
tgtggtgctgaagttgcaggtgtactactccaaccatcaagagtacttaaattaagtcttggtgtttatgattaaataaatatatatatcgataaacagtttatttttacctttcattgaagccaaaaattcatcaccctgtatatggaatttggtaagactttttccagagagtttttcccacatcgcgatcaactcgttctaagtgaggcagttatcttgtggtcttatgtatattgtcttgttcaaggtgcggggatcatcgattgatttgattgtatatgttcccacatcatcttcatacacaaaaaacactgcatataacattgcagcttaattggttagtatagttgaaattctaaactgagtgtaatattactaaagaatggttttcaatagccctaacttagttcttatggtttcatcaaataatgagtagtgaaaaggatggtgattaatgctttattatttttcacagaaaatcatgccaaaaaaatcttaataggacatgatattttcactagctagctacagatgaaaaacataattatttacaatannnnnnnnnnnnnnnnnnnnnnnnnnnnnnnnnnnnnnnnnnnnngcgatatcgaaatcaaggggggggggggg

SEQ ID NO: 15735 - DNA, 611 bp, Oryza sativa
  unsure (1)..(611): unsure at all n locations
cccgcccnnnatgatanactctttnnnnnnnnnnnnnnnnnnnnnnnnnnnnnnnnnnnnnnnnnnnnnnnnnnnnnnnnnnattacagtgtgaatcaaattaggaggttgaagctaagtggttttgttcaagttaaagtttttctataaaataatctaccaaaaagatatatatttgatttgcagatatgcattgaaaattacacatttgcttggcagttatactgttagtccttatgaattgtttagttatttaagatgaaagggaaaatcattttatatcacaaatttggattacagacctgttttctgttgtttgatccctccaggaaaaccagctgccattcaatatggcactggttcagttgatgggtttttcaacgaggatagtgttacagtaggtgatctggttgtgaaagatcaggtatgcactatatatctcagtcactgactatctctgatcatatactccaaaatattttagcactgttgcttcaccgctttaggaattgcttcaccgctttaggaattcattgaagttataaaggagccaagccatatactttcatggttgcaaaattcgatgacattcttggtctcggatttcagaa

SEQ ID NO: 15736 - DNA, 22445 bp, Oryza sativa
tccatataagaatgttgtggatagccagaaggcttagataaactttaagtaaactcttaatgccttgacctacaatcacattcattaccatttacctcttgggttaatgctttcaatggaacttatatggaagtggatcatagactttcattgtaaggtcaacgttcctccttgtttcatgtactctgttagccatcctgttgcctgttgtcctttgggccaaagcacaaaatatttttttccaactcgccttttctgataacttgacaggaaaaggtttggtcaccactaaagggtttaaaggctcgtttgctgatgctgcatcttctgctaaggtaatgattcacattacacatgttcattttgcagcagatgtttcattgttcacagctcatgccattattttgtcttttgctctagatatttgctgttcttgctggtgttcaaagtttggttgcctgcactttgagacaactacgtgggaaagatgatggtcagtcttgatatctattgtgctcatttctttctctaggaaaccatgtcccaatccttaggatgtactacaatcaaatgtcaagtacaatcattaacttgtgaatccttttatatctgcagttctcaatgctggaattgcaggctgttgcactggccttgccctgagttttccaggtaacgttacaacacacaatgtagctgtgagtgtgaactgtttaaatttacaacttgttcctggatgtcctggctaggactggtattaatatcaacaagagcaattttcattatgctgagttatggaataggtgatctcaaacggtcctgacattgttcattaagaatgcatgcagcccttttgggagttattaatctctggcatccgtttcaagtttgatgattcaatctctacaattttttcattttcatgttcccttagtttgttcatataggcatttgtatctttatctcctatcttgttgataatgcgtcctaaactaatttggtttggatgcacctgaaatatttgtttattttcactacagttgttattatttttgttctatatttcatttttcttgtcttttgctgtattggtgtgcacacagttttgcatttagagttgtccatttatgtcttcatttttgcactggtaaaatgaagcactacaaaatcgacaatttcttgtgagatcatgagtgtttcttatcattattgagaacacacttttgtcctgtgacaaaatagctccttattcgcatgatgataacattactattaacagtgatatcggattatcggttcttcctatataggaaaatgttaacaaaaagatcatagtttcgtacctattcattaactgatggtcctttttcttcttttggttccaggtgcaccacaaacaatgattcagagctgcctgaccttcggaactttctcatacatcatagagatgctcaataaacaggaacctgcacttgctcgtccatctatcactggcacgaaggatctcaaggctggacacagagttcttcctcccttcacgctccctcttccgcaagaggcaatggagggtttttcctcgtttcaaaactttttgtcgaagttccaagggaagtgaaccaagtgaataacctcaagagggatggtgggtagcttcacctctttcctccgttggattttgtccgtgtaaatgcctcgtcttgagtttctcttttgttccacgagtgtaatgttctagggagtgacggattatgtgaatgttgatgtcattcttactcttttgaataacagctctgtgaatccttatcgtgcttcagctagtgttaatttgccacttgcttcaaacggtttctttactgactcgttgagtacatgatttgattattcgtggtttgttcgcagtagatgttgtcgacactgtcagcgagtttttgggaaaacattttgtgaaagttgaattacggcatagccgaaggaataacagaatcgtttcacactttcgtaacaaaggtcttcttatcatgtttcagacgatggaggcaaggctgatcaaagtgatcaagcacataaacgcatttttttaccatgtttcactccataagcgtctgagattatcacaagtcacgtctagtagtttgatggtacactagtgacaatcagttcgtgcagacagagctcatacttgactacttgagcgattacaggcgaaagtgtgaaacgcatgtgatgtgggctgggaggaggagaatatatactaatgggccgtatcctgatttgggctgcgtcggaaggtgcagcccacgcgcgccgtaccgcgcgggtggcgctgctacccactttagtccgttggatggggatccgatggtttgcgcggtggcgttgcgggggatgtttagtaccacatcggaaaccgaaagacgatggaaccagcttataaacccgcgcgctgtagtcagcttgtctcttcggagacatccgataaaattggaacgatacagagaagattagcatggcccctgcgcaaggatgacacgcacaaatcgagaaatggtccaaatttttttgcgaattctggccaggtccttgcgcgttcggtattttgttcgttattttcgttgcacatatgcccctgggctctgatttcttacatccaggtccttcaagctttgcactttttccctcaaagtttccagatatcgaattatggccaggtccttgcgttcttcattttcgttgcacatatgcccctgggctctgatttcttacatccaggtccttccagctttgcactttttccctcagtttccagataccttacagatacgcctctccttttgcaccctcatctttttgcaacatcctacaggcaggtccatgtcggttcttgatgcgatcttcaggcttcttactgttgtacacaattcactatttctttgcaacaagatatatacggctgtgccttttgtaaccccttctagtttttttaaacaagtccttgtgggaatatggagttttcacttgtaactttctggtttttcgttctccatgattgaacaatttgttcgtttatgtttgccagaagtactggcaaatctccattcaagtgtgcaatcatgtgattggggtgatttttcctcctaagtttttgtttatttccatcggagcataacgccatttttccttgttggatactctcaattgaaatcctctactgttcttatgggagagtgactatcctagttccattttattctttatcatttatcaatttataacaaacaacatctctagaacatattttacctgttttttagaggcatttaactttttgccacttttaagatgtggctattaaggatttgccactcgtagcttagtggcaaatccttaattgttactggtaagtgacaaatagttaattattacccttttctatactaagatataaaaaggaagaatttacccttccaatccaacatgtgtaatctctgccgtccatctgcatctgtattgccctgatctgatccctaccgtccaccgcgatttaaccctctccatctccaccgcacgaatactacgcctccgtgcgaacaccgcacgaagatgttcgcacgaagactgcacctttgcagtactcgctcctcctctcacctcctcctcctcgcgtgtattgctgccgtcggagtgagttcttctctagccgccgccatacccacactccaccgctgcccccaccggagctgaggtcttccccagctgccactggagctgtggctgaccctttccgccaccgccggagccgtggtcgtcccttccgccgctgccgaagccgaggtcatccccagccgtcgacggagctatgactccaccactgcactttccccacgctatgattctgccgccgcgctacttgccgttgcacgtccttgctccgtccgactcctcgcttgtccccgccaccgctgcgctacaccgcatcctgccctcgccgacgtcgtggtcattcctgacggcaaggtccttccccaccaccgacgcacttcaccgcaggcgccgtggtggttcctgacggcgaggtccttccccaccgccgatgcaatccagcacaacatgcccccgccgacgtcgtggtggttcccgacagcgacttacttccccaccaccaccgcactctaccgtagcctgccccaccagcgtcgtggtggttcccccttctaccggagtcccatttgggactgcccctgatggcaccgtggtggaatgcccttccgtcggacccgctgtggaattcctcgttcgtgggtgcgcaatcgtcggcctcaaagccacttctttttagtactcataaaaggagagaaaacctgaaaagtagaatgcaagttcttgcgccaaattcatctgtgtgctcttcgttctactttcgtgcgattgtgtattcgctagggaaatttcactccagggcaccgggatcaaggatccttggttacactcaggagatcacaggtttgtaagatcgccagcaagaactaagccaccaaaggggagtgaatggttgaggtactcacaaatcaaaacttttagcggaattaaaagttactctcgaaacgatgaaggtcggtctgaccaaagtagatgcaccggtttgaccgcacggagacctccggtctgattggcgaagtagcttcggtctacccgcacatcgcgctgatgtcgcttgtcgttgccgccattctaaccgccttaaagccaccggtctgactgccgcaatgctgtcggtgtgaccgccgaacccaagcatatacaaattgaagatatttcaaaagtagattgaacttacttctactcatgtttacaaagtgcaacaacaacactcctctcacaaatctcgactaaactcaaaatactaacttttttctaaactcaacttgcacaaaatcgatgccgggaagtctcaaccccctctctatttatactcgaagtaagcagtctaaaaccacaaacccaacttgtacaagaagtcctaatctcctaggaaaccttcccatacaataaacaaactttataaactacaatcataccaaatttggactccgcatccatacgcacacaatatcttcatggtataccatatggaatcttcaccaaccatgatatcctgatcgtctggacatcatcttcttccaagttgactcccgatcaatcactagtaacactctccccaggcattaagagacacctacatatgaatcaaacaagatacaatatctgagcacaagtcctctccaacttgacttaacattagttcacaacagcattacatatgctgtcggtgtgaccgccgaacccaagcatatacaaattgaagatatttcaaaagtagattgaacttacttctactcatgtttacaaagtgcaacaacaacactcctctcacaaatctcgactaaactcaaaatactaacttttttctaaactcaacttgcacaaaatcgatgccgggaagtctcaaccccctctctatttatactcgaagtaagcagtctaaaaccacaaacccaacttgtacaagaagtcctaatctcctaggaaaccttcccatacaataaacaaactttataaactacaatcataccaaatttggactccgcatccatacgcacacaatatcttcatggtataccatatggaatcttcaccaaccatgatatcctgatcgtctggacatcatcttcttccaagttgactcccgatcaatcactagtaacactctccccaggcattaagagacacctacatatgaatcaaacaagatacaatatctgagcacaagtcctctccaacttgacttaacattagttcacaacagcattacatatgcataatattcatctagaattcataaacataaattaatcacaagtataaaaaaacaatccgaaaccagaaccgacacagagccgtccgatcagaccatcgggctggccgatttgactgcacaacacacgtcggtctgaccagacccaaactaacaaaactcattgttcatcgtcaggtcaattcatcatcagaaaatcttcaaaaccaattatcttcaaaatcaattgttcatctcttctctattattataaaaattgaaaatgtttccgccaatactttgtacgttgtccgtatttgagttggttattaaattcgttcacttttgaaaatgcaccaggagtcgtataagaaatccttttaaaacactcacagctaacttggaacgagtaccgctaattgctttagaattcttgtcaggccctaagaaagcaacgtacagtatatgaccataatcccaacaaaggttctaaattagatatcaatactatcaaaatagaaatctcatatactttttagataaaaaaaataacaataatacgattaaaatagccttcacccgtttcaacgcacgagcctttttttctaatcacaaaataataatcaaaggtcatcttcgcaaatggtgatggatgcacactccgctttcatgagagagagagagagagagagagagagagagagagagagagagagagagagagagagagagagcgcgtgtgccagcaccaagaataacaccacgacgaccagcgtcagcaggcggtatagtgtagtactcgtacatcaccggcgactatgttgggcgagtaccagttccaggacaaactcgtgttgctgtaatgctgcccacacgaccggggacgggaagatgcccatgatgcaaaaggagcagttgtaagcactgacaatggaggatagaagaagtaacacgtggggctgaacaaactagacataattttaaccctcattttataagaaactcagtgagggcttacatagttctaacgatgcttgtgggggcttgagcccctccgtgcccatagtagatccgcccttggcgtcggggttcgcctggccatctggatcgttcgagaggaggtggggagaggtcgatgtgtgcaagccgggatgggttcgaatggaacaagcaagtcagagggagccgatcgagaggagcgatgctgattcgcaactacagatgaccaaatgagccacccggcccgtgcacgaccaggcctaggcccgatataagttgggcaagcacaacccgcttaatgaccgggtcaggttgtgcccgcccacgggcacaacctacggcctaggcacagtcctataagaatcggaccatgctgggccggcacgtaggcacgaccaacacactgtgctcgtccttagaataggtttattttgcattcctcctctttgggttgtgccctatatatggcttgaataagtctagattgcctccctcctctttggactgccttatacacatctgaataagtctattcgcctccctcgtgtgtcgtgccatgcgaagccagcccactgtgccaaggtagcgcccccaggctcagcccaactgtcaggccgggccggcataggcttgacaccaattaggccatgtcgtgcctggccggaccaaaaggtcgtgccatgggacgggatgtcgggccctggaccttttggccattatattcgcaactgcgtcaagtcaagcggagcgaggaatcctatctcacacagacgcacgagcaaactaactcgcacgtgatttggatccactaggccccactctagcctacagctctacactgcagtagcacatttctttttttcctttctttcgcgtgattttttttcacacgtgcttatctccctctccgtccttcgtttttgcgtgcaattttttttctcatgtgatttttcctttttctcacgcgattttttctctttttttcgcaagatagctaggtaagtttcaacctcattttattttgaaaatttttgactcaaaatttaaaaacttctaacacaaaattgaaaactttcaattagaaatttgaaactcttaactgaaaatttaaaacttttgatcaagatttgaaaactttcaactaagatttaaaatattcaactcatgatttgaaaactttcagcttaaactttaaaatttattaacttgaaatttaaatatgaaagataaattttgaaaattttcaactcatatttgaaaagtttcaacttgatatttgaaaactttcaatccgagaattgaaaacttttaactcgagatttgaaaattttcaagtcaagatttaaaaattttcaacacaaaacatttgaaaaccatgtgttgaagattaaaaaaatcgtgaaaggaaagaaaagaaaaaaaaatcgtgaaaagaaagaaaaggaaaaaaatcacttggggggagggggccagctggcgcacgcgttgccgcgccaatttgccacacccgagcggagcaccccgtcggatccgtacgtaatacacgcgtcgtccatcgagagcggtgctgcagaggtggcgtgctgccgctgggatgcatcaattttttttatttacattttgaggcttttcttttcatcgtccgctctgttccattcgccgccgtcctccattccgttcttcctcagctcccgtcggtggtgcttgaaagagtccgttttggtgctggccttcttcaggtcgtcaagttcgccttggcgcgcggtgcttctcttcttcatcgtcaggtggttccctgcgctctcttcatgtcgtcaaattcgtgtcggtgtctcgtgctgctctccaacttgctcagatagagatagttcggtgctggttttcttcaggtcgtcaagttcatctttgtggtacgtgtttctcttcttcaggccgtcaagtgtgtcttagtggaagttcaagttcgtcttggtggttctctgctcttttccggtcatcttggtgtctcggtgctgcccttcaacttcattgccaggttcggtgctggtcttcttgaggtcgttaagagttaagttcatcttggttgtgctctttttcagttccgagagttctcggtggtcgtgtgtcgtgaagcgtcaggtcccattgttggaacttggaagctccttgaagaagaacgtgtcccggttttgaggtagaagaaacaaaagctaagcctgcaaaacatggcggcgagggtgagctgggaaatggccgcccggcgtcggcgtgtggcggaggatattgctccgccctacgccgtgctgttgttcgtcttgctgttggcgtgctgcgtgcggcgccgccgcctcctcctcatgccggaggatttattccggatcggtaaccaatttactggtataataaaacatccggattagttccacaactcttaactagtggattgattctcggtctattattgtccatatcatgcggtccggaataaatcccgatctctcgttgtatctataataaatttcttactattcttgtcactcctagccaggattgaatcatcatgtaaccgaacaagtcctaaggtggtcgtctcctttttaggcggagagggatgacacatatctggttttgccacaaagtgcctcagttttgtaagttgagggatgacacatattttttcggttctggataattttgtaatttggaaacaagatgagggaccttatgtatactttttacacttttatgtcgggttttgtaggcctcctctctcttttctggtcgaagccaaattcagggagatgggcctcacagcccacgttcacgtttattttcttctcaaattgtttttttttatctatatgtactaactttattttcttctcaaatccggcctctacaccaacaaggctgtacacaaacacaggaggtccttcagtacaagtttgaactttacccaagatcacaactgaaagggaacactaaggctctaacccgaaacaaaacaacaacgaagtgcatcgaccaaaggacatacacggctgcaaacaagaaaagccagcaaactatacccctcaattattttcctcatgttccaacccttagcaaagaagtgcacaacggtagtctccaacagtttgcaaccttctttcatcaagatgctttctccctcttttaataaaacagactactgtctcattcaatatattttcctgaaaatgacatttaattaacgaagttgatttttatgccattgagacaatgccatttctagagatccacatcgcccaacatatagctgcaatccaaataaagagatttagtattttagcctagattaatccaaacctttgaactaaactccaaacaagttagcaaccttatgaggcggtttgaaccagaaaggtaatgaaaatgacacatttgaaacacatctaaccacatatatggcaatcaatgaaaagatgttgtatcgtttcatcttgattacaaaagagcacccaacatcgtcgccattccatctccgttttgctaggttatcctttgttaaataccactagaggattttaatttttaacggaattctcagcttccaaaagtggattgatgataaaaatgggatcttcagttgactgcttcttgtttctcttgttgcatctggcgctccatcacatttggcttcttttatagtaacagagaagggaaggaccagaacagaaaaatgaaaaaaaaaagcattgcaatgttatactttgccataccttttatctaaaaactctggctacaaaacatcgcgtggttcgctgatgggccggtctgtgttgcttcagcgatcagcaccgcaagtaaataaagagagccgccggaatggctcaacgactgatacaacacgagctgcatgaatgcacggcgtaactaatttggagccaaattagtcatgggattagctttccggccggatagaacatagtacagaaacgagggtaagcctcactacaccggattaggtcacctgtgatgggtcctaaccatcacctttgaagggccggtttgggcctagtcagagactaatggtcactgttgagtctcagtcacctttgatggtgcccgttagaggtatcaatcacctctgatgggcatgtatttcatgcccgttagaggtatcagtcacctctgatgggcatgtatttccgagcccgtcacaggtgatgatgaccacaccgcagtccgtggttgcaaccccacaggtgacttatctttgaggctgtgacgggtgcattatattcggcctgtcataggtatatcatctttgacggggtatagtatcaaagctgtcacagatgaggtcacctgtgatggattttgttatgacccatcagtgatgaggtgaaattcgaaaaaaaaaacaaattcagaatattagctagcctcaggatttactagccacgccctctgaaaaacagaaacatcacaaatatatgccaggcaccccaaatatcacatattccccattttagcacatatgcatcttaaaatttacatcattcacatatgcagttcaaatgccacatatttgcacaacacattcataccacattaaagccacaaacttgcacaatttcttgccttgcacatgaaaccgcaaacttaccaaagtttcttgtatcctattccttttgaacctccacaatgacctgtcattaaaaaaaaggagaaaacaattgaacggtacaaagtaattcgtagtagatcaatggaacactggagaaatcgtcggagcttcttgaagaagattgcgtggcttgagcggtgaaaatggaagtaacggtgtgaaattttttagggtggtggttgttatttgtaaacatgtgcttaatagtcgaaaggataacactagcaagttgcggactgaaagagataattccactgtgttatataacacatcggaattgggggagcatgtgttaacagtgaaatttggcaagatagactcggatttggagttggatatcgaaacggaatcaaaggagattgatttttgccaaaacagactacgcatcgacttgaaacagagtcggaatctggttgagccgatctggtgggaagccgatacagcctaacttgggctcggtttgggcctcaattgagataactatcattgccgtttagagatagatctcatctaaggcaattgtatctattaattaggatatttatcttggtttgggcctcaattgagataactcttttcttttactttccaacgagttcttgcttcaagtcggggtatcggctgcgatctctcgacaagtggtaacttgtcttgaaggcttgcgctatcggggctattatatcattttaatgtatcaatcattttattgtggtcatttttatcacatatcttagttaatatagtcttagtatctcaatttagtcatatcagttgattctcgttttagggtttttgtcggtattggcttaaatcgtcttactagattagattagctaaggttctaccatcccgaaaagttgttaactccttgattgttttgactttatgtttctctgcgtattttgtgatgcatcatccctagccgtgcttagaatcatagaaactaatccggagttaatcataattaaggatagtatcggagtttcagccgatcttacctaatatacatgacaatgcatgtttcatgatctgtttatgaatatttgccacttatatagatagattgatttatataaatgcatcaagttagattgatctctcttaaactttatatctggtgatcgattgttatttggtacgtttatatagattgatttctttatataagtctgtattagagtattagtcaatacattatttgtttttgctctaagtactggtctattgactattttttataatactgtcttaaaatgattgacaaaaaccaaagagatggtattacaaccgttagggcatatttagggtttgcactttatctattcatctaaaagccacaaccgatttggtttaactgcatcggctgggtcctgacgatacgtcatcggctctatcggccgatcggctatcgttcatctaattatgttttctgttttatcttgctgcttgccgatctcctgcaaaagggcgtgatcgatagtcactcggttcatcctttttgcgcccaggagcttgaaacgacgaaccatatcctcctacactgtgtgttcatacgtcaagtctggcgcctcgtcctgtcttctggttggcgttggctcgccccttcccatggctgctctctttaggtctggtggccgtcttctagggcctgtctaccaaagtgtcttcgcaagggctttgacactctggtcctcctggtatcctggcagctgtggaaggagcggaaagccagtgtttttgattcgtccctttcgccggtctcggtggttctggagtccatcctttagaagaatcgtctttggtctcttgctagtgccgcttcatttggggacctgttgggaacatagggcagcagttactccaccacctctctccctctttataggagcagcattttcagcttgtttttcctcccttcgcggtcctttaccttgcatgcggcaagggtctatctgatttattgcgttgtgaaactaaaactctattttcttctaatatactgacgcatagtatttttgtgcattcatgaaaagaaatctgttttaaggagcgatgcaatattgcaatggtgtgtcaagattatgttccgattaacatttgattagaagtaatcatctgaaacctaatcacattgggcattcaggcatgcaaattctcaaatttgttaagtgtgggcactatatattttaactttcgttcaattcatagcgaacgaaaatcgcgcgcacttccgatggaaaatcccgtgagaaaaaaaaatcaacgcttctacattgatacggtaccatgcaaaaatcgtgcaaaaaatcagcgttccccaacctttggacgcacaaaaaatcatcgtttaaatggggaaaaaaagggcagggttccacgcctagagagagatcaaataatatggcagtaggggtagctcttctagcgcttgttcctctctacctttttgatgaagtttctggtgcggtccagtgtgatagcctggccaattagggcaagtattataatgtttcatatgctgcccctaaatgtgccatattggattgagtgatgaggtagaggagataagtgaggagagaaatggtaaaccacccctaaatgaagaggcaacctccacacaaattttaagaggggtgtgagagtataagagacattggtatttgtgtactagaggtgacatagtgtatagattgcctcttaatttatgagtaaatgatgtggataaatttagatgtggtagtcacatctaccataacacttgcccttaggataaggtcagtatagctcatgaaggtgtgtgcatatgtttagtaccaccttattagtttagtaagggtaaaatcaacttataagtgctcttcctttcaaacatatcacttccgggttaacccttttacacgaagcgaggacgaaagtgtatttgatccagaataggatatgcatatcccattccaaaatgatctattaaaaattatataaagagctattaaaaatcaagcagaccaggtactactgtctactactataccaagcagaccgatgcaaaaacatactactaccaccaagcagatcgatgcagctacggaaggggatttgcgtgtcaaacatacgacgactgctaccaagcaccgtgtcattttcaatgtctagatggtgtttgaatctcctgaagataaaaattatgtattttacgtaaaataaggtgataataacgtgtgattaattgagttttaattattacaaacttagaaaatagattaatctgatattttagagcaactttcatatagaaagttttttatgaaacatacagtttagcagtttaaaaagcgtgccacaaatatccaaaatttcatccacttcttgcagtggaaacgaacaggattttccttggaaaaaatactactagcattacctagttggggggaaccatttttcattgcaaaaaatatggtggtaggggaggctgttatggcgctcgttccgctctacgccgagctgctgctcggctacgcggtggcgcgccggagcggccgggtcacgccggagctgcgcgacttggcggtctggctggtgggcaacgtcgccaaccccttgtccatcttgcacctcaccgtgagggccgtctacagaaatttaaggcctcggagcgaaatacaaatcaaagctctaaattttaaaaaaattcatatatctaatttaatatagagggcataatttcagttttagtatgtattatttcgtgcaatgtttaaaaatatatcaaatattaatgctaaaagagtaggtatcactgctgttctaccgaaaatcatcatctgtatagtgttgtttaaataaaatctttaattgttcataattaataatgttgaagacatattttcagcacccgaatcatactttatctttctagaaggcatgatgaggtgattgacgaaacaaatctattatttttttatcaacaaaagcaaagacatgtgtttgattcaatcaggaatccattcaattgtttgttcactcacaatactgtaacagtagttcgtcaaattagtaaattacctgatgaagtgattagtgaagccggcaagcgcccgctagaagttgctttaggctcggcctccacgctcgcctccggctgtcctcctcgctgatggttgccacgatttgcaccaccaccgccgcccgctcgatcgacgctctgccagctgcgcggcgcctcgcgccctcgccgtctcgatgcacgcacgcacaatacctgggaattataggatggactgctccttcattgacctgcgacacctcgatctaactgacgcatgcgatctccaatcgtttgacgcttgcgatgccttggctttgcttctaccctagctctcattagctgatcgccaggcatgtggcccaccctagatggtggtgtggggcccccaaaagttgggggccctgtgcggtcgtcgttttcgcactcccccgtcgacggccctgcccaccatgagtatcgtccacctctccgacctcgactaccatgtcctccaatgctcaactcatccggtccacgagtatcactcgtcgacatatacttttatcgtatatataaattactttttgatttaactaaattatctcatatacatacataatgctctgagttaattacttttattattatttttagtcaattccattatttgtattgattaaatttcatttctgacaaacccatcactggtggagaagtggttttaaaccacggttcacaacccctagtagtcctgttttgtaaccgggactactaatccgagactaaagatgcatttctttagtcccgagtgaaataacgggaactaaagatggatctttagtcccgcttagtgttaccactaatcgggagtagatattttttttttcctttttttcattaattttaactgcttgcatattgatttcactccatccccaaatcacgaaaaccccaaatcacctccgaatcatagatcaaatgcatcacaaattctaaaagaaacatcacacatacatcacatattcacatcaaaaattcccaaaaacaaattcaacaaaaatatacaaaaacaaattgtaaatccgcccatccgccatcgctccaccaccgcccgccgcctccccagcccagcacgtgccccccaaccccgcccccgcccccgcgcgcgtgccgctttcgctcgctcctcgctgctgcttcaagaaaaggagaggataagagagagagagagacaggaggaaagggaggaggaggaagttaaagatgaggaggagtttgcgatcgaggaggagaggataagtgtgagggattatatacgacgcgttaatttttagtcccagttgataatatcaaccgggtctaaagataataggggacttggctagttcatgtaagaaatactgggaagctgcaacctacgtcttggacgagcaagtaagacggctcccaatggaggtcaagttcatcatccaagttcttcgaaacgtaaacatactggctgctcttgttggtattgtattggctgttttcaaatccactactaaccagaggtacgtacgttcgaatgcatgcattcatgaagaacatctatcataatgaattaattaatgataggatctatcactgtctgtgcctctctctgaattcaattataacaattagagcacccgcaatggtaaagtaaggtgctatctataaaatatgtacatctcagcaatagactagattaatattaaccatctcagtagtatgtctatatgggtatctatagctctctaatacattgcctcgtttttctctatagactatctccaggttagtagatagctttgctctctctttttatttaatctctttcaagtaggaaaatatgctgacatggatctcttatagagagcctatagataaccattgtgggtgcccttagtcgctgaagttgaatgagattaacaattttattattttgttcggataaggcgttcaggttaattcaagatttcaagtagttgagagaaaccatatatacgtatgttttcccctcgcatatggattcatctatgtacgagttattcagccgtagtatctgacgactattgtatctccctccccccccccccctttttttttaaaaagtctttttcacgtataattagcattaatcagttaagctggcgagatttgtcggtccccaaatttttgtcgtttgttgaggttgaatttgtagacggtccacgaagaccaaaactcgagaagccaaaccctatcccctcacataggctcgatcagcccggaggacaggattctcctggattttacttatctttatgatcatcgatctatttttggtagaattattcaaactgaattttgaattttcattcaaattcggtgaaattccgctgtttgtcttcttcttcttcttctttccttttttaagctggaaccttgctccacagcagggttcaaaattttggatttgttctatcggacctcccgatgtgatattatttcggccgaaatttttattttttttcattttttcgtgaatttagtaatattttgatcaaattttattcaataattcatataatttcagaccaaaaattcggtatttcggccaccccgatacaaatgaccaaaccgaaagattaaaccctgcttcgtagtgattccaaaggagggcagccgcacggaccctaaatcaataataaaactataatatgagtggtgagatggcactaaatatcaagtgccaaaatgaaatatgtgctgactgatttgtactcccttgtgtcttttttacttgtctagtacaactgagagagtatcaaatgcacatgttgttaccattctctttgtctaatcatatatctataagaattagtagaaatataactaaaatgccaaatttaacaaactcatttccacatatcaaatcttattatttttttcgatattttagctggtaaagatttttgaggtttgcatgtattctaatacaacaccgaaaaagaacagaggggttatgcattgtaaaagttgtgccttgaatggtttacgctgttctacacggtacatgtgacatgttcaagagcttgggagtgcaactcttgcagtgtggatggcctcatggcaatccagtaggtctgaacagaatcaagcaatattttcattgtcattaattaagcaatagatgccattgtttccatgaaaagtagctgcactggtctgtcactgtcattgttaagttgtccgttagcataattcacctctcaagaaaacccctacattttgatcctgaattcattgctgacatgtcattgtcctgattgacaggctaaatattatactaggctacttggagtctttgatccactggtggagaaaccatctttcgtcggtcggccaaattccacaatagtcccggatgcaataaaaaccgaggctaaagatgatttttagtcccggttcaaaagggtaatgggcatatttgatctttagtcccggttggtcaccatctttagtcccggttcaaatgctgtcagggcctgtcaggccccccgggatctttagtgatcgtaactttagtcccggttggtagatctcggggatctttagccccggttggtaacaccaaccggaattaaagtcccacccctatatatatatgtcttcttcctcctccagctgcccgagcaagcttcaaaatttcttcaaaaaagagggtaggtcatgccaaaatttctagtgaatttattttggtaattacatacaaatcggaggtgcctaaaaagtttgcaacttcatcctccaatgttttttttgtcatattacatttgcagttatgttttgcacacttttttgtctctaaaatttagttgtaagttgatgagagagaaaatttgtgtgggttagaaagaatatatacaaatttagttgatttgataaagaaggttttataaaatagttgagaaggaaaactatagtgaaagttaatcttgaatactagaaaacaaactaaaatgaaaattaaaagaagtaaaacacattaaaattagtttaaaactttagaaatagtaaataagaattatttggtgtaatattttatgatttttgtatgaataaagatgtgtcattattgtatgactgttgaaacagtttgtaattatcttataattattgtatgactgtcattattgtaagaataattatttgtgtacgatttttttcgactcatgtagatggatcggcaatggatgtacgctgaccggcggtccaaagagtttattgacggcgtgcactattttttgagagtggccgaagctaataggcaaaggggttttatttgttgtccatgcaataagtgtaagaatcagaaggagtattctgcatccaggactattcatttccacttgtttgagtcggggtttatgccaagctataattgttggacatcccacggagagcaaggtattgaaatggaagaagatgaagtggaagacgacaatattccggactttgctcagtacgttggatttgaaggaaatcaaacgggcgaggaggaaagggatgctgatggtaacgacgttgcggatgatcttggtcagatgttgcaggatgccaaggaggactgcgaaagtgaaaagggggcccataaattggacaagatgttagaggaccacagaacttcgttatacccaggttgcgagcaggggcacaaaaagttggataccactctggagttcttgcaatggaaggcaaaaaatggggttagtgacaaggcatttggcgatttattgaaactcgtcaagaacattcttccggagggaaacaaattgccccagacaacgtacgaggctaagaagatagtctgcccgctaggactggaagttcagaagattcacgcatgtccgaatgattgtatcctatatcgcggtgaggagtatgagaacctagaagcatgccctgtttgcaaagcactacgatacaagattagacgagacgatccaggagaagttgacgggcagctaacaaagaagagaattcctgctaaggtgatgtggtatttccctataataccacggctaaggtgtttgttcaggaataaggggaatgctagaatgatgcgatggcacgctgaagagcgtcaacaggacgggatgctgagacaccccgccgatggttcgcagtggcgaaacatcgacagaaaatttaaagaatttggaaaggacgcacgaaacatacggtttgatttgagtacggatggcatgaatccttttggagagatgagcagcggccatagcacttggcccgttacgatgtgtatctataaccttcccccctggctatgcatgaagaggaagtacataatgatgccgattattattcaaggccccaagcaacctggtaacgacatcgatgtgtacctaagaccactggtcgaagatcttaaactgttgtggaagaaggaaggtgtccccgtgtgggacaacgacaaacaggaggagtttaacctacgagcgctgctgttcgtaaccagcaacgattggcctgcacttagcaacctatccggacagtccaacaaggggtacaaggcttgcactcactgtatggatgaaacagaaagtacgtatcttaagcactgtaggaaggttgtttacatgggtcatcgtcgattccttgtagcaaaccatccggtacggaagaaaggcaagcacttcgaacataaggctaaccaccgtacgaagcctaaacatcgcagcgggaaaacagtgtttgctatggttaaagatcttaaagtagtgttcggaaaggggcctggaagccagcctatagagagcgaagatggtcacgcggcgatgtggaaaaagaactctatattttgggagttacccaattgggaattcttggacgtacgccacgcaatcgacgtgatgcacctcactaagaacctttgcgtaaaccttcttggcttcctaggtgtacacggaaagtcgaaagatacactggaagcacgtaatgatctgaagcatatggaagaacgcggcgaccttcagccggaaccaaaggagaaaggaagccattacttgagtccagccagctacactcttagtatggcagagaaggaaagtatgtttgaatgcttggagagcataaaggtaccgtctggataccccacgaatatcaagcgaataataagcacgaaggaaaagaagttcacaaacctaaagtctcatgactgtcacgtgttgatgacacaactgctaccagttgtaataaggggtatccttccagacaatgtccgggcaacgataacaaagatatgtgcattcatgaacgcaatttcgcagaaggtcatcgatccggatagattagaagcccttcagaatgatgtggtgcaatgtctcgtcagttttgagttgatatttccaccttcatttttcaatataatgacgcatctgctttgtcaccttgtgaaagagatcagtattctcgggcctgtgtacctacacaacatgtcctttcgagaggtacatgggcattctgaagaagtatgttcgtaaccgtgctcgtccagaggcaagcatcgccaagggttatggaacagaggaggtcatcgaattttgcgtagaatttatcgaagatcttcgctcaatcggggtacctgaatcacgccatgaaggaagactacggggaaagggaactctcggaaggaaagcaataatgacggtagacaacgatttattccgtaaagcccatttcacggttctgcaacaatcttcattggtagctccttatgtcgaggagcacttggctctagttcgcgccaggaacatcggtaagtccgatgcatggattacatggcatcacattgatactttccccgcgtggctacgacaacattt

SEQ ID NO: 15737 - DNA, 2448 bp, Oryza sativa
aatgggttaggttgactggtggaggcgtaatgattgatgacagtgggatgacaacggttgaccttaacaaggttggatactcggacgaaccttttgtccttgccaatgatgtaacgcaagtctttttcgtgaaggacatgtctagcaaaggaaagaagggcagatggcctaacgagcctaagtgtcatgtggttctcccaagcaaaagaaaaatcgtcggagttgaggacaagactgacgaggattacgatcagttggatgggcaaccccctttcacggtgacgattgaccctagcatcctcctatcaaatgaagacaccccttactcacgtagcgatcacaagaagggaacaatagtgaggagaaagtacgtgcggtcaaccgtcaccgccgatgtattgccgtaattattgtgtacacgatgtaaactattttggatgtattgattatccatataaatcaattgatgtatggcatatgttaattacgcacgattattagaggttttaacaagtttaaatcatgtatatgctagttatatgcgatacttacaatttttaaaagttttaaatcacgcaggtggcaatttcatatgttaattagagtttttaacatttaatttactatcattcatatgcatgtggcatttacatatgctaattataattgactagagaatttttaaaagtttcaaatcatgcatgtggcatttacatatgttaattagagtttttcacaatttaatttactatcattcatatgctaattatatatgactattcgaatttttaaaatttttaaatcatgcatgtggtatttacatatgttaattagagtttttaacaattaatttaatataattcctatgctaagtatatatgatgattacaatttttattaattttaaatcatgccgtatgtatatacatatgttaattagagtttttacgaatttaataatatcattcatatgctaagtatatatgattattagaatttttattaattttaaatcatatatttgcttattacgatttatccacttaatttattacagacaacagtaatttttcgaagtaattgtcattaatctttgtactttaaataattgtaatgcattatcttctattttagaaacacatatgtaatggaaaataatattcagtgcgcttatcagtagtcccggttcttaaccctaaccgggtttaaaaagaatttgaaaatagcgggaaaagatctttagtctcggttgatgagaacaaccgggactaaacaaccgggactaaatctttagtcccggttgttctcatcaaccgggactaaagatctaggggtatatatattcccgatgcgcgccctcgtcttctccactaacacttagaagtttttgcccgatcaatctctctcggcttctccttcgccgccactgcctagggcatccccgcgccgacgccgccgccgtatctcgccgtcgtctcgcgctcgtcgtcgtcgccgccgcctccgcctcctccgccgccgccgcatctttggggtgagagccgccgccgtgcagcgcccgttccgtcatggcgcctagcgggaaaactatctcttaaaaaccctaattgcgaaatctggatctttgcttgttgtctaacgtctgggccatctcagatctcgaatccccgatctatcgtcaagttcaatcccgaatccaaatccttcccaaatcaattccctctgcaaaagtctattttgcctccctcgggttcgatgggccgaatttctctcggaccatctgtgcctacctccccatgtgtatctccctctctctctctctctccccgctctgcccgtgagccgcgccgagccctccctctccactctcgctgccgttcccgccgacgccgccaaatcgtcgccgcgcgccgttgcttcccgcgcgcacgcgccatggtggccgaccggccagtcgccgccgccgtcagatacaacattaagcaacacttgacagatgatgggatcagccaggcctgggtggccgtttgaaagctgttggccggatgtcaaccttgatcaattcaaaagactgataccttgcacatactccgaccggacgagacgcactgtctcatccgtgtcgtttgagaagcactcacttagttgtttcagaaaagagtttaaataaaatcaattgcaaaaacaacagcctttccgttgaagcctgcattaaacacttatttcccacggcttgctgagtactcctgtactcacccttgctctatataaataatcccccccagttgctgaagaagatgaagcggatcccgctgacgaggagttcttccaggagcaagtcggctacgatgagttttcgggtttcggcctagttcccaagtcgcgcctgtgatgtttggtccaagtcttggcttccgcttcccttttgtaatgccagtgggagctcgg

SEQ ID NO: 15738 - DNA, 16142 bp, Oryza sativa
  unsure (1)..(16142): unsure at all n locations
agcggntttgttgtgatacaacnnnnnnnnnnnnnnnnnnnnnnnnnnnnnnnnnnnnnnnnnnnnnnnnnnnnnnnnnnnnnntgagaacgagcgaacgaacgtgaacgataacgtgaacgagcgaacgaacgtgaacgtgaaatgcaattataggcagatgaatgaacgtgaacgaacaaacgtaggtgaatgaaacgtgaccttaacgagaacgcgaacgtgaacgatatcgtgaacgaaacgtgaacgtcaaatgcaatatatgttacttcgcgtttatcctaatacatctttttgtatcttgcagaaaagacgttgtcagagtcatctctcaagccggagtggtagagctagccctcgaaggaattcgcgcaggcaagtgacgtaattatatatatgattgttatatttgtaatgcaattaagattattagatttgtaattagacttagcatataagattgtgtagtgttctaatatacgacagttacacttagcatacatgactatttgagttttagtataagattatttaagttttaatacaagattattatatttgtaattagacttagtatataattattgactagctagggtcctataatatatgtcacctagacttagcatatatcactatttgagttttagtataagattattagatttgtaattagacttagcatgtaagattgtgtagggttctaatatacgacagttacacttagcatacatgactattttagtcttagcatataaaattatttgagttttgatataagattattatatttgtaattagacttagtatataattattgactagctagggtcctataatatacgtcatctagacttagcatatatcactatttgagttttagtataagattattagatttgtaattagacttagcatgtaagattgtgtagggttctaatatacgacagttacacttagcatacatgactattttagtcttagcatataagattatttgagttttaatataagattgttaaaacataaatgtctcatgacttagcagatgtttcctgtatgaacagatggctaatcgcgatgaggaacaaatattgtacgatacaatcgcggagggaagtagccagtactggaacgaagaagaggggaacgaggatccaaaccagtatttgaacgaggaagggaacgtggagagggatgcagaggggaaccaggaggggcacgtggaaagggatgtggaggggaaccaggaggagaaggctagtggaagtcaaccctccgttggacagaagagggcacgcgggtaacgaggtaccacgaagaagcttgagggtcggcacatcataacggaagtggaagaagatggacgacctagtgccccggcagaagccgccaagaactatgtatgtcacagtggttgggttgtgcgggataacgtgcctgtcagtacggtgtactggcaaagaacaagggcacgcagagatcatgagagctttgtcccagattcgaagaaagagatgctgtggaccacaatgctcgagacattcacccttcccgcgggtagagaggacaaagtgaaaaggtggactctgaagaaaatggcagaacagtttcagagcttcaagggagatctgtaccagaaatatatcctgaaggggcagacaccgaacttcgacacattcccaaagctaagggatcactgggacgagttcgttgcatataagacaggtgaacaagggcaggcgataatggaaagaaacaaagaaaatgccgccaagaagaagtaccatcaccacttggggtcaggcggctatagcgttgcgatgccgaagtgggaggagatggaggcaagcttgcttgagaggggtatcgaaccggccaccgctaattagccggaacgatcgaagttctggtactatgctcacggtggaacgctcaacccagctgatggcccactggtcttcggcgatcagatacaagaggctgcgcgttgactagcagacgcagtggaagcctcttcttagggcacgttccgaccggacagagagagggacgagctgtcactcgccctgcagactccagagcatccaggacgaacacgagcgaaaggggtgattccttggaagattaggttcaaggaggacatccacacgtacaggagtcggatgaggagcaagagagataccaaggtgaagattgcagatctagagttcagggtatcgagctacgagcgcagcatgcaagaggaggtggcaaggaaggttgatgaacgcatggccgcacatcggtcccatgatccccagccgaccattcctcctgcaatggtgagcccgtcaggaaaccgtagcagctgcgcctcaatggggcaggtaggatcacagagtatggacgccatacaaacccaggacgaatccacttgccccgttgatgacatcattcagtggacaccatgtgagctgcatattcctttcaagaacttatcaataaaggtaagctcgtagtttatatattttagatttggccattccgctagttgctgcttatatatgttgattactaataaataacctctcaccacatgaaggtggcgtcgggcatggccatcccaatggacctttcaggtacttaccactgcaggccgattccagcaggatactccaaggtcgaagttgagttggtcgaaggcgcgtacgaggacctcgcgctggattaccctggaggagacggtgagacgcatctacgagacacaagccatgccattattctatggcgcaggcggtacatcatcctccctgggcgacaagcggcgtctcatgcaccatctcctccggctctgccatctcctcctcaggcttcagcaccgtctccacctcaggctcctacaccgactcctcctcaggctcctgcaccgtctccaccttaggctcctgcaccgactcctcctcatgctccagcaccgtctccaccttaggctcctgcaccgactcctccgcaagctcctcttccggcaccttcaaagtcaagggccccccaagctccaccgcttgcccacacaagggcaacgaagaaggcgaaagttgacgccgccaagaacaaagacctaattaattaaaggatgacattctctggatcaatttcaagggaatctacgaactataccagctggatgccctcgacgtctctattatgagttgctggattttgtaagtatatcgttcagttagatttcttactacgtctcctttaattaattaggtccttgtatataagtagactatagaaaataatatactcccttttatcattgtagaatggagattcaaagggcccgacggcggggggttttcgatactggattcatcgaccctcggaaagtaaacgtcgcaatgctcgaccaatatccgcaagccacagaggacaatctcgtccatctcctaaaggcgcagcattacaagacgttcatactgttgccgtacaacacagagttagtttaattttactgtcttcctataccaaatttcattcccgtatgaacttgctaagtgtttcatatgtaatgcatcccacgcacattgtagattccactgggtgcttttactcttcgacctgtcggcctgcaccgtcaatgtatatgactcaatggataaaaaagagtctacgtttgacaaggttttcgaacttatagacaggtactgtcataagttcctctgttaattaagaaaatcttgttatgttaattgctactacgaatcatagctttaaactccatgtagggcttggtatcggttccgtcatttggtccgcggcaactggagagaaagacttaggcggaagttcaaattttctgtgagtacacatgctctacatttatatttctccgattcaaatacatacaagtgtatattaattagatctctcgtcgtttgtcatttatttgtagtgcgcaaagcaaaagcagttcaaagcacttaggtattaacattaaccactttactaactagttcaaagcaagtttgaactgaatttgaacttgtttttgttagattttgattctaggtatatagcatccatacatataattagttaggtatgtaatcatggattgtgaaataaagttaaatttgagttgttttgttgataggtataggtatgaatcgaattattataactaggtatatactcacaatttgaaaattttgaaaaatttgagtgattttgtgcatttgataccatggtgccgggcaccatggtgccctatatgagtgtctatatatatatatatatatatatatatatatatatatatatatagacacacacacacatacatacatatgcatttgcaaaacatatatatgtataaatacatatatattatgcatgtacatatgtattgaaacatatataaatataatatatatatatatatatatatatatatatatatatatatatatgcatatattatatatgcatatatatgtattgaaacatatatatgcatggtttatatatatatatatatatatatatataaaccatacagtaatagggccatacaaaaaaaaaggttagctcgatctttagtcccggttgatgttatcaaccgggactaaagatcgatctttagtcccgattatttcacccgggactaaagatagcgatctttagtttcggattggtagtcccagtttagaaaccaggactaaagagaagttacgaaccgggactacaaagggtttctccaccagtgaatatcgcgtccttgtcactgggcataggagcgctgcctatgatcagcacgggtaagtacaaatttatactcgcattaaaacattgacatgtgctcatacatgcataaatataaattgttctgcctatgtatatatcataggagtatatgatacaccaggtacaggggatatacattatttttcctttttaaatttcccactaacagtaacagattgtcttttattttcctttgtaacaaatatgcatgtcttggacacttgtttttggggcggggtcatgctcattttatctgcaggtttgtccatgggaagtcaggaaagtatcatagcttgtgatctgtgcggctgcatcctgggacaggttttgaagtttgctcttggacccattgcgatgaccattgcatccaaaattgttggccttcacggcaacaaactccgggctgccatcatacaggtatctaattacaatgttatttgtagtcagacgtttagagaccaaacgcaactttctcacgacacatttccatattaccttccaactacgctctttaatctttttcttttcttgcttcgatgatggaaatccaacccttcttaattacctgcttgaatattcagaaagcgagcgcggttgataatggttgaaagtagcttttctttaccatggcaagacgattgataattgttaatctttttttccctgagattgataacttttaatcttgatcacttcctagcttagatttactcaaatagttaagttcacaatggtcagatttttaaaagaacataatggccagttttttctgtgttcaaacataatggtcagagactcagagttaatcttagctttacccaaattggaacgtttcggactctcctatgttagctcgccattgtaatcctgttctacgcaaggaaaactgatgatctcttgatctgtgcaaacattttgcaggctgctgtaccacaagccatttcatcattcatatttgcaaaagaatacgggctgcatcctgagattattatcaccgcgtaagatcttccaactgatttactaattaagtgagaaagtatatactccctctgtttctaaatatttgacgccgttgacttttttaaatatgtttgatcattcgtcttatttaaaaaaattaagcaattattaattttttttcatatcatttgattcatggttaaatatactttcacgtatacatatagttttacatattgcataattctttttaataagacgaatggtcaaacatatgctaaaaagacaacggtatcaaacatttagaaacggagagagtcctcgtttcgacgttaccatcctaactgcttaattaattcaatctgcagggtgattatcgggatgcttctcgctgtgctgttcctacctctatactacgtaatcttacggcttactacataaggcaaaatctcctgcctttccttaaaaaaattcttatggcttactctatctagacattcagatgacagcagggagtatagatacagaaggaaaagagagataccatgtagtgggtgaaatgcgtagacagtgtatacgtactgtatgattgtaatttgtaagaaaaatagagctacttcctccgtccctaaaaaacgaatctaatacatgtgacatattctagtacaatgaatttggacggatgtatgtacagattcgtaatattaggatatgtcacattcagtactaggttgattttttataggatagagggagtacgtgtgaaatgtgtggacagcgaataagtacggaatgattgttgtaacggtttgctttaagcgaatatacagatttgaatgattttttcctcaattttgatgcaagccatttgcgagcgcgcgcacacacagatagcgttggctctgtgatgaattctcgaataatactccctagctcagttttatgatataagtcaaactgttttaagtttgtctaagtttatagtcaaatatagtaatatttataatactaaattagtttcatcaaatcaataattaaatatatttttataataaatttgtcttgggttgaaaatgttactattttttttagaaacttagttaaatttaaaatagtaaaagtcaaaaagtcaaaacgttttataacctaaaacggagggaataatacattttgtgttgtccatgcaatcgattagtgttaagtaccagcagtacctgatcaacaattaagcttcagcttgagcggttttcagctctgaacaactgttcgtcgtgttctgttccatcttttctctatgtctcttgcagggtttacattaccgtcggtaatcacgcggttaccagttttatcgtggggtacggtaaaaaaaccacggtaaccaccttaaatttaaataaatttagaaaataatttaaattttaaattagaaaataatttaaattttaccgtggttaccgtgcctaccgtcggggaaaccctggtctccggtgatgaaggaaaagggactcgatctgcaatttttcagccccatctgtcactatctgaaaactgaagcagcactgaactgcatcagagaaggctgggcctaaagtgggctctggcccgcatgaaggcctgctatgaatcttgctgttggtggaatggactcaattagttagcgatccaagagagcgtcctccttgtaattaagccatttgggccattactatcagtttcaaacccaatacacacttgggctcagaaacgaggtaaggctacatttagaacaggaataattctgacctaaaatttcagctgcatcgcacacaagtcaggaagaaagattcattcttgcacattctgattctggagttggcacctttaatttctaagttttgttgcacatgaaactctttcattattccttcaaaaaaaaactctatcagtattttctctcaattgagtgccaggttgtatgaaaaccaattcatctcctttattttattcagaagaaagggaagaaaacgttctttcagaaaaaaaaaggggaagaaactaacgaagtcagaagcagactaattaattaatttaattccacactgcaatcagtgggaagtactgaagaaagctatagcttgctacaaaataattaagtggtactattttttgcctggtggatacaacattaagcaacacttgacaaatgattaactaaagtttcaagaattaatcaagactggctgcacgtgactaatttatacagctccaatttaaggttgttagttagggcacgattaatgtcgtaatgaaggcatacttaatgtagtctctccctgcaaaaaaaataggtactaattttaatattctaattacatgcagggacttgctgcaaaaataggataacagcataggttatattgattcctgtttttcaacgaaatggtatacccttttttagccaaaaaaaacctatagagttaataatggaaatcccctagaaattaattatgatcactagctagctggtatctctgctagctagctaagccactctctaagcttaattaattagttggttcagtaccagtactatgccccgatgcaaaatagttaaggcatcgcttggactgcaaggatttttcacaggaaatttgaacaaaatctcatagcaaatatgaacatttctcgagatcaagacatgcctagctggctaattatttattgatttatgggatgtcttcactatttcctatagtaaaaggaagcatgaccaaactttaagctctacaagaaaaccatgatttctcaggtcgaggttccatctagaaagtgactttttgaaaacaaagatgcattatgcatggtccatagtcttttcgcgaatgaaacaaacaagaaagaaaagcaaataatcaaagaaagaaagccctggctactggaaaagtactagctggttaattacagatgagatctaaattaaagcatcagcccctgcccatatagatcatgaaaaatgaagtgggacacacatatgctaccctttttttacaaatcatattatgagatcagtgttggttttcaacaggtaattatttatattgatttatataaaagagataatctatcatattcagaccacaacagcactaattttcatattgctaatgattgaatttgacatctcgatattataatcttgctagcattgtgcaatgttaggttgatcatgtgtgtggctggtttcatatatatgcattaaactcatcctagctagaaaagcttttaaaaggatttctcatccagaatatatatatataggtttttagcaggtcaatgtatgggcaaatgaaatacttatgataaaacttttaggtgttgaaagaatacatgagactaatataagtgcaaaggtcaatgtgcaaatgagaattacaatccatgcaaaagaggattcttcttccacacagaaaacaatatgcatcattggttctgtaaaggtcacgacaactagccgattggatgaattaatgggactaataagctttagtttcaccagctctctcatcaaagagagaaagctaaaaaggtgcttagacttgcagggcgaaggctcccatttgagcatatctttttgcaaaaagcacgcaagaaatgaagcaaaggtgttgaagaacatggaaactgggtaccaaattgagcatgagttagttaggccttttcttgcacaatttcttgaattagcacacaaaggtggagtgaagatcaattagtactaattaattagtataattgtgcaatgatatttaattaccatgaatttaattataagagagatgatattataatgtatcccttttcatcttatttgtgtctaacaatgcaaaaggcatcaacatgcattccaaaccactggcttctgctccatcatgagtgcttcacttggcagttcctattccttgtgctaatgatgtgaacagtacatatacttctattatagagttgtattgggatcttgctttgtgctaacaaccaaaggtggtgatggccaaatcctagggggcaagatttcatacttcaactgtccaacacttgcttgaaggattgcaaagctatcgggcccttctatatatcaacaagccatgtctccatttccttttttgacacttaaaaagggattaattatttgtggtagaaaaatgctagatattgttgaagacagttgtatctaaagcagggatatttagatatacctaatgtggtatttaataagtcatttttggcatgtcaaaaaatctatgcaaactttgaagtatcattcacaagctatagcaagtttggcatatattagttttaccaaaatatgtgaatttcaaggccagtgagtgattctattcatatgtctacatatagtatatatgttcaggaactcaaactcgggatttgaagtgtcataaattatttattttattcaatttccacatattcttttagcttggatatactaagttcaaaacataaaacttgttctattcaatacaaatatatatgactgcaaacctagctagctagaagttaatccaatactgaaaatgcagatgtgaatccatcaatgcagcacacgattaaaattttcatatatatatgcgtgcgtggttagggatgttgcatgcatgattgcaactgctacgctgaacttgaaagcttaaatgagaaagcattgtccttagattgttggcccaggttggaaaacactccttttgttttcttccgtcttaccatgacctatatatggggacactcgatctctcggaaaaaatagctatcaatggcaagcagtctgttggtaaagagttttaccgacactcaacctgccacgagcatctgccaggggttcaacagtcaagaaaaatatttaccaacagacttcttatttattggcagatgggtgctgataattttatagttttttccgacagatattgtatttcggtagatggggatctccaccatgtcgtcctcccggtggctacaccctcgtccatgtccaccttgtagcagctccgttgcacctctacccactcgctcggctggcttgcttcgccgcctcctcgtgccaaaaccctagaggctacgccttgcctagcagtgtggtgagggagacaggtgttttttcttgtcacaggaaccttatcctatccaccccaatatctgacacgccctagtgatatagcaacagacagctcgtcggtccaagatctttaccgagtacctacagatagtccgtcactttcttttactgacagattgtttgacatagttatctttttaccgatagattgttttgccaggatatttaccggcagactgacttgtaccaatagtccatttttcccaacaaactattgccttctatttggtgttgcggtgtagtgtatatactgatcaccagatgatcaatgctatagtatgaatatatttaataattacagcaaatagaaattttaccgttcactaattcaattttagtgtgtcacatcactaggggaggggtaagaataaaagctctaaaaactcgcggctcagctcgaatcaagctcatagtcctaacgaggcaagtcaagctgcgcttttatctctttagtttagcgagctagctcacgagcatcatatcttctttttatacttgcttcttaaccaatacttagtcctttatttattttaaaactatttgtatttagtttttttattagttaatattttattattatattatgaatcggtaaatttaaaactatagagccagtaatattaatataaattagataaaatttattgacaaacctaacaatcttaatgaaccagtttgcaaaccgaggcaagctagcacgtttattaaggtatcgagcctaataagtcgagccttaatgaatcgagctggctcattacccacacttacacatcatagggtttgggtcaacaacatgagcatatgctgttaaaattaaaacttagagaataattatgtcagggttatggatacctaatagtagttgactaaatctcggcaggacccaccacataccatgttttatacggaaacaaccttcgggtatagaaggagttccggataaagaaagataaatagagttctacatggacaacatagacgccacaaagccacaagccaatacaagccaacatacgccaagtcaaactgccagatatcgacatcagagataagtctaggaaaaccccatatggtacctacgggaaccaaagagaggaatctagcgctgtctctgacctcgccggatgtggattcgaggaggaaggctaccctgttgttgactacgagtcagaacttcagaccaccatgtcgacaacagatagataagctaccccaaatattgtactggtgtgattatggtgaataagagcaacgaccggcttcggtcaacaggagtagggttattacctgacaattcaggggcccgaacctgtataaaaatccccgtctccatcttttttactacaatctcgtatataccctggtatcaacaatccccacactatacaaatatcggaatcgcgacatcaaacatcgacaaattatatatgttattgtgtcaaatgcaagaggacaagttgcacggtttattatacattcaaactccgatcaaattaattagtggtttgataaacaattttctacatgcagtttgcatagtgtcaaatagtcattcagacagggctcattagttatacatgtactccctccattccatataaaccacttttcttagatgttccataatactccataaggcatgcatgcatataggcaattaactatgaccccttctccattaaattattacttttttaatcctccactctcatgttctttaattctattggatgcatgcattgtatttattaggatgatccaaactacaagatgataataattatttcttagtctttgtgttaggggtggttatgccttatattttggaatggagggagtatttatctcgtgacagtttcgcatgaaacaaagaattaaattttaattaccagaactctcataatctttattttcaattggaacctatatatatttctctaatttcaagataaacccaatggagcctgctttattaaatttcttacaaattatttttatatttattaaatttcaggagaagctatcaaagctagctggaatatcctattaaattgtctcaatgtgctagatgacagcatgatattaggggtagagaaagagagagatgtgatggcaaagatagtacatggagtactcactttcctgcctccccttcctatctttctggaccctagcagctaattgcatctgctaacgacctgtaattgcaaccaacctacatatattttgaccagtgacagtgactgttcctcctacttcattcatgcatgcacatgatactcatcatctctctccaacaccacactgatcactagtcactcaggcaagtactagctgcatgcacctttcagacacttcaatatatttattcataagctcatcaatgtgacttcatgtgcaagggaagcagttggtgcatgaaaggaaagaggaagcaaagaaacaaaacaggggaaactttaccctgaagaaaatttttataaaaaggtgaagcattatctacagtgtttagccctaattctaaactaacttctaaacatgaacacccacataattaaggcatctaactatatatttaattatgatatcgctatatatgcaaggctgtcgatattctgatccgtatcctagtatcttatggtgctgcgatcctaccaaatcaaaatgataccgatctcatctagtatcttaattttttatagtatcttgatcttactatttatttccagacgattctatgaaatcttaggtagtatctcgattctacgatccatacaatcctacaaaatattatttaaaataaggtggattgaaaataatttgaataaatacgctcaagtttacataaaaccaattaaattgatcaaaatcaatattatatgctttaatttatacaacatactttatactttatattaaattatgtactttctaaaatctggtagtatttcgatcctgtgatactacaaataaaaaaaacgatcttacctagtatcttgatactgagtatatatacaactcaagttcttttagttatttgcatgactacataactctataattttgtgtacaaggatgaatttcaagatatttatatatatgcaagatcaaaagtggagttggtgtgagaaatcttgtacatttggaagagagaatatatgtgtcaatggaaaaaaatactaccttcaatgtgtatgtatgtatatatatgtataattgtatatatatgcaatgtactcctttggcagctatagatggggcccctccctctcaatcattcaacttggaaatcaaggaaaggcaaggatgacacatctttcatcagctcctccaagtcccactctcccatgacattcctgctcatgtgctgctgctgctgctgcagcatctgatgctgctgctgctgttgttggtggtgaccctcccaatagatcatgttgctgctgctgttcattaggctaatgcagcagctgctgctgatgttgttgttattatcactgttgttcttgttgctgttgctgttgtctgtgatgttgctgctcagtgtggccgcggtcgtgttgctgccggttttgttagggtggtcgtcgtcgtcgtcgagaatggtttggtggtctaggagaggtggcactgatgcgccgccaaagaggatgctgctgctgtgatggtgatgatctcctattaagcttgatccgtccatggtggcgatcgcgtggtggtggtggtgggcgccggttgatccgtagtatgcttgcttgatggagatggagtggtcgtggaagaacggcggtggcggcgaggtgtcgacgccgcagacctggtcggggagtgggaggaggccgccgtagctcctccccgccgccgccgccgccattatcgacggccggctctgcatcgacgaggaagacgacgacgacgacgacgaggaatccacccacatgctcttcatggcagcattagctgtcccgacaacgacgtcgtccgtggcgccgccgccgccggcgaggtcgacgacggcgccgagcttgtgctccggcggggaggcgcagtcggtggtggtggccggagacgccgaggaggaggagatcttgaggcgcttcttgatggtggagttccagaagttcttgatctcgttgtcggtgcgccccggtagccgggcagcgatctgagaccacctgcaataattccatgcgtcgtagtacggtagatttttcatcagtgagcaaacgagatgtttctgtcaagaattattatccaagcttagctatagctatggttgtagtacaaaagattaattaaataaaaaggttaattagctgcatgcacatatatgtcaatgcgccttaattaatcttctttttatgcatgcatgcatgcatgcataagcgcataagcatgattaatctagtatttacttccaaaaaaaaataaagataaaatatatatgattttctccgtttcaaattacttgttgttttacttaaaaaaattacttgtcgttataactttgcagtaagtcaaacatttctaaccttcatcatcaattctctagaaatttatacagttattaccataataagatttattttctaaattcattatatatgagaaatattttcataatatataattcacatgttaaactgtatacgaatttttgaaaatttatgatgaatatttgactttatacaaagctaaaatgaaaaggtttttttaggtaaaacgaaaagcatatatatatatatatatatatatatatatatatatatatatatatatatatatatatatatatatatataggttagttttacatgtgagaaagtacgtagaggtaattagtcgatgtcataatctcatttctggtaagacaaggattaatcaataattatggatgattggatccgacaaatttgcatatgtctttcagggttaattagaacgtatacaagtatgaagtatccctttcggtgtcttttcaggcaacttttagtttctacgttacatatatatcagttttgtaattatgcatggtgtacgacatttcatgcaaaattaagcagaagaaaaaaaagaattaatcaagaaatattttgattgatatatccaggactcatgttgttctcatagccctttgagacttgagacacatgtctgtatatatattaatattctaataatcaaatttttttaacttatgtcacatattataaatgtatat

SEQ ID NO: 15739 - DNA, 798 bp, Oryza sativa
  unsure (1)..(798): unsure at all n locations
tgcacggtnnnnnntttgaatacactacnnnnnnnnnnnnnnnnnnnnnnnnnnnnnnnnnnnnnnnnnnnnnnnnnnnnnnnnnagtataagattattagatttgtaattagacttagcactgagagatcccctcataatttccccaaagcgtaaccatgtgtgaataaattttgagctagtagggttgcagccacgagtaagtcttcccttgttattgtgtagccagaatgccgcaaaacttccatgcctaagcgaactgttgagagtacgtttcgatttctgactgtgttagcctggaagtgcttgtcccaaccttgtttctgagcatgaacgcccgcaagccaacatgttagttgaagcatcagggcgattagcagcatgatatcaaaacgctctgagctgctcgttcggctatggcgtaggcctagtccgtaggcaggacttttcaagtctcggaaggtttcttcaatctgcattcgcttcgaatagatattaacaagttgtttgggtgttcgaatttcaacaggtaagttagttgctagaacccatggctcctttgccgacgctgagtagattttaggtgacgggtggtgacaatgagtccgtgtcgagcgctgattttttcggcctttagagcgagatttatacaatagaatttggcatgagattggattgcttttagtcagcctcttatagcctaaagtctttgagtgactagatgacatatcatgtaagttgatgataggtatccagttttccgctcctaggtctgcatattggacttttcctcttact

SEQ ID NO: 15740 - DNA, 621 bp, Oryza sativa
  unsure (1)..(621): unsure at all n locations
ggtccccccnattganatcgataccgcatnnnnnnnnnnnnnnnnnnnnnnnnnnnnnnnnnnnnnnatgcaacatccctaaccacgcacgcatatatatatgaaaattttaatcgtgtgctgcattgatnnnnnnnnnnnnnnnnnnnnnnnnnnnnnnnnnnnnnnnnnnnnnnnnnnnnnnnnnnctgatgaatcccctaatgattttggtaaaaatcattaagttaaggtggatacacatcttgtcatatgatcaaatggtttcgcgaaaaatcaataatcagacaacaaaatgtgcgaactcgatattttacacgactctctttaccaattctgccccgaattacacttaaaacgactcaacagcttaacgttggcttgccacgcattacttgactgtaaaactctcactcttaccgaacttggccgtaacctgtcaaccaaagcgagaacaaaacataacatcaaacgaatcgaccgattgttaggtaatcgtcaccttcacaaagagcgactcgctgtataccgttggcatgctagctttatctgttcgggcaatacgatgcccattgtactttgtgactggtctgatattcgcgagcaaaaacgatttatggg

SEQ ID NO: 15741 - DNA, 628 bp, Oryza sativa
  unsure (1)..(628): unsure at all n locations
aggcccncccaaatgatatctctttagctatgcactgagagatcccctcataatttccccaaagcgtaaccatgtgtgaataaattttgagctagcagggttgcagccacgagtaagtcttcccttgttattgtgtagccagaatgccgcaaaacttccatgcctaagcgaactgttgagagtacgtttcgatttctgactgtgttagcctggaagtgcttgtcccaaccttgtttctgagcatgaacgcccgcaagccaacatgttagttgaagcatcagggcgattagcagcatgatatcaaaacgctctgagctgctcgttcggctatggcgtaggcctagtccgtaggcaggacttttcaagtctcggaaggtttcttcaatctgcattcgcttcgaatagatattaacaagttgtttgggtgttcgaatttcaacaggtaagttagttgctagaacccatggctcctttgccgacgctgagtagattttaggtgacgggtggtgacaatgagtccgtgtcgagcgctgattttttcggcctttagagcgagatttatacaatagaatttggcatgagattggattgcttttagtcagcctcttatagcctaaagtctttgagt

SEQ ID NO: 15742 - DNA, 752 bp, Oryza sativa
  unsure (1)..(752): unsure at all n locations
gtgtggtgttactcggtagaatgctcgcaaggtcggctagaaattggtcatgagctttctttgaacattgctctgaaagcgggaacgctttctcataaagagtaacagaacgaccgtgtagtgcgactgaagctcgcaataccataagtcgtttttgctcacgaatatcagaccagtcaacaagtacaatgggcatcgtattgcccgaacagataaagctagcatgccaacggtatacagcgagtcgctctttgtggaggtgacgattacctaacaatcggtcgattcgtttgatgttatgttttgttctcgctttggttggcaggttacggccaagttcggtaagagtgagagttttacagtcaagtaatgcgtggcaagccaacgttaagctgttgagtcgttttaagtgtaattcggggcagaattggtaaagagagtcgtgtaaaatatcgagttcgcacatcttgttgtctgattattgatttttcgcgaaaccatttgatcatatgacaagatgtgtatccaccttaacttaatgatttttaccaaaatcattaggggattcatcagnnnnnnnnnnnnnnnnnnnnnnnnnnnnnnnnnnnnnnnnnnnnnnnnnnnnnnnnnnnatataacatgatactgtactatacagcattgtggattagggagttatttaattaannnnnnnnnnnnnnnnnnnnnnnnnnnnnnnnnagggtcggcacgtatcaaacaatnncccctag

SEQ ID NO: 15743 - DNA, 1023 bp, Oryza sativa
  unsure (1)..(1023): unsure at all n locations
tgtggtnntaagactgacgtcgtgccannnnnnnnnnnnnnnnnnnnnnnnnnnnnnnnnnnnnnctgaggctccagataaaatcatgacgctttgggatttcttctgtcatcaagacaggggagatgattccgctgnnnnnnnnnnnnnnnnnnnncatccaagttggctcagttggcggtggttctggcttgccttaacgaaaatggttgtgtgaacatttgcgcatatatgttgatcatatccctcttaatatttaccacacaagtgttttgattagttatagctatgtatttctaaaaagcaagaaagaagctatgcagcacatttaataatgatggtcgcaagatagctgttttacaaatgcaataaaatcctgaagcatacaaaatagtgagtggcatgacctctctctctaggcctgggaaaccactccaaatgaaattttggcgccatcccctctcataaagaaatgataccagcggagtcctgttccataatcaacaggaaataaatagtctaaagagaaataatctataaacaagtatacctatgtgaaagacaggcatatttcataccacatctccagatggtcgaacattttcaaggtttcatagaggtgcagaggtttctttcactacataactacaggctacagccacagaccacaaagcatgattttggcagttaattgtaaactctcaaacaactaatgcgagatgcttagctacattctgccaacaattcataagtcaggaatacgtcaatttaagcacgataggtttggttcctctcgtaatgtgatctgttcatctaagttcaccagttaacaaacttcagaagactctgttacctgaaaacttcagttgtcactgtcgtggattcagagtactcagtagaaccaactgctacagtcatatcccagtaatcccctctattgggataaaatttcttgcaggtaggcactgaccggcctgaaaagattcaaacaaataactatcaaacggggaagcgaagcgatta

SEQ ID NO: 15744 - DNA, 8861 bp, Oryza sativa
  unsure (1)..(8861): unsure at all n locations
taatcgcttcgcttccccgtttgatagttaatttgttgaatcttttcaggccggtcagtgctgcttctagttctagtcttgagtgttctacctgcaagaaattttatcccaatagaggggattactgggatatgactgtagcagttggttctactgagtactctgaatccacgacagtgacaactgaagttttcaggtaacagagtcttctgaagtttgttaagctggtgaacttagatgaacagatcacattacgagaggaaccaaacctatcgtgcttaaattgacgtattcctgacttatgaattgttggcagaatgtagctaagcatctcgcattagttgtttgagagtttacaattaactgccaaaatcatgctttgtggtctgtggctgtagcctgtagttatgtagtgaaagaaacctctgcacctctatgaaaccttgaaaatgttcgaccatctgggagatgtggtatgaaatatgcctgtctttcacataggtatacttgtttatagattatttctctttagactatttatttcctgttgattatggaacaggactccgctggtatcatttctttatgagaggggatggcgccaaaatttcatttggagtggtttcccaggcctagagagagaggtcatgccactcactattttgtatgcttcaggattttattgcatttgtaaaacagctatcttgcgaccatcattattaaatgtgctgcatagcttctttcttgctttttagaaatacatagctataactaatcaaaacacttgtgtggtaaatattaagagggatatgatcaacatatatgcgcaaatgttcacacaaccattttcgttaaggcaagccagaaaagtcctatttgcatccaaactgggtctagctcaatcaggtggttgggttaactgatggactgggaaccagcccgttttttcaacactggaaactaaataagtaagccaccagctgagtttaggagatgatgtactcaaaactctctacctataatatcaatcttggtgctgaacacaacttgtagccatggttaatttattaggttcaattttctttggtataattaaagcatttatgtatcatcttgtgcatgcaagcataatttcttcactttctgaaaaatattgcaacgcgactgcagtttgaaatggctcaaacttatttgaaaccgacaactggagggattatagttgatgcaagttgtggaagtggcctgttttcaagattatttgttaagagtgaactatattctcttgttgtggcactagatttctcagagaacatgttgaagcagtgcaatgaatatgtcaagcaggaaaacatttcagataagtatggtcctcagttccccaatcaccaacatttgtatgtaattcctttgtcatgcttaattcattaagtcgcaatactcatttgtgtccttcgcattgtcttttatgcttcatagcattttttcgtcattattgatttcttctaatgttgaatgctatacttgatgctaacgttgaatgctatttattacttctgtttcaggacattagccttggcgagagctgatatatcccgactcccttttgtgagcggttcaattgatgctgtccatgcagctgctgcgatccattgttggccatccccagcttgtgctgtaagatttctacttgaataacaattttatgtctgtaaaaactcttacgaccttactgtgtctttcagtattgttgagttctacaagctgtttgagttgtttcctatattatgcatttgctgactttgtctttctcagaagaaaaaaaacagaaaaccatactcatttcctcagtgatgttcttctatgcactcaaatacacgtggatggcatattctcttttgtctaattccatctgtagagcccattgaaattgcacatagtgctagaacaagaaaatgctcatacttgtttggttccaaccttcccatagccacatgtatgtgattacacaagcactaaccataggataaacatgaaccaccactaggatacatgaaaacttactcagggtacttattacacatgtattaaggttcacttgataacttactgaagaacaaggaatcatgtttatgaaaaatcacagtacattatttgtggcttttctgtgtgtagaatgtacaatatgtagacttctccagcaacaaatactttttagcaagttgtcaatcgataccttgtgaggaagcgtaacattattattgtcttctttcttttcaggttgcagaaattagtcgagtccttagacctgggggcgttttcgttgcttccactttcgttgcagatattcttccaccagctgtaccggtattgaggataggacgcccggtaatactggaacctaattatccacgactgatgattcgttttaagaagttaaattaatttgcttcctaatgatggtagttatttaaaattggagtgaacctttaatgcttgaacatgtagatattagcatatttaagttaacctatggagtatctggtcctgctatctgtagtatcaccttttggaatctgttttgtttcacacaatcacacttttctcatgaaattatcttgcagtacatcagccaatttaccggcagtaatatcttcttatcagaagcggagttcgaagatctttgcagagcgtgtgggcttattgatttcaagtttgtcagaaatggattctatataatgttctcagctactaaagcaagctaattgatcaactggacagtcctctcaaccttgtcctgaaaatcattgattatgcactgtaagtgaacacactgcattctaattgaatcttgtgaagttcactacattttatcaagtctaatcctttactgaatgttaaaatatattgttacaggattctccgcgccctttctagttggactaatagttttacctgagggaaatgtggtatagaatagtgagtacatacatatattttgctttacctaaccattttggttgcttgtacctcaatttttttgtgtataggactcggcgactcggctcttgcaatcctgtaacttttgtatatcgactcatgctgctactagtagtatatacagagcataaacaaatttattgtgttcactatttatttaggtccctttgattcaaagaaaattcataggaattttaaaggatttcattcctatagaaatttatcctatatagccctttgaagcaaaggaatggatcttatggaatcctatgaaattcctatggaatgcctaatgtcatgcaagttttgaaggaattctaatatgagatagaacctcgtggaaactttcctttgagtctttatctctcttctaattcttgcgtttttcctgcggtccaatcaaatggccattcctgtgttttgcaatcctctgttttacacttacattcctatcaaaatcctacgttttttctattcctacgttttctcattcctgcgatagtgtagggtccttttgaatcgtaggaatggaaaaacagaggaataggaaaaatacaggattctgataggaatgtaggtgtaaaatagaggattggaaaatacaggaaaaacataggaatgaccatttgattggatcataggaaaaacgcaggaatcagatgagagagatagactcaaaggaatttttccaagaggttggacctcttgctaactttcctccaaaatgtgcataggattacctattccataggaatttttaaacatgtattagtcattcctcgtaaaacaagcgattcattaatatttacatttttcgatgctcatgtagccaatcttgtgtggaagaatagagagtcacgcattaaattcaaagaaaaccattaagatgataagttgttggattgaaatatgcctatcaaaaataatttttttcagatttggaaatatgactatcaaaaatagatggagggagtactaaaatggcttcttggttcccatcaacaatttaatttagcatataatgactacaaataggacttagacttttggaaaaaaccaaagaataaaataagccttagactttcggagggagggattattaagatttcaaggacgagattacatacaccgaaaacctaagaagattaaggcgatgtcccgcgaaacagaggaaaacgaccgacgccatcggtgcagtataagctaacacactcactgtcacgccagccaaactccattgttttgctgcttctgcgatctccacaaaacgctagggacaggattttgtaccacgtttagagaagttcttcactgatctcgcaaatgttagatgccaacagcactacaatcgatacaagtaagttttcctcctagatgaggttagctattttcatatttctttcaggcttagcggcaaaaatgtcattatttgctcatgtcaggcaagttgatgaaacaaggtaaggcaacatggagctcaaatcattgttgttgctacatacgtatcttgttgtatctagcaggggttgcaaaatttttccattaagcattgggttgtcttgatgtcgaatgaggatgtatggcattaggtatgcgagttttttttattagctataccattttttgttaatacaacaaaattagactccccattttgagatatcacaaaactgtactgctgtcgccatttgaaagggttatagaatatatcgacatttcaaatggagatatatttcaaacgcctagtaaacaataaatcactactaacagtggacagctgcatgctgcatcgcttatcatagaataggcacgaggcgggcgtggaggttgactgctagtgcgtggtggctggctcttttgcctgtccttgttcggcccgatgtggcggagccatagttagtgccgactgccgagagaataccccaatcggcttgcactggtgactccaagtcgacagtggcagtgtttgtcgagagtcacaaaaagggaacaatgacagaaagatgagttcgttttcacaatcagatcaacgagatgcaaaacaaacctaggagttcttaccgttgttcttcctcggtctttgatagaacttatgctgataacgtattatgctactccccctactacaaattaggtattatgcaacccttcatgctacaaagtagtttaagagggattatataatgcttacaaaaatggagtcacaaagatatgagggtgtgacatgctttcttactcattctctttttaaattgtacaatagtgaatcttctcactctatttataggtatagcttcattcaccttttgtatttagtgatagactcgattagtaagtaatcaagttgggtttttgtgggctgctggtttcgtaacacacctcaccaaagaaagtgcaagggctgctcatatttgcaatgattggaatgtgtatgtgcgtttaatgtcataacatcgtccttaacaaacggttagagagaagtaaatactactaatatctaaaagatatagtcgctttgaaagggagaagcaacaattaggagggattctataaattaggaaacaaatactaaataagatatattaaaaccaatgcaaacgagtgatcaccatgaggattgctatggtccagcaggttgtactgggtggtactggtaccgtgcggtaccaaaacacatctaaccattgaatccgggatgggtaggatcgggatagaaaagatgagcaagggtggatgcggcgttcgagtcattgttcccggcgatggcatcatccaagtcgttgtcgttcccggtggcggcggcgtccaagtcgttgtcgttcccagcggcggcgcagagcaacaagggaacgccggcggcgcggaagaggataaagtccggtggcggcgcgagagagaaaaaagagaacagcggtggcgcgagagaggaacaagggaaggatgacagcgtgggagaggaacaagtccagcggcggcgtgatggaagacggcggcgccgcgggacaggactaatggagatgcgggagaggcaaattctagggtttctgagcatctaccgtctgctctctctatcattggcacgcggaattacattactgcccttccacctacattcaacacgaggtaccgcatcagggttagaactggtaccccgcagtaccaatctctgccagccgttggatctgcccggatccaacggtcgagaatcggtaccgcaaggtaccgctggatcgtaaaaatccttgatcaccataggtagtgtgaattgtgaaagtcacaacaatgaggtgtggcctccatgaggaatagaaatggcaagctcatgagaagaggacactgctaacatataacatcatgaattagttgtcataaggtacatataaaacttacattagcacaaataggaagacaaccatacaacaaacaatatacgtggggaaattagcatgctagaaatggcaagaaccaggcaaagatgttgtaacaaaagggattatactcgtaccatttttttttaaaaaaaagtgtttctgaatgctacaattctaatccctccatattatactcaaattagtttattcatcaagaatattgtcattgagttatattacataaatagtatgtattttggctttaaatctttttaatatttcggatcaccacattaaaaacctatatatatatatccctaatattaaggaatattctgaaccacctaattaacatctttgatacagcaatagcgtaacaaatctagccacataaatacaccgatcaccctgctgcatatataatgacaaacatagcacaaggatcattggatcaagtcaagatggggcagtcatcgatatttgtcgtgctctcttttctgttcttcagcaatgctgcagcaagaagcttggtgctctccaacgaagacgacttagcactggagagagaactcatgatgcttaacaagccctatgtgaaatctttcaaggtaatattgatatccacgtgaagaaactttgggacaccaataaccaattaccatgctccattcaatatttcgttcttttattattctgcatttgatgaaatggcaggatagctatggtgtagtttttgattgcgtggacatctacagacagcctgcattcgatcatcctcttctcaagaatcacaaacttcaggtaatagtcaggataaaaaatttatattctctcatgtgcacttattttttgcgttttagtatagctatttcactagctgtggtagagatttgcaacagaagattattgcatcaaagagatttgcaaaacaaaaaattacacaacggtaatctgcaccaaaaatgagatcatggagtgaagtgtaccctggagaaaatagaaaatagatcgatgtcgatttcaaaaatctattttttctagcaattgttctgttatcacggtatgattctaaaatgtctttctagatttgtttgtacctgttctttacaaggcatacacatcagatttagatcgatggcgaattataattcatagagttcaaaaggaagtcatctgttttgcagcatgatgtattccctgtactacattacagaagacaaactctgtagaatagaagctcaaaaaaaaaaaaaactctgtagaatagtatttattggttactagcagtgaaacctgtcagcttataggtttactatgtgtaaattcccaatatattttatgaagaagcctcattcactggactaactgtttttttactgaaatctgaaaccagattccaccgcgctcatactccaaaagtttgataactcattttggtctgcaagaaagttgccctgatggaacggttctcattcgaaggactctcaaggaggatctcctaagggcacgcgcgtttcgtggaccgttgaaaccacagaaagaccaatcatttacgccaatgagttacactagtacaattcctggacaacatgtaagttggcatttcaaaattcgaattttctctcagattttatgattctctacttcggaatattttttttttgggtgatacaccaaatcatcaccaaatgtatccattttgcatttaatctaggacaacattcctcttactttatggatattaaatggtcatttacaacattcaaaagcaaaaattgatgctaatttattatgctgtaaaatgaaggacaatgatgcttccttgagttagtaataaacttggcaaaatatcgagaaaaactgcctctaccagcaaaagtccaatttcaaattagatttggcaatagacctatatacaggttttgtattttcattttgaaatggaagttaagaaatacttcagattttgtttgcgattacatggaaataattcagatttttttattgtatttcgttcaaattttacataacatccatacctgtcttccaaataaaatatattaaaatgatatagtactttgattcatgtaaccattttattttgacgcatgctatatttatatgttttattgcaaattgaaacgaagaaaatgatagtgacatcatggctagcacgcgtgatttcagcagatagcatgccagcatgatttactgagaaaagacaatgtatttatgggagcaatcaatgtttcttttaattacaaatcatgaatcaaatatttagatattgtcacagctcttactcctacatcagatggatggaggaccaaaaaaaaaaactcacttgtgaaacctataatacacatccacagtattgtccatttgaattcagagctactcgttnnnnnnnnnnnnnnnnnnnnnnnnnnnnnnnnnnnnnnnnnnnnnnnnnnnnnnnnnnnnnnnngtntatcatcacaaannngccgtaca

SEQ ID NO: 15745 - DNA, 56178 bp, Oryza sativa
  unsure (1)..(56178): unsure at all n locations
tctcaanttagatcgcnctnnnnnnnnnnnnnnnnnnnnnnnnnnnnnnnnnnnnnnnnncagttagtgtcatacaatctggatggcatgtgagtttttcttttcacttttgatgattttgtaggcattttctgccaaacacctttgcactgtatttttacccttatctatactatacaccaggtcgatcctgaccgcgagagcgacacccagacacgattggtgacttattggacggtgggtttcgcaggatagaaatttgtgaccttctaattggaaagtattttgtattggagtacctcttggtagctagtctacatattgacagcagaaaatctcctgtaaacaggccgatgactaccacaagaccggctgcatgaacatgctctgcccaggctttgtgctgctgagcagaactacctctcctgggatggtacttacaacaggatctattcctctgaatatgaccaaggtgatcaatgctgttcatcacattgcactgaacctttttaatgttaagaaaggtgaattacatccccgcgtcctacgtatatattctaggggcctgttcagtttgttgccaaaatcaaccttaccatttgttggtaaagccaaattttagcaatgccaacattttggtaagttagaaatgtaaagataatgtttagtttgttaccttatcaaatattggcataattttgtgaggagaagtttctaaaatcttgccaaattctatgggcattaccaatatttggtagcaaaccaaatgaagccaaattttggcaacttgccaaataatggaatggttcaaaatgacaacaatctgaacagcccctaggatgcacacaatcaagtattgcattgaattgaactcatcacctgcagaagtacatctcaagtagcgtaaatgtttcttagatatactaccaccaaatagagggaaaaaaattgaaggtgaaaatgatgataaataatataaccctaagattttacagcgaggatagttttattttaatttttgaggctttagagtgtgctatgtggttctctactatttaattcccgttgcaatgcatggacattcagctagtattatgaaaaaaaatatacgtggtttctgatgatacatatttttgcaacatgtgtggtctaggatatccaaaccgggaactggcaggtggtggtcggtgacgaggtcgtgggctacttccccaaggagatcatcaacgggatgagcggcgggacggaggtgcagatgggagggatcgtgtacgcgtcgccggggcagaagagcccacccatgggcaacggcatccagcccgtgcacggcggcaactaccgcgccgccaggttcacgtgggtggcggcccaaggcgccaggatcgccaactggacggtggcgagagatgtcgccgacatcaacatctacgacgccacggtcacctcgagctcgggaacaggcccggagggagctgtgttcgaatatggcggtcctggaggccagccgtgagtgagtgacttcagcgtggcctctgtctttgatagtgtcctcaccttatttggaggatgatcatgggtgtatttggttagaggaaattgatatcagccgtaatcttagcattttccttcccatgatgattttttttaagataatggaataaatcccggctttcccgtgacgatgactgtccatgggaactgggggttagtagggaatgcaacatttctgggagtggatgtgtcaaaatggttcaatgaatggggttaataatccaggattgatgcctgtttaaaggaatcttttttataatagactatattttcagtatttccttaacgagttatagtcaattattacaccaattcgctcagaagcgttcacacaccaatgagtccaaaaaacacaccaatgtaacataaagaaaatacaaactaataaacaccaacacaaaataaaagacccgcaattattgaatcttattcgtgaacctatactcgaagttgtgaaaatctgcactcgagtttacgacatgcaccatttattagtttgatgtattcatcgaacctttgtagttgagcccaacaccggagacaacacgttaccttaaaaagtatttgcatataagattttgatggtgatttatcgaagaccacatcatttttattaagtcatagagctcaacatattactgatgctcttacaagaataagtttcttagtttttttttatcaatacacacaagccaaatcccaaaaatatgagatataatatgtggagggtataatataaaagcaatatgtaccgctctccagagaaatttgggaaattagcaatccaagaataaatgatatattgtcttatttttcattaaaaaacaatatctcctactaccatttcaatccctcctaaccaaattatcaatgctaaatattcatggaatattggcttcaccgtaatcctgtactcataatacaaccatataagacacgtcccaaaaagatgaaggatacaaaatggacttattctagctatataagacatggcccaaagatatgaacgaggcataatagccttaattccaaggaggagcgtggtaggcttgtcgtgccttcaggccgacccggaacgactcgagttttattaggccgtgtctgggcagttggtgtagcccgtgggcgagcacgacatgacccggcgtgtcggtcgagccatgccagcccgactgatctcgggccatgcctggtcatgcttgggccaggccagttgacccatttagccatctatactaccaccccaccacacaagtatattttcaacaggtgtgttcgatataggtatcagctcaacccctggggttaatgtctgggccaaagaccctgatgctcagataagtttcttaaagatatttttgtaaaatatttctagaaatatctagaatgttaaatatccaaattagactatatataaaatgactgttcatacatttgagccattctgaacttaatagttttattatgaaccggctattggggttactctctagaccaaagagcctgacgctcagataagtgttcttaatatttttgtaaaatatttttaaaatatatagaatgtaaaaaatttagaatgtaaaatatccagattagactacagatagaaagactgttcatacatttgagccgctctgaaccgaacggttttattatgagccggtatagattagactataactataagaccgttgatacatttgagccgctaatgggcctgctggaggtccactctgtgtcaaaggccgacaacatcagctttaattgcaaaaggaaaaagtgcaccgaaggtccctcaacttgtcatcgggataaaaaacgttctcgaactgtaaaaccagatatacggggtcccataactatacaaaaccgttcactttaggtccctcagtgattttgaccccggttttatctgacgtggcggctgcgtcagcgtgggacccatgtgggccccacatgtcagggaaaccacgtcaccaccccctctctttttcacctcttctctcccttcctctctcctttttcctctgcgcgtggatgtcggcaacgtcttcgacgcggcggggagaagggcccgcgtggccggaggctgacggggaaggagcgcggcggagaggagggccgatgcgacgggcggcgccgccaatggctgtcgtcgcgtggggaggagcgcggcggtcgtctgccttccctcctcctccgcgtgccgtgcggcgccattgccgtggccgacgggacgtcgtcggggtgaggtggcgatgcacggtggtgcgggcggcacggcagagggaagggcctgcgtagagtggccgacgcacggtggcgcgggcagcgcgacgttccctccctctcgatcttggtcacgaaccgcgtcacgtcgccggcgtcgtcctggatgccgttggcgagcacctcccctgaggcacaaaatcaacaaacagatcaacaaattggggaaaatgtggagggtattgaaggtgaggtgagacgtacgagccatgggatggcgaagagcgcggttttgttgccggtgaggaggttacgggcgttgaggatgatatcgggaagctgcaggaggttacgggcaccaccgatgcccggagccgagttgaggcccatggcgttgagggtgagctcgcactgggcgagcgcctaagggtgggagatgatgtgggttaagaagtccctgcggatgcccgaaagtgcgaggaggcagtggtggacagggaaaggaggaggtccggcatggcgacgttgacgacgaggacgagggcctgtccgttcgcgggatgatgggctcgaagtggcgacgtcgatgacgagggcgagggcctccacgcatacctcctccacctcccacgccggccgcagccgcgcgctgccatcgccgacggcagcgacttgatggcggcggtgtcgagtcgaagatggccacagccgcgcgccgccattgccgaccgcacgaaggggacagggaggttggcgagctcgcgccgctacccgggagccgccgtcgccggccgcaccaccctccggccgcgcgcgtcgccacccgtgcgagagcagacaacgagaggaaggaaggaatgaaggaaaaaaagaaagagaagaggagggaaagagagtggtgctggcgtggcaccatgacatgtggggcccacgtgggtcccacggtgactcagccgccacgtggggcaaaaccggggttaaaactgccgagggatcttgtttgcactggttttgtaagttagaggatgcgttatatccggttttgcggttggggaacgattttgtaactcgataacaagttgagggaccttcggtgtactttttccattgcaaaaaggaaaaagtacaccgaaggtttctcaacttgtcattacaaaatcgtcccttaaccgcaaaaccagatatatgaccgtaaaatctaaacagagaggcctctccgtttaggcttaacgcgcgatgcccgtgccagccgtccattggcgcgcgggcgacgtggcgtgcatccggcgcgcgcgcttgtcccgaccgcgtgttgcttatccaaaccgagctgctccgctcgttccgaccgagaaagagagagagagagagagttgttttactatttaaaaattgtgggtggcgagagagagagagagaggcggaggcggcgacaatctccggcgaaatcgtcggcggaggcggtggagatgtcgctgcggcggcagtgtgggagggggaaggtgcggttgtttcgtcccgtcgcgccgacggcggaatcggcggtggaggcagcggaatctgcgtggaggcggcgttttttctctccacatcgtgcttgcagttgcggggggaagtgaaggctgcggcttaggtggttttctctccaccaaatctggcgcccgtgcggtaagttgcagcgtgcagagaggtggttgcggttttttttcagccggagagtggagtgatttttgtgtgtgatttttgtgctaggagaggtggagagattaggcagttttcactgtgcaaatttgtgtgccgggagaggtggagagattgtgcagttttcactgcgcatatgtgcgattttttgtgctccacaaacctctcggtttgttttctcccctataatagctctatcccctcatttcccctctctctctctctctccctcatccaggtgttagttcgtcctctccgtggagctcctctgcgtcctctcggcgagtgcaaagtttgtggtggtggatctccggcttgatttgaaggtatttcaatttttctctccatttggcattttgtacatggcttgggctgttggataattcatgattcaaattccatgttgtgtagcctcagtataataaaaagttggtgtacttctgctgccatttactaggatttttgtgtgccccttgatagctttaggtttccatgcttcatgtacaatgtaaatttgggtagctagataggtttcgagtcgtaacaagcaacatgtatcaaatcgattgacattgatttgcagagatcgaggtacattcagagaatagaggctgcaggtagcaggggggagagcatgcatgtcagcatgtatatgcatgcatgctactgatcagtggtgacaggcagatgagtgctgaccgatcgattgatcccttgattggctaatctatgtcgtcttggattggctaatccaatgtgattttcagttaccatgttgctaataatctgaagctctccctagtcattgatgttattaccttttttttttttgcaaatattgtggcatgtctagtaacattttcctctagtagcaaataatggtcgtctcaaaatgttccttaagtaacacatttgatttattgaattacatctagtctagttaaaacttactttttcccgtggcatgtgagtaacattttgagaacaatgaaattaagtttgcaatttttttgtacttcctactagttgttaagttacttccaaaatgtactgacttacttctaaacacataaatgttactttctactagttgtttagttgtaattggttagattttggtgaaactaatagtcaaaatgattttccaggaatagctaggaagaaatcccatgtaacgaaaggcgcgttggacaaactagagtcaagtcagaaaaaaaggagtgtatcgcaacgcaggaagaagagagatcatggtggagatgatgcaacgcaacctcctccaaaaaggagtagaacaaaggtattgaacaaccatctatctttctacccccgaacctgtgttttgccttttttatcactgcactacacttttttcgatgatgctgcactagacttttatttgtatttttctagaagtaacttaacatgttctagaagtaacttaatatgttgtgaaaagtaacttaacatgttctagaagtaacttacagtactttgaaatggtatttagatgttgaatatggacttggacatgtgtattttgattttgatgttgaatacagtgctacaccttattgaagttttattttttcttggaagcaacttgcatgttcctgtgtagaagtaatttgtacataactcttggtcatgatctagtatatgttgtacacaactcttggtcatgatctagtatatggccaatcttcttttaagcattttgcattatatgccaccggcaattgtgatgcttagcatttgggaaaactagcataatagctgccttcatagctaagtcttgataagttattatgtttggaacaactatacaaaggtttttgtcttttcattccttaggaacccacaacctaactgaatataaaaaaaaagtaagttagttactgtttggaagtaagtccatacagttgcaaagtaagtaggttcagctttttgttgctgaaagtaattcagtattgttatcaagtaattcagcacatattatcattctggaagtaagttagtatagtttggaagtaactcacacattactaggaagtaagttgacacacttgtagagtaactaggtacagttttgtgttgctgaaagtaaattagttctggttttgaagtaattcagcacatattgtgattctgaaagtaagttagtgcatttttggaagtaactcacacattaataggaagtaactttgcataaaacaaataccaagagaagtacctaaatagattgcccatatctgtttatcctaatgaatggtgcacaaggcatgttatacatgtttgtcatgtatgtgtagtcaaacgagatgtaatctttgtagtccttgtacgcttttcttgctgctccatcaacccggaatatgttctgcaccctgtcttccttatcaatttgtgggaaagtaattcagtacagtttggaagtaagttagtatagtttggaagtaagtcagtatagttttgaagttagtaacatgcaacaggacaataactttttagacagttacagttagatgcctctaagaagcaatttttctcattttttgacaccagtggctatacttatggtttttttttcacatattgtttttgatgcagtactagaagagaaagagaggcaactaggaggaatgcatcatgttgtgtacacataccaggtataaaatggatacagaagtttttcactgaaattacagttaaaattgcccaacaatgtaattaatggatacaaaagttgtaactatgaaattttaattcaagattattttggaagcaacttgcatgttcctagaaagtaacttattgaagtgttagaactaagttttctattaagtttgctctgagaggcaactggggggatgcatcatgctgtgtaactagggaatgtaaattcaagtttttctggaagtaactttcatgttcccaggaagtaacttattgagttgatagaagtaacgttctgttcaaatttctttgagaggcaactaggggggaatgtatcatgtttctaggaagtaacttatcgaagtgttagaagtaactttctgttaaaaatgcactgagactttatgttaaaattgctataagatttcaacaccggtactcatgcctatgtaactacgaaatgtaaattcaagtttatttggaagtaacttgcatgtttctaggaagtaactttatgttaaaattactctgagatttttaaacaacagcactcatgcctatgtaactaggaaatgtaaattcaagtttattggaaagtaacttgcatatctaggaagtaacttatcgaagtgttagaagtaacccttttgaaattgcactgagaattgaacaccagtactaatgccttttttcctctattttttttcagcagcacttgaaaagaaatttattcgatatacgaaggaagtcagaaagggagacagattcatagtattcgtatctcggggaagacaggattcatagaattcatttctcacagaagacaaaaagaacctaaaaattctctaggttagtttgtatgttttttgtcgatagatctgaaaagacagtattggctatgtagttacctgtgatctgctcttcttttctctctcttcgtgcttcctcctcctcctcttcgtgcttcctcgttttctttttctgatttttgtgccgcggcggttgagttctggattgacactcttcgttcttctctctcgttttttttctgatttttgtgcagccacagctacgttcgggatcgacgctggtccggatttgttagattggagggggggtgaggcgcgtagcgcgcttcctttaggtgggcccacgctagctgtcccacgccaagcacggtgtgcgtggcacgacgcgcgcgcggctttcctttttttgtcagaggcgcgcgcgctaaaaaggaaaccgtgttttccttttttttttgtcaggagcgtcgcgcgttagcgctatcgcgatagcgatctcgttgtagtctcgtccatatatgacatttcttaacttagaaaacagttcactttagatccctctatgattttaaccccgattttatctgacgtgccggttgagccagcgtgagaccttacgtgggccccacatatcaagtcaccaccctctctctttttcccctcttctctcccttcctttctcctttttcttctgggcgtggatggcggcagcgtcttcgacacggcagggaggagggccggcgtggccagcggctgacagggaaggagcgcggcggagaggacgaccgatgcgacgggcgccgccgccaatggctgccgttgcacggggaggagcgcgtcggttgtttgccttccctcctactccgcgtgccgtgcggcgccattgccgtggccacgcgtcatcgtcggggtgaggtggcaacgcccggtggtgcaggcggtgcggcggaggggagggccagcgagggaggagcgccgcggagaggagggccgagggctgatgcagcggaagtggcatcaccgacgcggcggggaagagggttggcacggccgacggggaaggagtggtggagaggagatcgaccggtcggttccccacctggcgaacgctagcacgagtacgaggagcaggagcatgcacaggcgatgcacgtgtagaggagcaggtcggtcatgttcggtcatgttcgtgctggtgcaggcactggtctaccacatcctccgtagctcgtcgagcgtcttctccaaggacagcaagctcggcggggcggcgacgcggcggcggagacacgggagaaggggagggcggcggcagggcgaggtggcgtcgacaggcgagcgcggtggcggaggccggagaggcggcgacggtggcaggcgagcacggctgcggatggggagcagcggcgccgacgacttcgcgccgctcagcctcatcgtcgtcggcggctccaggcgcgggcggaggactcctctgataggcgatggcgaccgcgatcaccgcgccgccggcttctcgtcgctcgtccgctgggccgcggcgccgcactcgcgccggccgcacgcatgtcgtcgtcctctgtgactgtgagtagtagtaataccacccacagcgtcacggagctctccatttcttcttcttatccactgtctatgcgacgggcagcggccggacggaccgaggtggcgagcatcgacgacgacgaggcgtgcgagctggtgagcggcgcggaccttgtcatcggtggcgacgtcgacaacgagggcgaaggcgtccgcgcgtacctcctccgtctcccccgccggctgcagccgcgcgccgccatcgccgaccgcacgagggggatgaggacagttacaaatgcctcagatttgtgatggattaattgtaagaagctgtgcactttattgaaaaaagctcaagaaccaacctagctcgatccaaaataaataaataatactaataactcaacctaaaagttaatttcctctactaattagcaaactacgagctgcaaactatccatcagaaacggcagctggaactgccaacgccggtggagagttcatcccagccgctgtaatcgctcgccgtcagccgatgcctgggcgtggtcgcttgacctgttgaagaggaaaaattatgattaaccacgattcacgcgccaagaagaggatgaacagggagaggtgttgcacaccgtcgtcgtcgtctccgcacagttggatgtgcgtggcgttgcacgtcgggcaggcgaggttgacgcgcagccaccgccggacgcaccgccggtggaagtggtggccgcactccagcgtctccggcagctccccacctcctcgcacgatgtcgtaggcggagccgcacatgccgcagcagaggtcgccgccatccctggcggggacggcgacttgcgcacgacgccgcgtgtagtcgccttggcctccgaccgccgcgcctgcttcctgagcgcggacgaggggcgtcgccgcggcggccggcggacgcagaggaggactcgccgccgccttcagcttcctccgatacagccagtacacgagcggggccagcagcccgacaaccacgacaacggcgcagacggtgccggcgatggcgccggcgctgatcggagctcctccggcagttccgtcagccgcgtcgctcgggaccgcacggtggaagccgcggatatcgctcatctcgaatgcacaggagaacgcacacacagatacgcagatacccatgttatagccgcgacggaagaccgccgttgaggcgtgcacaattgcggcaatgaccgttggaaggaggcgggagtcgccattgctgctgctgctgcgcacaatgttagaataagtgtcgaatatactagtcctatttgattacagttggacttgaagttgtaataggtgttaggggtggagttagagtcggagtctgtaacccggcaactctcttaaatagagagggggacaccacaatgtaaccatgacgactacaatgtagcatagacacgcagggagatgatggcggcgtggccatggactcgtagcggctaggagctatattggttggggaggagcgcccataatcagagccccggggatataggcttcggctgaacctcgttaacaaatatcgtatgttcctgtgtcgtcatctggcatgtcttgggtgatcaatgactgaagcgatcaggagggttagtcgtctttccgctatatcgactaacttttataacaagtggtatcagagcagaaggtttcagcattggatcaagaagacatgtggagaaggaaacacgaggtgggatcgcgcatcgataggagatcgtcagtcgtggcgatgagatcaatggcgacaacgaggacgttgtggaggcgacgacctcactcgcgatcagaccgacgatggtggagcgtgaccggaagacgaggccgggcgtggccgaaggcgttcagagagattagaggggtagcaccatggacggcgcgtccgacgcacgcggcgaacgcggatccgcggcggcagggaggccattgacggaagggcaaagctggcgagcgtggcgcggcgcggcggacgtgcagggccgatgacgacggggtcgtggacggtgaacatgagggctgcgactgctgtgcgtgcaggggcacggacgtcgtgtatggaggcatgacttgtgcacacctacacatgcataggtgtggtttccaagagcagaaccaagacggatacggtgcggagacgtcaacttaagcagggagaggtggcagtgggctccatcgtggaggagtagctacggactctagcgaagaagtttctctaatccgagcggtggcagtttcggtttcggtgtctgatgcaggcggcggcgacgactcagaggaggcgtaggctgcggcttgtagcaggaggaagcggagaccgagatcaagtcggggtttggtttttggctcgtaggaaggcaggcatgtgtaagaagtgcatggaccggtgttaacctccacaaagtcaggcggtggaccaagaaaaaaggagagagtagtagtcttttgctggtcacgttaattatgatagggttacatgtgtatgcaagcatatgttggctgccatagtacgtgcatgcattatactactgtgcaacattggtttacgtatggcagggagcccggaagaccaataagctagctgtgtggtggtgctaattaacgtgggtcatcaagctgcgcgtggagatcaaagcgtgcaaggctaccgggagtctaggacgcattggttgacgtaattaaggtggtggtgattcagtagagagatgcacaggcgcagaggcaattggtgtggtgctgccctaagacggaacttgtatggtctacggtgacttaggagatggtacatcatgtggcattcggtccagagaggatcgaggctggttaaactgggccggcagggtggttagaccgacggactggttagactgcggagcttggagggttagaccgggttcaacggaccggtggttcgttgcagaaacttgtgagcggattcagaagaagggaaaaaaggttatacggtctagatagtttgcaagtgacaatggcgaatagactggcggcgacaggtcggtcaggtcgcatatggaattatctggcagacatgatatatatgggactcgacgaggagttgagatatatggagttagaccagaactgaagggaaaaaaaagattctgggcaacatcgggtcaaatatcgttgatggggtcgacgatactgtttggcagtacatgatatatccaagatatgcaggttggcatgatggggatatatgaaatctgcatcactgacgaggaaaagcaagtgctatggtgttaatttcttcaagtgattcaaggcaacggtgaattttctcaaagtatcataggttcagtctacggatgcgggaaagcgaggatgttggatttattagcttggttcataagacaacaaggaagaaatggttctcttcaagtctggtgagtttgatttatctatttggtgatgacgcatgttatctggccatggattagatcaagtcaaatttaagatggaagatggaggtgaacatggtcttcggggagtctatgatgtgacagctaggaagaaatctaatttcgcttggcaagacgactgagatgataggtgagaaggtggagcactgttgcaggtagattcaagaggaagaaattacagggatagcggagtctcttcaaggcggcgggtctagcggaggctcgtcaggcggctcgtggtgaagctgcaaaaggaaacaacccaagtctggaggacagatggatcggcatggtgattctactacttctgggtggcgtatattcgccaaggtgaagtttgttagaatatgtgtcgaatatactagtcctatttggttacagttggacttggagttgtaataggtgttagtgggtggagttagagtcggattctgtaacccggcaactctcttaaatagagagggggacaccacaatgtaaccatgacgactacaatgtagcatagacacgcagggagatgatggcggcgtggccatggactcgtagcggctaggagctatattggttggggaggagcgcccataatcagagccccggggatgtaggcttcggctgaacctcgttaacaaatatcgtgtgttcctgtgtcgtcatctgacatgtcttggatgatcaatgactgaagcgatcgagagggttagtcgtctttccgctatatcgactaacttttataactaacaacaattacggcaagaagccgttgtgagggccgagtctgcgggccgcgccgcccctggggggccatcttccgccgatgaggcgatgagcccttcgccgcgcccgcgtggcgtcacgttcgcgcgtcgacgccactggacgccggcagcttttctgccctcgcgccgcttctcaatttgtcgcgcctccgtcctccttgagccttctagcacgttcccaaagaagctccctgctcgccggccgctttatctcgtctctcgccgtagcgccctcgccgccaccgccgcgtagcttcgtcgcgcggctgttcccggtgaccattggtgtccgtgcccacgcggcgcatcgcgagtgcgtaccggttcggccaaacccgaacttccctcgaccggcgagattagccgccgtcgttcccctcccggaaaatccgctccgttggttcgattcactgttacctcctctaggcgccgccgcgccggtggtcatcttctctctccgtctcgcactcgttcgccggaatgctccgctcgccttcagccgtcgatctctgttgcgaagcctacatcgcattcacgtggacgacgcttcggcttgttcggtcccgcaggcgaccagtcaaacgacgcctctcccccgcgaaaaacctatcgcgcgatcgatcgccctagaggatttcctcccatgcagtttcctttttttttacaccactttacttttctattttagtaagtttatacatctaaagtttatatatatctaaattttatacatctaatgtttatacatataaagtttatagacccaaagtttatacgtcaaaagtttatatactcgattcaaatttaaatttgaattcaaatatttttatatatagtatttctgtacatataagtttatacgtgtgaagtttacagtataaagtctatacataagtatagagtctatccacataaataagagtattagatttttttttcctatttttaattttttttctaacttgtgtttttttatttctaaaaatttatggtgtagtaggaagagaagaagggaagagaaacgtgttaggggagggatgtgggctttcccgatcacgcgccctcggcgtaggcgatcgatcgtgcattaggaagacccctccctcggccctcgtgctcccggccatttgggccgttttgtcgcctctatctactttaagtcgactttgtatgacatccctaattccaaataccagaaatcttcacccctaaaatgtataaaaccgtgcaatttaggtctcatggcagtatggatctataattttactgatgtggcaccctagtcaacaaaataaaaaataaaaaaaatatgtcacccacatgtagcatcttttctttctcctctcctctttctcttctcttctcttctcttttctttcttctcttctcttctcttcttcagtgagctgggaagctagggcggcgcggcagaggcggccggcgagcctggaataggggaggtggccagtgagccctactcaagcccatggagagccaccaatgccgtctccggcgtgctcatggagatcctggccacacgggtgatcagcgccgtcgtcatgctccgcgagttcgccgcatcggcctcgcccgcacttattaatatgtgaccccagtggtacactgttgaattgatctgccgtgttgcttgtcatgtatccatcgagcgatgcctagtgctctctactagtagtattatattactagtattattaggagtaaattagtaatttactaatacaataattcaagagttattttgtcatttatattttttccagctaaatcgatatatgatcattcatttgcattgacattgatcatattccataaaaaagccaaaaaaaaaagaaggaaaaatgtttagtcactgctaaatgaaaattataccctcccccactttttttgttgacaataatgaatctccacatttttactactgctaactggtagtataaataaacctgaacccttcgatcaaataagatcaatgatttatattgttttctattacccgcagaaagcatcgtagtgggctcatatcgataatggtgtccatggtatcatatgcacgatcgtcatcaagtcattttgtgtttcataaagcaatgctcttattatagtttttaggataactttttctttttttaccaattcgtcagaacatctggtagttaaattgattagagaaatcgtacaagactaaaaagaacgagaagctgagtgccaataagccattacactgttttcctcctttttttggtagctcctgaaaacaatcaattgcagcacttattcacaggatgttgtataaattacatctctcgggtactatatatatcttccaatactagttgatgagcgcgattctgctcaggcagagctctccaatagttgagaatctgaaaatggaaagcaacagagtgcagactctggaagattgcgagacctttgtaaaacaggctgcccctcttctgatgctactctcttgcatgtattaacctctggtttatggaaccaacagcaaattcttcatcctcctgggtacaaatctcacttgagtcactctcacctgcttcttggcagagctggtcatccgatgccatcagaatgttccttcgagcacgatctctgtcccgaggatacgtgcagtacaggaaggtgtatgtcaggcaacagatggccatgggcacggcgatctccgtgtacactgccttggccaatgcagccgcattttctctgtccgtttcgacgcttgcgtcagaggagaccggcttgtagccgaacacttgctctgctagaacaccgacgatcggtggcgcgaatgaagcgaacaccgcttcaaagcatttgtcgagagcgtagaccgttgttctcgccttctccggtacaatctccgcgaagattgggctgcattgcaaaatgtaaattgtaagacatatcagcattgcattggagattcagatatgaaattgtttcagtgtcgagcatggtacttgtttgtggatgacgcgttccaggagatggcgaaccccatgatgaagaacacggcggcgtgcgcgacgccggtggacgggtcgttcggcagcgcgaggagcaggacggcggcgagcgggagcgccgacgccgagctgatctgcgccagcgcgatccttccggtgttcgggaaccgcctggagacggggtccccgacgaggccgccgaagagcgcgccgagcgcggtggcgaggaggtagagccccgtgatgacgctggtctcccagtgcgtgaagccgacgagctcgagccacatggcggagaagttgagcgccgaccagggtatcgacccggcgatcccctgcgcgacgatgatctggaacgtgggcacgccgatgacgccgcgggcgtcgcggagcagctcccgggcctcctcggcggcggaggcggcggtcttggacttggcgcgcgggtcggcggcgaagcaccacatgaggatgcccagcacggcgctgacgagggcgacggcgtggaacgccaggcgccagccggcgacgccgaggaaggtgaccggcgcgagcagcacgccgaaggatccccccatgatggagccgaggttgcaggtcatctgcagccacccgaacgcggcgccgcgggtgtggtcgtccgtgtagtcggcgaccagcgagctgatcgccgggagcaccagcgccagcccgacgccgttgagcccccgcgagatcgccatctgcgcgcgccacggaattttttcagttcatccagttccctctctcccttacaggtgggacccacagcgtcagtggaagaaaaaactgaggctgacagtctcatctttttacttaaacctatctttgtaagtcaaaatttaattttttaatttctaatttaaagttgactttatcgtattttatttttcggcctttatttcttatcgctaagaacacttacataaaagttttatttgtaaattatttttcgtttgtaaatatatgtccatagtatgccaaacgatggagctttcttcctgtttgtctggtttttcttatcgaaatggagttttttcgaagataaaaattgggatggaaatggaatattcggataatcaaattatataggagtaggtgcgtgtaaaacggggaaggtggagtgggtcccgcagtcagcgagaggggaggaggtgacctggaggaaggagccggagacggcgacgaggagcgtggcggcggcccagaggaaggcgccgacggcgatgacgcgggcgcggtcgtggcgcgcggaggcgtaggcggcgagcgggtacgacgccgcctggacgatcgcgcggcacagggtgagcgagcccagcgccgtcggcgacacccccagctccgccccgacctcccggtacaccgccgggagcagcacctcgtcggccttctccagcaccgacgccaggttcaccagaaccagcgtccaccgccgccgcgcctccgcctcccttcccatcgccgtcgccggtagctcctctcctctcctctccttctcgctttgcttaaatgtggggagcagaagcggaacggagtcgctggagcatgcgtgtcgttgtgaatttggggtttggatggggatgttgacctgggcgagcaagagcaggagcagccgagctggagctgacagcgagatccgccgcgagtgttggggattttttttcaccacgagagcttttgctgctttccgtcttaagatggttcgttggcaactgggactgcatctctgattctgaatggactggagttatgtcaccttgttttcgtataaaccgctaaaaaaagaggagattgaggagtctacttcaatgcatagcaaaattagcgattgccgcttttggggatttgttaggagtgtagcgtggctcggccccttcccgttgtttggagtcttgttttagccgccgtagttttataagctttagctttttattttaccttttctcttttcccctagcatcataagctggtctggctgattgtgttgtgtagatataacatttttcttctaatatattgacgtgtaattcttttacacgttcgaaaaaaaaacatggcaaagttagcacctgattaggatgtgctcgaactggatcactggaacacaaatctagattacttagagatggcaccaatcgagccttttggcaaaatcaaccatggcatttgatgtccgctctctatctcgccatgtaacgggacaggcacagcccatgtggaaagcgtggttgagggttaagttacttgacagagacatcaaacattgtggcttgcgaggcagcaggaagagaaaacagttgagaaattaaaaatcggcttaagcatcagcggcacaaccacatttccccttcctacatggaaattaaaatttgcagctggaattaaatggagggagagagcaagttgcccaggtgctgagcaatgtttaacatgctttggcttctattcatgtcaatcagggcgaaacataaagcaccatgtcaaccctgtcctagtaaaagggatttgtatgtgtgtgaaactaaacacacacatcaattggtggcaaaacagaaaagtacttcaaatttaaaagaataaaaatgaaaggcgcccaccgtggggctcgaacccacgaccacaaggttaagagccttgcgctctaccgactgagctagacgggccaggatggtaaatgttacattttcattgttgtatcctttacgttcattcctaccggcacaaatgttaacactagatagatatttaaccattttcacttttatatgttacgtttaacaagatatcactaaacctatgtattataaacacataaaatccatataacataaatatgtaatactaagttcgttgcattttaaatacagtcatgggtttttatgtcaaacgtttgacagtccatcttatttacaaattttataaaaaaaaataaaaataattagtcatatataaagtaatattcatgttttattatctaacaacaataaaaaaaattaattatattttttttaaaaaaaacggatgatcaacgttagatatagactgtaaaactatggtctgttgacaacttgacataggtaagtgaactgttaacaacgttcagtccaaactccaaatgaagacaagggtcgcgactctccaacatcctctctcctggtgaagtggtaattgccccggcacacgccgcttctccggttctcttcccccactccatactgctgctcttccccggctgcgttggggtttcaggttgccctcctcctcctctgcattctcgttctcatccctcccatttgattctaggcgatttcttttttcgaatttatatgtactattttttgggatttctcgggtatattctatagattttcatttttttaatcttctagagtttgaaatagagccttctccttccgatccgccattatccaaacaaacaaacggttggaggggaatatgcagccaatccccatggggtttatttgtttttcccatgtgaaagttcccccccaaaagaaaaaaaaaatccccatttgcctcggtgtgtgctgtggcattgcccgtgcacgcgaggtgttcgacgtattgccctcgtgcggaccgcaccgtttccttgtggggtttgtttggatcctgatgcgttcgttccccgtgatgatgtagcgctaacgctcgcgtgatgtctcggtgtctttcttgctgtatgcaaaggtttgacctcggcgggcgcgccatggcggaggacgaggcaacggcggcgcgcgccaggcagcagaggcagccgccgtcgtgggcggacatcccgcgggacctggccgtccaggtgctccgcttcctcccggcccaagtggacagagcctgcttcgccgccgtgtgtccgcagtggcgcggcgccgcgcggaacgccctcctgccggcgcccctgccgctgctcgcgctcccggacggcgccttctactgcctcccctacggcaagcccttccgtttccctcgtgccggctgcgccggctacaagaccgccgcctgcggccgctggctcgtcttcccgcacgacgacggctgcttcttggtcgaccccttcgccggcgccaccgtgacgctccccgccctgtcccgtgtccggctccgacccccaaatgcggttgctagttatgtaaatgttgggatcgcagggcgtaatgcacatgtcagcatgttctaccctcacgctacttggatgcatatcaagacttcggacaagatgcccataaacaagctactcctgtgctcgcagaacctcgtcgccgcgttcatcggcagctcactcgccaatgctggacgcaacagccagattctagtgtgccagccaggggcgtcctcatggtcggtacgagcttatgacaagtgcaagctgtttgaagacatggcattctaccgggggaagctgtacgccctcgctcatgatgagaacctccttgtcgtcaacatcagccaggatccaaacaccggcgatccacagatctcccaaattgggcaggtcatcaagggcgatcccacctggtcttcagttctgattacggatgacgacgacacaagcacaacggacaaaaagaagctctacctagttgaatcatgtggtgtattgctgatggtacgcaggaaggtttgctgcagagtggtaggcaagaccgtcgtgcctggacagaacgagtttgaggtgttcaaggctgatttggagaactcacggtgggtgaatgtgacaacccttggggttgatcagatggttttccttggacggccatgctctaaggcagtgtccgcgtctcagtacgggatgccaaatgaccaaatcttcttccttgatgatgttatggagaataacaaggagtattcctatgaggaggagaccacttctgtcaatgtctacgacatgaggagcgccgaggtctcttcccctctgccgatggcctggaagcatgagatgatttctgcaacatggctgttcccttgggattgaagcgaaggtgtgttgccatgcaatctcgcagtgattattagttgtcctggaccattgtaggttgattgatttactgatgttaacttcatccgaattcgtcaggcctcagccttagtgtggtgactaagttcttttggggaaacctcaattatctgactgtagtttggtccatgtctaagtattttggagttgatgacacaatgctaatgttgtgaacttataatgaatcttttgtcaccagctgggcttatttgaattgtgtatgtttttatcagttcttcattgtgcaggtcatatttgaatagtgggccgttcaatcatggttaccacttatcagtagtaaccattgatgttctccgtatcacgttacaggatgcttttatttttgagctatctgttgctactgagaaagggtccctgccatcttaccgtaccctggtttgttcttgcctcctggttcatccctgaggccatgttcgtgaacattgcttgcttctgctggcaatttctcatggatatccttgtcgattttgaccgaaacccatgctgattatcgcattctggcaccaaatcagtcgctggagcaaggcaccaaactgatggcaggtttctgttttgtgggttgaattggaagtaaatcttgaagggaaagcttgtttcccaatgttttttttgccgcagtaactactgtttcccagtgtatacaagacataatgttttcttaaattaagtaggttgtctcatactctcatataaggatttcttaaattaagtaggttttctcttgggggttcagtgagctgtcatgatgccatggtgttaaaggacagcctgcattgtgtgtgtgtgtgtgtgtgtttgggggttacagcaacacattcgtatatatgctgtgacagatttgttaaaggaaaattataaagcagtgttcttccaaatcatgccaatcactaaggtcccaaacatataatcaattaatcaacattcttacctgtacatgttagctgttgaagaaaactattcaccttcagaaaatcagtacttccagagattcctgtaaaaaatactactggtattactgtaggttcataccgacctggagatctgataaatcacattgtttgtctgtagtctgtttagttcatttggcagctgcactttgttcagttcgtagtgcattagtgttttgtcaccgtagtcagcatccaagccttcctcctcatactcggcccttttcttctctaacaaaaactggataaacttttggataaaagtgacacacttttcaaaccactaaacggtgtgtttcatgcgaaaactttctatatgaaagttgttctaaaatataagattaatccatacttcaagtttgtaataatcaaaactcaattaatcacacattgttaccaccccgttttgcgtgaaacacttaatctttatcttcatcttcattttcaggagattcaaacactattgtatcaatcaccgaaacatcttccccgtgttagtaacattcttatcttactaaaccatccatgttaatcagggccatgaaccatgaatgtcaactgtcaagtactcaagtcctcaaactcaatttatagaaacaaaaactattagaaaagagagagagaacgacgccaatcagggctgtgaactatgaatgtcatgtactcaagtcctcaaactcaatttatttatagacaagaaaaatggtcgacgcgtctcctcctcctcctctcgcccccttgccgggtgccgctccggcccaggtgcccacccctcctccgccgtccagcccggccccggtgtcctcccccgctagcacaggttccttcctcggctctcctccctttccggagagagtcagcctcggctccctctccggcgactgctcggatggggattcgccagatctgcttcgccctcaattcctcccggcagatctggtcagtgaggcagcggatgcgcgtccccccgtggtgccagccaagatccagcaagttcccccctccacaggttcttcaggttttcaggcagccccgattttgctgcgcagggtgggtgaaggatttactcctcctgtgccctccggcttgaaggtaaagggagttactcctcagggtagcttcgttcaagcagcaagaggaatgacttcgccctcgcagcttcccaaagcaatcccggtaaatcttcagtctgagactgccacccgtcttcaagtttggcagacagtgaagccaaagcattggtggaggaagagacctgcccaacggccttcggcattcatgcgccttcaatccgctgctcctcctcagcttccctttgcattcactgatcgccaccaacctttcccctcgtagcccaagcaccttcaggaccaccgagttgctttaaagagcctcttcaacctttgaagagcggggtgtcactgcttccgttgtctagctcaggaccaccgagttgcttcctgtagagacccccttaggtgcattctctgtggcggttctggccacaaagcccgctggtgcccgggagacagacaatggcataggggggtccagcctcctcgccccactcctgctcctccgctagccagtcggcttgttttccctccgctcccggcaatgacgcgcccaggggaaccagccaacaggccggacagcatccagcgcgtcctgcccaggacatcggccatccgtgaggacgaaagtttcctttctcactccgcagcggtggtacaggttacaggcaatctcccagtgacgaacatgcgacagatcaacaggttgctggcgtccaggttttaggttcctcatgaggacctcaatgttgtcgtcttcccaaaaggaggctacctggtcacctgcacctctcggtcgctcagggacatgatggttgcggcaagcccttttgctgtggaggacattgacctctcggtgctcccgtggtcgagacgcgtccaggcagagctggtcaaatggcgcttcagcattcgtgtctgctttgaaggcatccccagccacgctaggtcggcagagacagttacaggtctgcttgatgaaggttgcttgatctaggaccttgatgagccaagaacggagaacgagacagcttgcctctgcgcctggctgtgggtggacgatccagactccatcccaaggaggtgcacttcgagcttgaagaaccgctgtccccacgctccccagactcacgctgggacctggacggagaggctcggcagaggacttcccctcccaagctgctggcctacccggtgctcgtgcatctcgatcaggtgctcaacttcaacccaccgccaactgagccaacttggatgnnnnnnnnnnnnnnnnnnnncagcggaatcatctcccctgtcttgatgacagaagaaatcccaaagcgtcatgattttatctggagcctcagcgtcaaggatggcactcttgcccctcagcctccggcttcccctagcccgggcccaggcagagatcgctcgcgctcacgttcccgctctccgccagcgagggagcgccgccgccccttgggttgggatgtccctcctgctcgcagctcagctttccccaggcgctcctcttccaggtcttcgaagaacataggtgggtcctacgggggtggtcaccgcagggcagcttgctctccggtgagggccgctcgctcaaggtctccgtgtggaaggtcatcccccccgccatcgctgtcggttcctgcagcgatgaaggatggcggctcccagctgtctcgccccccttctacacccccataggacccgatcacccaggccacccctcttcaggccaaccagtacgtgatggaggctgaccctatgctggaggagctggtagctgcccaggcgtcccagtccgccgtgctgatgtaggtctctcgggctgcccaatctcaaccttcccagttgcctctgatgatctccccagacaagcttgcagatttcctgtcccaggccttcgcagtggtgcagcctcctctgctcaaaactcccacgcgccaggtctccaagggaaagctcttgaagaagagcccgactcgtcttagccaggcgggccgcaagagtgctcggttggccaagaaggcagccgctcgttcctctccggccaagcaaggtgacctcgctcatgagctgctgatgaagaaggctggcctgctccctgaggacggcaagaagactgaggatgcaatggccaaatacgtcaagcttttcaagcagcctctctctcaggaggtcatggatgccttctctgctctggtggctggctgcgccattggtgacagcaagaagaagacttagttggcttcgtcgcttctcgatgtgttgttcccttttgctgtcatgagtctctgtagtagtgaaatgggttgtttgcttctcctgaggggtttagagtagtttagtttcttttggagctcctgtagctctagttggctttgttcttctatgctgtgcctcatgctccccctgtacctagttagacctcgatctagtaaggatggtccttcagtcatgtatccaggtcatgtctctacagaaaatgaagtgctcagttgcctctaccggccaagctctacctcatctcttcctgcgactgtgttttgcttctctactatgcttcaagcctcaccattcctacaggttgtgctcctccatccgcttgggatactgcaggtgcccatcccgttaaatgtctacaaatgattgtgccattttgagttggaatgttagaggcttaaactccacagcccatcagcaggttgtcagaaaccttgtcatggacataaactgctcctgtgtatgccttcaagaaactaaattagagttctttgatcaagcaatagtcaacagggttctaggtccttcgtttgcagataatttctgtttcccgccggctacaggtacaagaggaggtatcctgctggcagtgtctgactcaaaatactcgattgaaagtgtgcaaacaggtgtttactcgatcatggcaaatttaaaagaaaaagaagatggctcggcttggagcataacaggggtgtatggaccacaaccatacaatgaaaaaagagattttctggaggaactaaagcaaacaaagaacacagtaaatcaaaagtggatgatcttaggtgatttcaacctcattgtccaggactccgacaaaaataacagcaatcttaacaggggcatgatgcagtcctttagggcggctttaaacacgttggaagttattgaaataaaactaaatggccgtcgctacacctggtccagcgaaacagaaataccaaccttaacaaaaattgacagggtgttttgctcacatgagtgggaagaaaggttcccaaattgcttgctttcagctatctctacgatggtctcagatcattgtcctctgctgctaactgcaaacccttcggggcctaaatgcaaccttctcaggtttgaaaaatactggataaggctcccaggattcctagaaactgtgtagtctgcctggtcaaaacggtccactcgcctgatgccctgaaaagaattcatatcaagttagcccgaacggcgaaagcactaagaaactggagcagatgcagagttaggagtctaaagttgagaatggagatagcttctgagctgatccttagactagacttagcacaggaagagcggaacctctcagctcaggagatccttttcagaagatcccttaagcagaagctcttaggtctagcagccctagacagggtgcgacttcgtcaaagatccagacaagtatggatcaaagcaagtgacgcaaacactcggttctttcaaatcaaagctagcgcgagaagaaggaaaaacttcatacaacacctcctgacagactccgggatggttcactctcatgaagaaaaaggacaagaacttttcaatgtttacaagcagcactccgctgtgatcaatccctccttacaggaacacaaccttgacctcgctgatctagaagcacctttctcagttgaagaaatcaaaagtgcaatttttcaatcccgttcagacaactccccgggtctagatggcttcacaggtgctttttttaaaaaaatattgggacatcattcatgaagatatcacacaggcaataaatcaggtggcaaatcactcctctcaaagtctatggcttttgattttagcctacattgctttgcttccaaaaaaaagagaatgctcttcgtgtcagtgaattcagactcataagcctcatccatgcatttgggaaactcttttcaaagctccttgcaaacaaattagctccgaaacttcaacagcttgtgtcccacaatcaaagcgctttcataaaaggaagaaacatacaggacaacttcctcttcgtcaacaacttggtcaaagagctccattcttccaagaccccggcaattctcctcaaattagacattgccaaagccttcgactcagtcagctggccttaccttcttgacaggcttaggacgctggggttcggtagcagatggctaggttggatctgctccattcttggttcttcttcttctaaggtcctcctaaatggaagagcaggtagcagtttcatgcatggcaagggcctacggcagggtgacccgttatctccgattctcttcattctagccatagacccgcttcaaaaccttcttgtggctgcacaggatgaaggcttgctgcagccccttcataggagaactgcccgctttaacatggctctatatgcaaatgatgctgtcattttcaccaggctggtcaaggatgagatacaggcagtgcaggctatccttcttcactttggacgagcaacgggaatgatcactaacctaacaaaaagtgaggtttacgccatcagatgcaaagatctagacctccaggatattctttcccccttcccagcccagttgaaagaattcccgtgctcctaccttggcctacctctgcacatcagaaagcttcggaggcttgatgttcaacccctaattgacagatttgctgctcgccttcctacctggaaaggaaaacttctcaacaaaacaggtagagcggttctaatcaagtctaccctctcagctttgccaacctatcacctcacggtgttccccctcaagaaatgggtagagaaaaagatagacaagattcgcagggctttcttatggacaggttctgagcaggctaatggaggtcactgtctagtcaactggaagagggtttgcagatcaaaagatttaattagggggactcgacattactaatttggaactttttggtcgtgcactcagactgaggtggttatggtatgattggacagctcaggacaaactgtggcagggctcaaaccttccctgtgatgaaacagataagcaactcttcagggcctccaccatcatctccttaggaaatggtaacaaagccaaattctggcatgaacgatggctggaaggtaaagctcctaaagatattgccccatccttatttcagatcgcatccaggaaaaacaggacggttgcccaggaacttggcgataatcgctggcttcgtcagatgcggagaatgaacagcacggtccaagtcagggagttcatcattctttggcactctctgcagcaaattcatttgcaggatggcattgaggattccatatcatggagatggaccccaaatggatgctattcggctagctcggcttacaggatccagtttctaggaagtatacaggacaacagatcaactttcgtttggaaggccaaaacggaaaataaatgcaaattctttggctggctgatgattcacagaaaaatcctcactgctgataaacttcaactaaggggctgggataacagtgagatctgtcccctctgcggcattgaaccagaaacggctaatcacctactcatggattgtgccttcgcaagacaagtttggagctccatgtggaacaagcttggcctacacatgccttcaccctctctttttccggggcgtttgctagattggtgggaggcttgcaggaaggagctagttaaggaacaaagacgtaattttgatggccttttcatctacactgcctggggcatttggctgcaaagaaatggaaggattttcaatgacatttacaactcggtagctcaggtcgttaatttcatcattgctttgtgcaaagagtttgatgaagcccttagttcctagatgagttttctacgccttctacttcttgttgcagttcactttctcaagattggggtttcccatctgtttttaatctcgcaagctgtacgcttgccctcagcttgcatggctggcttgtaaaacgacctccttttctgctcctccttttatgaaattggcagagctcctgccgtcttcccctcaaaaaaaatttatttatagacaaaaaaaacgtattagaaaacagagaaaaaacaacgcccaccgtggggctcgaacccacgaccacaaggttaagagccttgcgctctaccgactgagctagacgggcctacacaactgagcaactataaattctaaccagtaatatttctgaatcttacaaaactgctgtatgattccatcaaattataggctcaaacagttaaaacagtagacaatagaactggtgaccaaagatcacatgccatttcaacctagagtctcccttctcctggcccacaaaaatcttgctaatcactaaggtccgtcacataaaaccaattaaccaactaaccaacattatttcctatatacgttagctattgaggaagctatcatctttaaagaatttgtgctgtcagagatttctgtagataaaaaaaaactgctggtatgattatcctgtagagtatgaacacagacctgaagatctgctaaatcacattgtcgtttgcctgtattctcacacttctcacgtctaggtcatttgtcagccgcgctttgttcaattcggaactgcattaatggtttctcatcatcgtcagcatccaccccttcctccccatactcaatattgatcaccgacacaccttccccattgtaataatcactggtccgatgagatctgtccggttcaatccgctgcagctctgaagttatcagcgaatccattcttgccctctccctgtctcgaggatatgtttggtacaacagggagtagatgaagcaacagagtagcatcgggatggctattgccgtgtaaagagccttggctagggcagcggcattttccttgtccctctcaacactgcttatgccaactccataagtgattgggttgtagccgtatgcatgctctgctagatacccgacaactggtggagcgaatgaagcaaataaagattcaagggaacgatcgagtgcataaatactagtccttgatctctcaggaacaatctctgcaaatatagggctacaggcaaaaacaaattagtcaaatcagtaggaataatcacaaacacatatagtcaaatcagtaggaatttggaagtttactgctattattctcatgacatgatatataatatgattcctccttttcaaaaaacttatgctatgccttttggctctaatcaagaaattatgaaaaggctggtacatcatccagaacacataaattttgtaacatatctttagttttccatctcaagattatattttaccttcggaaagaactactatttttccaaaattccaaaatggattacggttttgcacaaaacatgactttagagtactgaaattttagtttctttgacaaattctttcaatatcaaagaaagcaacgaactggtacatgttgcttacttgtttgtagcaggagcattccaggagatgcaaaatcccacaatgaacatgactgaaccatgcaaaaaacctgtagatgggtcttcaggcaagcctagcagtaaaagagccgcaagaggaattgcagaagcggagcttatctgagatatgactattctaccaaaatttggatagtgcttagcaagataatcccccatttttccaccaaacagtcctcccagtgagcttgctactgcagatgtgaccatgagaattccagttcccttatgcgtaaaacccatcaactccagccacattggagcaaatgataaggcagaccatggaaatgaacctgtaattccctgcgctacaatgatttgaaaagatggtattttcacaacagccttagcttccaccaccaaatccttcatttctctccaagcagacttgcggacatgctgctttttgtttccaaaattgatataatgaggatccaccgcgaataggcgaaccaatataccaactgtgacactgatgagagcaacaacatgaaaggcaatgcgccaaccagcaatgcccatgaatgtagtagatgctagcatgatggagaacaaccctcctatcagagaccccaaatttccagtaagttgaagccatccaaatgctgatccccgtgaattgtcatcggagtagtctgccaccaaagattgaatagcaggggttacaagtgctagcccaataccattcattcctcttgctacagctacctacacaaaataattgtcatttcaagtaagataaggtcatgccaactcttaattctataggcagaatagttttctctatttaactgctgtaacttgccaacattattggttacaccagcctattctaatatcagatctcacctagtaacataacaagaaaaataaacagacaggaaattcatgcctgaaaattaaagctggattcaaatagaggtctgcatcgtatgattcgtcactatatccacggaatcagctcagatcggtgtgcccaatacatgaatgtatttatagcacacaagcttagaatagcacggtcaaatactcacatgttgaataatcaacaaaaatggccagctgagactactgaatcctagaggtacaaaatgcgtccatccttcgatccgaaatgcgatctggagttctgaacagcagaattggacaaattttgctatgaacgggcctagatcttcggcaaggtaaagtgaaacagactggaatatttggtaacaactaaaaagcaggaatcgagatattccgaggggaattggaatcagacctgcgcgaagttgtcggagacggcgacgaggaaggtcgcggcggcccagaggaaggccccgagcgcgacgacgcgggcgcggtcgtagcggacggcggcgtaggcggcgagcgggtagcaggcggcctgcaccgaggagcggcacagcgtgagggcgccgagcgccgcgggcgtggcgcgcagcgcctccccgacctcccggtacaccgccgggaggagcgcctcgtcggcgcgctccatgatggccgccaggttgaccagcaccagcgtccgcctcgccgcctcctccatcgccggcggcgcggcgcggcgcggcgtggcgcggcctcgcctcccgatctcggaaccctcgccgcgttgatgtttgagttggatcttcttgcagcggtagtcttgctggtagagggaaattggtaacggccaacgggcagaagatgctactcttgcaaataggacctttgctcgatgagcaattttaaaaaaatcaagtacaagaaatttttaagacaaatttaagcaaataattctgtccaatgtaatatacgaaataatgtttatatgcttgaagttttaaattttactaaaggcatgactagtattatgcccatgttttacaaggaaccatgctcatatagttagggattaactggttgggtggattaaaaataaagcacgagcatttgactttcttcgtatgatgagaaagggatgaaaagatgacgactgcacttttatcatgacaaaaagaagccattgtcactcacatttagggtctttttatttggtgaaatgaaaatttttgggtatcacatcggacgtttgaccgtatgctggaaggtgttttcggacataaatgaaaaaaactaatttaataacttgtctggaaaccgcgagacgaatcttttgagcctaattaagccgtcattagcacatgtgggttactgtagcacttatggttaatcatggactaattagactcaaaagattcgtctcgcgatttatatgcaaactgtacaatcagtttttctttttatctatatttaatgctctatacatgtgtccaaagattcgatatgatgttttcgtgaaaagtttttggaaactaaacagtgacttagggaatactccctccgtcccaatatattagaacctaggatgggattagacctatcctaaaactatgaatctggacatctttgaaaaaaattacgtaagcatatgttggagtgaataattttttaaaaaaatcttcatctatctaaatagtctagattctcacaaaatttgtattatagaatttaaaaattaaactgaagctagaagatacaagaaaatccagtagtttttctatattctcaacagctaactgtgacaatctggagtttcgtcttatggcgctgcgtacactcatggaacacaaaaaccgtgaaaagcagggtgccgtgcgcaagaatccaacagccgaagctccggagatctccatgcagggaggaggaggaggatattggcgaggtgcggcggaatatcccgccgcgtaggcgacggacgtacgtcgtcaagccaaagtctcaagccggcacaccgaagccgagtcaaagtggcgtacgtgggccgcgtcgctgcgaggccatcgcgacccactcaccacgaaaaagaagaggtcaccagcccacgtctatcaactaaaggaaaaagtccagtttgactccttcaaagtacgccgaatctaattcataccctttaaccagaacaccgggtagaatgactccctcaactattaaaaccggtataatttggctccctcaacggttttggagggcggtttcgctgacgtggcactttgactcggtccaaccggctgactcagccatatgggacccacatgtcaatgtcacattttcctcttctttctttctcgttttcccctctttttctccatggcgctgcgcggtgactagcggcgacgtcttctctgtacccgtgctgctaccgctggtggagtatgccgagcgcgccacacgggacggcgtatccgtgaactttaacgcaccgcagttcatcggtgatggcggggaggaggtaacattcgtgtcggagcgaggcggcgcggcggggctgttcctgtgtcagccggggtccgagtgggtcgagccgcacctggcggtagggcgtttgggcgcaccgcgccaccgcttcatctccaagtcggcccatcgccgttccccctctaggtcctgccaccgccactccgatcaaggccggggcaatgccacgcgtcaggagatccaaccaccgcttcgcctcaaggccacggtgttgattcgccttggcccatgtcattgctccacttaaagaaatttgcatatgtgccatccttaaaaactggcttcgctagaatgccatcgttaaaatgggattcgcccgaatgccaccctcaagctgtgggcattcgccacaatgtcatttccgctatttcttgcactttcggcccctgtcgccaccgccgtcgccgcctccttccgcgcgcttgcgccgctaggcccgcttccctccctagcgccggcgcgccgacgtcgccccctctcggttccctgcgggtggagagagaagagaggagaggatgagagaagaaagaagatgaagcccggggcaaaaaggtccgagaaaaaatgaaatggatggaaaataatttacaagtgcaagaaatagcgaaaatggcattgtagcgaatgcccacagcttaagggtggcattcgagcaaatcccattttgatgatggcattctagcgaagccagtttttaaggatggcacatatgcaaatttctcctccgctttcgacgcaggtcgccaccgccaccacctacgagggagatcgacattgcatcgcgaatgagtggtgaaagcctaaaagggggagatgggattcaataggcgaggcgcgcaccgagggggttcttctgcttccttgtctcacggcggtgatcctccatctctagtcgaacaccgtggtcgccttcatcaccgtctcccgtgacaacaatcctgtggtgtccgtctcgtgtggcggcgctcggcgtactccaccagtggcaacggcacgagcgcagagaagacatcgccgccagccatcgcgtagcgccatggagaaagattgggggaaacgagaaaagaaagagagaagaggaaaatgtgacattgacatgtggggtccatatgctgagtcagccggttggaccgggtcaaagcgctacgtcagcaaaaccgcccttcaaaactgccgagagagtcaaattataccagttttaatagttgagggagtcattctacccggttttctggttaaggggtacgaattagattcggcatacttttaagggagttaaagtggactttttcctcaactaaaccagcccactcatgcagcgccgcatgcatccgcgcccgcgacagcgcaaggagccaaggccttcacagttcagcaccgcgcgcggggcacggctgcacgacgcgctgctgtgctgagcaccgcgtgcagtggtggggcgggcgcgtcacgccaggtgcgccgcccgcacggcttgtctgttgtgtgtttccggctccaccgatcgagcgtctcggcgtcggcgtcggcgtcggcgtaggctgtggctgtgccgccgcgcgcggacgacacggctttcctgcttcgttttgcgggcggatgacggcatacatgctcctgtacacacccgaatcatatcccacggcgttgtacgatctgagatcgcaacagtagcctgtgcccagtagccaccgaatagaagttactatgccaccacgccacgaactgatcatatcgaaattgaacaattatatttacattttaattcaaaatattgtgaccaaaaaagaaaaagaaaagaaagaagattgccccttcgttttttagggagctgggttgcgtgatcccatcctgatctttgccaaatgacacgctccaaagagcaaaaggtcgccttctttacgtcgagtcgtgtctgtccgtttcagacaaagaaatctccggcgaactcatccacatccagcttggctggatggttttgctagcaaaagaggagcatcccgaggacagcatcagcaacaaccgtccatgcaattggtcatcatcatcgaaaggcccggccggtgctgtccacggcttggcacttgggcttttaacctctttgcaaggggaacaagctgggatctgtcatatgttggtgtctgacgtgagtgaggtacaaaggcctcctatgcttgtagtaccctctagctaccctattccttttttcttgctcttgttttttcaacttttttctagtgtccactgctacgtactagttgtagtatgattgtatctttcatgcatagatagatagccatggtacagtacaacttgtttaccgtctattatatcataatattgaggatgcgttgattgatttgttcattattcctcttatgatcggaaattaattacacctttgctattcatcaagtgactaaaatttgtgcaaattacaaattatacctaaccctggtcattagatcaaaatataatggtcagagcatcatcttcaatcttgaattgtggtttactatttctctttggacaagaagagaggagaggttgggagatggcggactgatagattagacggttgcggcaatgaaacctctgatagactacctatggactaaagtttttgtgttggggaaggtttaagacataggaaacggtgagagggcttcaaagggatggcttgggtggtgaaagactggtggtaggcaaaaaaaaaaaaacgtgaaggtggtgagtggatggaggagggtatcggacggtgtcatgccaggactgatgcagaggcgcaatgacagcgagacaatatggtggcaatggtagaggatgagaaaacagtcgacgattagagtgtagcatgataaatctaggtagtcctaataaggtggaggtggagggaggccgacagatgacgtgtatggtggtgacgttgtgtgagtaatgagaggtgttaatcagtgcacgttagaaggaaagaaatgtaaattatagagtagtacgaagcttgactgcttgaggtattcctagacattcaaaaagaattaactgaaatttaaagagaaatcgaccgttgactgatgaaatagcaagtccaattaattacgtgtagcattagaggactgctcgtggtttaatttgctacttctctttcgacaattgatggcttagacttggacgtcgattgatgcttagacaagcacaatgtacattaacggtgactatccccgtatagtaggagtatatagtacgatctggatcgaatctttgggtgttctcttttgagcccaatcaggtaaagcagctagcacacacttgcgcctttgtacgtcacaaaactaagagcgctagctagtgagctacggtgtagctagtcatggtgatatgtgactagctagtgtcgttgtgagaaggtgactcgatggatcagctgggtcgatctcatgcctctctcatgaatgtacgtgcattgcttgaatattcttcttgtacaaactggaattaatactgcttcaaagttcaaattaaccggtcgagttaccccggccacttcaatctaatggataatggcccgttcgaatgagccaaaatgctcagctaatcggtggcacctgaatcaggatagatcattagcgcatgaataattaagtactacatattacaaattagaaaaatgacttttataaaaaaaacttattcatatattttttttttcataaaacacaccatttaatagtttggaagtcgtgctaacggaaaacgagaaatttatcatttggtgttgctagaaagaactcaaccatttggtgtttttttaaaactgttaaaattttcctcagtcttttgacctatgtatcacttatgttgtgttgtggcgtccaattagctggaaaaataaaaatggcttaacatgttatctttctactaatgtgcttctttctcctccatatagttgtctaaaaaaatcaactttttcatatattttttcatctcaacaaactctgatgagcttggttcttcttcctcctaacagagagcgtgtttacacacaatggatggcttgatgacaatatgagaagtgaggtttgtggtgagttcgtatggaaggacaatctgggtcagcaccctcgcggggcatggcaccatcttaacgtcctcatctctttcacctatgtgtttctaccgtcacttcatccacgagctcctccgctgcaagctccgcttacacaaccgcctcctacctaagttggcctttaatttgtcgaacaagcggagctttgtctttgccacgtgacacctatcctctatgaaatcaattggctaagctcatgaaagatatgtagtggggggtgagctcaaggaagatggtagcggggtgagctcaagaggatgggaggatggcagtggacatgccaatccactgctgcttgtagctctatgttcactgaccgcaactacgagaatccatccaaaatttgtatgagtgatgcccgatagagacagagttggtttgtttgatagtcataatagccctccagccgtcagctctccaccacctgtgtcatcctcctgccatcgtctctccgccacccatgcgttcccctactctcggctctgtgttgtagtcttcttgacacgtcctcacgtcctcgctcttctccgtttgccactagattgacacaactgcacttctgtactgtgtcatcctcctgctattttctttatctctctcacgatgacttgctggcctaggtgtaggagctcgacagcggcatccttagggagcctaccagtggtggcctgtcattgcattaggaaaagagagaagaaagaagagagagaaagaggggcggaggaagaagatcgatggccgaagtagacattgacaaagttaatctctgttttatgtcactgtactacgtaccatgttataattgagaggtaaattgaagagttcaaaagttaaaaagaagggtttgataaatgattttaaatttgagagttcgtgctctagacaaacactacactaggttatcaattggacttatccctcgattggctgatttacaggcatgcgttagcttgtcagacagtagtgatcgacgcgaggatatcagattggcctacccacctacctattccctccataaaaaaactaatttctgcgtacaaatatggacttcacattcatcccggaattttttttttggaataaagtatttagttgtgcatgcgtgtgcatgccaccagtctccagctagcttgcccgtagaggttttcgccgtgcacgggcgagcgacggtcatcggccaaggcagcgagagtgaacgatcgatgcgcacgcgcggtgtctcgtggccggtcgtacgtacgtgcgtgtagccatctactaccatactgactagtgtacgcgcgcgtcggcatctcgatcgttaacccgccagtgggatgtggccctgtgcgggggcgatagctagatcggtccatatctctcgcctgcttgccggcctctcctacgactcgtcggtccctcagagtcacttgacaggcatggccgtggcgtgcagggtgcgcgcatcgctgcgccgctactggctggctgcagccagcaatcatcatgccgtggcgtattgggggtgtgcgtgcctgcctgcgctgcgctgagcccctcctgctgacccacccactctagctccgcggattagctaggaggcgatcgattgtcacctttatactacaacgttgaaatattttgattgttcttgcagtatctggtaatcgacgtacagtacgtggtttacagcttttacagcgcacaaaaagatcagtgctactccctccatttaaaaatataagtatctttttagtctatcacaatcttcgatatattactttaaccaacaatatcataaaaataacatgttttaaataaaaaattatatattaagatagattgtttaatgataaatctattaacatcaatttacatggttattttttttatttttttctattaatagtgaaagttaaaaatactccctccatctatttttgataggcatatttctaaattaaaaaaaaatatttttgatagttatatttcaattcaataacatatcgtcttaatgactttcttggatttaatgtatgactatccatttttccatacaagattggttacatgggcatctagaaatataaatattaatgaattgcttgtttacgagaaatgactagtagcatgtttaaatggatgataagtagaattacttatccttgctctgtgtaccaagataaaatatgactatcaaaaagtagatagaggaagtatttaattttgatactatgctaaaaatgcttatattttggtacgaagggagtatcatttaaacatggaaaagctccgtacctccagacgtgaaaaagctacacacctctgcatgtgcggtttgtttgttgacgctgtgtgctccattttgttgcagagcctgcgctcgctgcgttcgcctggctcgatgggcgcttcgacgaccgccctttgcctgcatccctccactttgtccccctcccccctccgaaagcccactgcatgcttagctcgatctccgcttcaattcacggcttttaccttttgtgttcttgtacgcgctttacggcttttgttgacttccacatatcgggacattcacaagacaatacatgcaccagcagcaatgcattgcatttgcatggtggaacatggctttaaaatcactgcaccactaactatctagtcgttggctaactttcaacctctattttattatacaacatggctttaaaatcactgcaccactaactatctattcgttggctaactttcaacctctattttattacttgagcttgacttttatttacgcatgtattattgttggtacggagacaactagataatcagtgaaaagtcacatatataaatcacacaacacaaatatatggaccctgagaagggtgggcatcggggtgagtcgaggctgataaatttggttttactgatggttaccgtacttccttcgtgactcttaggaaaaatcatgactcatgcagcgccatgtcccagccattctctcggtctcaaccctaagccagcaatcgtggcaaaatagagcttatccttgttctcaagatctttgaatccttattaggatatcgtcaggtcatacgtgttgcaaccaatggaattaaaaaaaatgacgcttgacttgaaggctaccttgcacattgttgctatggatggatgaatggtgacgagtggcaatgtgggagcaagaactagaggaggatggacgacggcggtaggttggaggtcatgactgtgaggaagttgattttgtggcgtgcatggatttaggtatagggataaggattttgagtgctaggcagggtttacctatcctttttaagtagaaaattgttccccaccagtttatcaaaaaccgatcaaaaattggtgactttccgtcaacgccatatagaaactggctaaaactgatcgattttcacaaaccgacacttcacattttaacgaaaaccaaccgatttttcacgaaaactgatcattttttgaaccctgatgctagcgtgttgccgtttgttgttgggcctggtgggtattttgctactctcaaaataaacaaacatagtatgggagatgtgatgcatgtgtgtatagttccatgctttttgtagtttctcggtcctaaggatcactcaatgatgaaattaataacctgattgttacctctagaagaattatgagatcaatgggtgtacaaataccctagagaggcggggtccttgttagggcaagagcaacgcgagacacgcgtgtctctgccctcctgaaactgtaaaatcgaagtcagagtgacaagctctacagcacatgcgcaaggggattgtggcttcggtgcggcgcgaggggatgaggaatcagagccacgagctccacaatgcaagcgcctctacgttttctgggcccggcgtcgtctcgtgatggcgaaaaacgcgtctccttgcgtaggggctagaggctcagcagagatgcgcatttagtcaacacttaggcgaatatctgagctggtgaacgaaggaacttgccacatcctcagcaccataaaggcccttaggtccatggccccaatgggtaaattgcctctctttgtattaggcggaggcattcttctcacacgctctgagggtagtagtactgcaaggcacgctatgcatgcctctggcctatttgtgcgatgaaattggcccaaaagccatgcaccccacattgctcgtgacccaacaaaaagaatcctcgaaccaacaaatccttgaccccacatccacctaccccttcgagcttatcctcacgcaccaatgaaaaaaaatccggcgcttctccttcccatcccccgcgctgcttctccctcccccccatccactgcacgcttctccccccaaatccgtcgcgccgcttctccttgccacccactgcgccgcttctcccccaaatccatcgtgccatttcttccccaatccgcctcgctcctcctctcttggccaacgacgaggagacggaccatcgagggctcggaggatgcatggtggcagcgcgcggatccgtagtggagcagtgacaacgtcctcatgctcgtctccgggaagcgctgagcggagtagtgatggagcaactcgtggtcgtcgtccttctcgctttgagaggcagccccagtggtggatatctgtgtcaccggctggtggtacttcaaaccaccgggggcggtgtccaccatgccgtctcctccacccccccccccccaaaaaaatcccctacgccacttctcctccgtcgcgccgtttctccatcctccccatccaccggcgcatcgatgcagacagagccagataggagtgaggattccagtgcgggagtgaggatgcagagcgagggagcgaacgattggagcgatgacctccacagcgcaggtttcctgcgtcgcgtgccctcccactactacgaaaaccatctttcgtggcggccattttgagtcttcgctggtggcatttggcaccgccacaaagcaaaggataatgaaaatgtagcatcttcgctgacggcgctaaaccgctagaggagataacttttcgctggcggccagctaaagacagccgctagcgaaaatcgtcttcactggaggctgacgtatgtgggccgccagagaaaatagtcttcgctggcggctaccttatttgctccactaggaaaaaatagtctttgctggcggcttcattacatgggccaccagtgaaaatgattttccataaaaaaataatccccaaaatctcttttcgccaaaaaaaaagaaaataaatcagattttcgcagcatgtacagattcaaatccacatccaaaattttgagcatcgatttaaatcctcatccagagttcattagattcagttaacatggaagtgaacacagcatacaagcattttgaacataaaaaaaaagaaaaacagcatcaacagaagagaggaaggaggtcgttgtcgccgtcgccgaccgagcagcaccggatgtgtgagccccattgccgagcatcactgcctccgagctccttctgccgcaccaagccccccgtcgccgctgcagtcgcatcgctgtcgccacgcccccgcctcccttcgcagtcaccgttgcccccccatggctcctcccgtcgccgtcgccgtgcccccacctcccgtcgcagtcactgtcgcgccccacgacggctcctcccgtcgccgtcgccacgcccccccccccccgacgaccgtctctcgtcgccaccgcgcacagctgccggagccaccgccgccgacgctgcctaggaggagaggacgccgacgccgtggatctgtagaagggaggaggaaaggagaggtgggtgctagagaagatctggatctggatctggagggggaggaggagagttggagatatttttattctggagaggtgggtggataagagcaggtacaatagcaggctataagccagctataaacatattttaaagagataaaaaaagagagagaagagcagcgggctatagatctgtagccagctgcagcatggactccaagacgtaatgtgtgtatgacaggtgggaccaggtattaagagcatgtttggtacaattccaacttctaaatttagttataggagttgagtctggagtggagttgtggagccgactaaacccagctccacaactctaatacaatttgtgagagagctccacccaactccacttccagttttggtggagctgaaactgtttggctgagctccaactccaggaggggtggagctggagctggagctgtgccaaataggccctaatagtatagtaagcaactattgtatgaattggctattacatttgctatatatgatttgaagctagtagtggactatactattaagactatactattaaacttgctctaaggagcatgggcggtgcgtgattttttgttaatagatggtggttccttctagatttttcctgacggttgcttaagtgggccgctagcaaaaaaaaataattgtatcttccctgccggactatataacccaaccgccggcgaaaattatccatcttcgctggtggcacatctaagtgaccgctagcgaaaataaatacatcttcgctggcggccggtataacgttgtcgccacgtatgcgcaggtccgacgtgacgcgggaggctgataactcgccacgtccttacaatgtgaaaggccagatgagaaaagcccccgtatctaatcttgggtgcttggcccgaaattatatgcgctgacgtcgtacgtgtagctagcatgatcatccatgtagccatatactactcctactcctaggtcgaaggtggcacagacagccatgcattcatgcatgccatatactcctaccataggcaattgagactgagaggtcacccctcacatgacatgagtattggaaatgctagtagcatcatcagcatggacgcacaggagaggagagagtgatatgatcgagcagaagagagaccagaccaagccagccatcattgcaaagcagcagattgttcgctgccatgggctaccatgcttatgaatgatgcctttgggccttttggctctcgctgctgccattgcatgccaaccccaacaaggactcacatgtctcgactctcaactctctctctctctctctctctctctctctctctctctctctctctctccatgaaaaacattttaggcagagagggaacatcagaacactactaatctgaatgactgtgtaataatcatgatctcacttttgctgtatccatgatttgcatatcagcgaaaaggagaaaaataaagaggtttggcattcagttaataatgcccactttttacatcgaggttttatagcctttcttctgtgcaagcatttatacggtaatcactagcatcacagaggcgcatgccttaatcatccccagatcattcgttcagaaaaagatgcacttttttagaacggaaagattgatgaaaaagatggttgcgtacgtgtagacggtcaacgtttcagtctagtctctcgcacgaacagtgccagattccgtagcatatatatatgtccacatcgaaatatcaaatgcagagagatcacatccaatagtcgctaaaacgagaaatttgatcattacagtttctcacggaatctctcctttgatgatacctacatccggtgacaccaacatcagtaattggtgtttgccggacttctccgttcttgaggaagatgtttttagtctaattaccacaaagagatttataaatatctttaggtacgaagaattacttttactccgtagtataatagtgcagaactggagttgcagttgcatgactttaattatcagagatcaaatattggtatctgtaaacgtacgtttggtttaaaggatggaatatttcgagttggatctggtttaaaggatggaatatatcgagttggatccgtatttgatttgaggatatataggtggaatgaaatgatcactgaaagagaatttctttttaagaaccaggttagacatattaaaaaaccgatccactaatccaacccatattaatttactctatcgcttaacacatgtgagacatccttaaaagggtaaaagagtagaacaccaacaatttcatctcatgtcaaatggacggattggatcgaccatcccatcttaaaaatataaataactcatctcaccttgtcttcaaaacacatacttagtgttattcgctttaataaaaaattgataaatctagggatttgctttggcctcctctctttaagcatgtcataggcaaattaaaaaaaaacaacaacataatttaacagaattcacattagttttaactagctactccctttgtccaatcttaaaatataacaacttttatggttcaaattttaccaaaaatatagtaatttccgcctatcccctcatcttaaccatcacaaccaaggtaattgatattgcgatataagatagtatcaatttttcatgatagtatcataagttcgagatcctaccaaattttaaattttcatatttttatatagcatttgtagtatatatgttgtataaattgaagcctataatattgttttagataaatctaatgaacattttgaaacttgaatgaacttattcacattatttacagttcactctattttaattttgtaagatcatagggatcgagatactatatgtgtgatccggtagcattaaaagtacgtcttgtagatatagacgtttttctaatactgtaaatgcattttaaatatctttacaatattgtagagcattaaaatgcctcatacgtaactgttggtaaattgtctttagaaacaagaggcgttttaaaaagaatatctctataccgtttagtattctttttataaaaaaaatagaggcactttctagatgtattaaattatgctacaactatagcaaattaacaaggtaaatcaatgtagaaaacgattaaaaaaagctaatttgctattgccgattcttgaacccaagacatcgatcaatacatcatttttatactctcatatcattagttgtaaatatgtgtcttgcattagttaactctagttacttagtgtacattaatattaaaaaaattgcctccacacaagtttaaatgcctttacacatgagatagattttaaagcaccaaaaaaatacctctacaatataagattaacagaatgtgctaaatatctctagagcgtctctacagtaaaagtatggtttaagaagcaatttgaaaaatggctttagaaaagtgtcccaatgtaagtttttttttgaagtataggatagtatggaatagatggtaagatcaaacactatcaaattaggatactaagtgagatctatatcgcttcgatttagtaagattatggtattgtaggatattaagatacatatccaaagtgtggatattttaggggaaaaagagtaactcttatagagcaggagttgatgtacaattatgtttacaatagaatccaatacaagtacacgactcttgtttcaaataatagttaatctttctcagcgcaattacgtgaaaatgtgcgctatttttgataaaaaaaataaagtaaatttcacaaagctacaaatacttgaaccaaattgtcgcaaaactacataaatatgtatcacaaaactataaatttagcaccaaaattttcacggatttaatgcatcgtatcataaaactacaaatttaacaatgaagttattaaagaactatatattttagaatttagaaccataacactgttatgtatctaaaattacaaaagttgtagttttgtgataaaattgttgttaaatctgtagttttgtaaatttgtaaattcgtgataaattcgatattaaatctataatttcatgatacactttcttaaatttgtagtttgatgataattcaataaaagtctctatagttttttttaaatctatctattatatactaaaagtccattaatcttcctacaaacactcccaagctgccacgtggcactcctacaaacgctcctaggtcgccatgtggcatagtctaatctcaccgtcgattttcatttaaattggtggacccgttattttataccgttagattagatttatacataacgtcgattttcgtttaaattagtggacccactattttataccaacagattagatctatatatatattacctttctccgtacggtttgccgaaggaatagaacgtacgtacgtacatacgacaaccaaaataaaacatacatgattagtactatcaaaaagcaaatatctacaatataaagttgaaatatattggcccacaaatatacacatgcagctgaactaattttaatgttgattttcacttaaattgagatggattcatattttatctatatgtgttattgattttcaaattagtggacctgttattttatactattaaatatgtaacacctttctcatgtacataatatttgccggaagaaaaaaatgcatgtacttactataaagatagagctaaagtaaaacataagtacttagtaccatctgaaaaaatcgatggcctttaaaatagaactatctacaatataaagatgaaatatattgcatgtagtgttaaactagatctataatataaatatcaaatcaaccatctataaatgttcatcttttaaaattattttaaaattatatatctaatttgtgatcctacaaacacttctaagtcgccatatggagctcttacaaatgctcctaggccgccacgtggtactgtgtagtctcaccctcgattttcgtttaaattggtgcacctgtttagaccattagatcagatgtatacatagtacctattaaaaaaagtaggattgaaaaggaaataaagtttcggtagtactgtccgcagcaagaaaaaatattatatactaatagtctactaaactacctaaaaaattctaagttgctatgcggtgctcctacaaatgctcttagatcgtcatgtggcactatataatctcactatcaatttttatttaaattggtggatcacgtggcatacaaatggctaagttgaggtggcccaagtatgttatagtactctatgagaatgttatagtaaattaggaattaaaattgtgctttatgctgatcttgaggggacacagctacatcgatgaggtacccaactttcaaggtaatagatcacctattagtgaggcattcatgtttaacttaaaggttgttatcctattagttggtagaaagtgatacttttagaatatttatatatggatttggaaataagtgagacatgaagacttagctaagtagtgcattaatgatatattaggcttattttatttgcacatatgcaatttcatctattaataggtaatgaacttttataatagtgataatgagttgttacgataaatggagaatttctatgtgatcggaacaaagtgttttttttactaaaagtccattaaatttcatacaaatactcttaagccgccacatgtcactcctacaaatgcttctataccgtcacgtgacactttcctttaaatcggtagacccaatattttaaattattagattattaattttcaccattaaattttatcttccaaaaaaaaaatctgtacgttcccccctccgaacacaagttcacgtaatacgttttaaaacgaaaaaaaatgcgcacatgtatgtacgtactccctctctccccgtctaaccctccctttccatctttccaattttctggctaacaaccaaatgcatagtataaaaattaattagatagctaaataatctcttggtacatatatttttatataaaaattataatatgtaacttggatgtatatacccttaatttccaggggcgaactcaaaaataaaattatcaagacattacttggatatataccctttgttttcagtggtgaacccataaaaagattatcaggacactacacacacaaattatttaattattgattgatatattaattaatatgacatgaattatctattattatatattaaaagtccattagatgtcctacaaattctttcaagctaccacatagcttcctataaacattcctaaatcaccatatgacgctctaatatatcttaatataaaaatttttgagaaaaaacaatcatcttacccaaaccagtagaccttattttaaaatgttagatctatatcttaataataaaacttatggatcgactaggccgtcaaaatccgtatgtacaatgcacatatccacttccctccttacatatgagacgaacccaccggctctcgcctccttgttttcccttacggcaattaaattaaccaccggataaaagaaaatcctaaaaattatccctaaagaaatccaccttaatcttttaataaaaatggtggactcagtacttaataattttttaataaaaatggtggactcattactttatactattagacatctaacgacttctactaacttaattatatctctcaacatatataccatatatacgaggtctatttacctatacaaatatgtaaagctaaatcaatctacaaacgtacagataaatccgttaatccgtatatgaatgaagttctttttaattactatgtccatcctatattgaatcctaaaattttataggaattaaggaagaatgaaaaaaatatactaagattcccctctctaaataagactcattaaatatgaggtatgtgcagagttagaagatagttagagtactgttggataaaaattgaataatggatggttggatgggacgagtagtattaaaatcctttatatcttaggataaaatttgaatccttcaatttatggatggaggtagtacaagcaaatagacatatgtaattatgtctttaattagataaagaagtcacattaccgtattttttaatatgaaatttcttaacttaatatatcctaaaatctattaatacatctttagtatacaagaaaaagtattacttaaaagtttaaattaagatgctaaatttttttaaaaaagaaacacatgtagtataaatgatagtttcatatgaaccggatccattgttgcgacattttttcttataaatttaagacgacatgattcaagtaattttagtttacaatttgtaacaactcgttctccagaacaacacatcccagcccattcaaccggcacgtccacttacaaataccacccacacttacactttcgttctcgctttatgtaaaatagtcaacacgaaaatgatatggttagaagggcagtgccttacaagttggttgcactcttgcttaactagcaatacggtagtactgaagtgcacacaacgcttatagacaacacatatcatattctttcaataaaacataggccatatcctaatcgaattaggatgtcacagacacccctcaaaggacctgacgtccccgtcggtccaacatgtgtatagacaaatgtcacagacaccccccttaaaggacctgacatccccgtcggtccaacatgcgtatagacaaatgtccagaaacatgtcccttttagcacacgtccgtacgtccaatgatcgaaactaactttcaaaacattcccaaacaaattattgatatatacatatttagaagagaaattttttgaaaaagaaatcatatatacataaacattcataacaaaattttaaacactactaaataagatgcccaaattttaaacactactaaataagatgcccgcgcatcagcgcggctacctttctagtttactttaaaaatagtgtatttgtcactgggcacatattattcaatcagtaacctacacatagtgaaaaataatatactattatgtagtatgtaaagaatacacatgcaaacaaactgctactactccctatttgcatctatactcgtcacgagtggagaaaatcacgaagaaagatcagatttttgctccctgaatgctaccccatgcattttttaagtggctttgtgtgtggatgctaagctcgaggagatacggttgttggacagtgctggtagtctaatatccaccgtttttatattccaatactatattagtattatattacatccatgtgaaagtaggtagccgtctaaaccttgaaagatctaaaaggccaaaagagatctttctgacaaaagacgctcctttttgttccgtgcttcagctgctcatgcatgtggccaatgaaccctacattagtatatgccccagagattaacagccgatgtaacaaatcttctctttgccattttacgctgtcaaatctcaccgctaatcgcgctagccaatgggttagctgacggtgattattctatatatatatggtcaggtaaaaatcttgggattatctttctactagaagaagcatggacaggttgaaatggaattaagcaggagagcaactactctgatcagtgatctctctaatctatctctctctctgactcttatctacacctaccagcttgcgtgtgacgaaagcaagtaggacaggtgaaacactagcacaaggacaagcgcacgagctgctgctaatggagacatacatgcaacttcattaatatgaaactgtcccctacatgaatgtgattaattaactgtaataagcagtgatatactatgatagtatgatcttgttgtttggtttgatcgatctacacaaagagcatatgcaaataggggaattaaacacccaaaggagtagtagagattaataagatattaaagaaccaaatgaaattaagctactagctaaatgagctttactactacaagccaatctgctcttggaatataatgaagcgagtgaattgacctactccgatgtacaaatccacgagtccacggattgcgttctcatcgccgccgtcgccgccgccgacgaaggtgtcggcgctgcggcgacggtgaccgacgtgctctccgcattgtgctccagttgaggcgctgcgtgggccgccgcgccggcgccggacgagaaggtcgtcttcttgccgccgccgccgacgctccgggtcatggacgcgcccccgaccacgccggacagctcgtcgccgccgtggccgtggccgcggcttcgttgttgctggtgcatgtgcgacccgtcggcgcccatgatgccatgcgtgaggccgaggaagccggccgccggatcctgcagcctctgcggcggcggccgcggggctaggtcgctgccgggagcgtcgaacatggtgtgcgcggtgtacttgacgtcgtcgctggcgccgagctgggcgccgccgaggtggctctggaaggagaggtaactgccgccgtgatcctgcatccctaggagagaggacgacggcgccgacgcgaggtggtacctgtcgccgggtgccgccaccgccgccgtggttgcggcggcggtggaggttgcaatggcaatgttggacggcgacggcgaggacgtggagggcgaggggaaaggcgggaacggggaagggtggtgcttctgcgcgaacgggcggaggaggtaggccgggagcgaggacgggttcccgccgccggcggcggtagcggcggagcggagggaggagggggcggggaaaaggtggtcgaaccgcgagcgcgcgggtggcccggcgaagggcggcgaggggatgccggtgaactcctgcaccatggcgcggaagttggaggtgtcggtggtcagcaccgtcgtcggcgcgcgccgcgacgcccgcgtccgctttctcgacccccctcgccggcggcgcgccgaccccctgtccctgctgcgccaccacctgctcggcagagacctgcacaccgtgcggcgacgacgacgacggcggcgaggacgacgctccccccgctccannnnnnnnnnnnnnnnnnnnnnnnnnnnnnnnnnnnnacccaggggcacg

SEQ ID NO: 15746 - DNA, 24352 bp, Oryza sativa
  unsure (1)..(24352): unsure at all n locations
cccattagtagtaccacaacaaaaagagggaggaaaggtttttatttattggtccccattcacaagggccaaggcctacgcaaacgcaaacccaagttgcccccgttttaagtggcttttttgtccggggaaggttcgggtgcgttggtgtacgagggggcgtgcagacagtcagcggcctgcagcgcgcatgattaggcgctgcggaaagtgccagnnngggtngggggggggggcaggcagcgatccagaggtttattcgggggtggtggaggtggactggtggtggccgtggctgtggctgcctcctgcacggcacggtgaaaggatcagcagcagcgtcgtctctgtcgatcgatcgatcgatcggcagacgatggatggcgctggggttgggttgggttgtgtgtgttgttgtgcgcgttccatctgcatgcactgcgtgcggtgcctgtgctgtgtgctttcgaggttcgtttgaataatggggtggtaaaaggcggaagagagtttcggggtttgggggtgtcgaccgacttgtttgttgccggtgtagggtcattgcctctcgacctatggaggtcaggtacggagtggtatgtttgtacgttacaacggtgtttatagcttcaaatcttacagaatctttaactaatggatacaacctgttttaaatgaaatgaaaaaaaagatgaatatgtcaaaaatcataaatctagagaaataaactgttctaaaatcgttttgatgcactctaattgagtgtaagtattatataacttactccctccgtcccgaaaaaacgaatctagtactagatttgacatattatagtacaatgaatctagacagaggtatatccagattcgtagtattaggatgtcacatttagtattagattggttttttatgggacggaggaagtaagtattatcaagtataagtgtgttataactgagtgtgagtgctatgtaacgagtgtaactgtaaattgaatatataagaatacaaatcttgatggatgatgatgcaacattctacagataaaaaagtgaaagataaaagcctaaaaatttgttgcaagcgaaaatagtaaaaccgttctttttattccgttggtatcgttggttttcttagggaagtgatgtgttatcggttttattaggaagagattggttttattaggaagagattggtttgtttatgtgaaaggggcgggatggaaggaggacgactatgcttttaaggtagcagataaatgaaacgcatttttactacgttacaccgttaaacgatgttttatccgtttgtgtatattgggtaagccaagaggtcagttgccatagttttgacattttttttgttctccatcgtaataaattataatttgcttctttttcattacctggcgcctccatacttccttggctatagctatgcatggccaccactatccaaccacagcaaactaaccagtatcctctttgcatccaccaccctccaccgatggcaaggtactccctccatcccataatataagggattttaagtttttgcttgtaacgtttgaccactcatcatatttaaaattttttgaaattattatttattttatttgtgacttactttattatctacagtactttaagcacaactttttgttttttatatttggaaaaagaatttaaataagacgagtggtcaaacgttgcaaacaaaaactcaaaatcccttatattgcagaacggagggagtacttattaccagttcctcaatcacatctagatatatgtaggtggctttaatagttttataatgatctcataataaaaaattgacaacataataattatggtgatataagtattgataggtccgaacagacataaacaaatcttgtcactcggtcacatgctagcttcaaacaacaccatcttaataatccaaaaactccggtcgaggtgtctgatcatttggcgggagtgttggagctgctcctaacttttggagaaagatttttatttttatttttttgagaagggtattttttaggggcatctatatctaaccggatacatgtggtatttttaaattaggaacttagactatcgaacagggaacttaaccctcaaataacccaatctgaaattcgctcctacggagatttaaattcaggacattgggtgctacttagatcagtgcaaccactaaactacatgccgtttcacgagaaagatttttatacattttaatgaactatcttgcgataataaatgatttatggattaaaaaaataattctttgtatcattaacatgggccagggcctagctacatcaatttcggtttcgtgtagagttcttctttctctagaaaagaatatccaggcagaggtatttccaacattactctacgcctatgttgattgcggtaattctaaaaaaaaaaaagttgatcgcggtcaacagacggcttcgcttgtggtcaccaatttactttttcttccttctggaaaatatcttcactagattctacggttggtgatctcagtcaccgagttttcttctttttgtttttttacattgcttttcgatcgcaagatatacatagctagtatgtacatgcatgtaagggccggacacagggtatagttactatccctatttttttaagatatgatactgttgattttttttaaattttgttagactattcatcttttgtaataattaggaaggtagcccacgcattcgcacgggcatgtgtcgtacgttaagtttgagatacttataaaagtgaaatattaacccgagaacacctcccatgatttctctataaattgttttcgtggcattaattgcttttataattttataacctactagctttatgttaaatcatatttaagtaatatctataagcaattatttattatcttcttcatcatttgaaaagaatatagtcttactttatttagaaaacatgtcaacgtaagtaaaagtaagttgttttttagttgcatatatattatcatagtttactaaaggatgaattggatgggacatgaagctccaataaatgtatgggtttatatagcctaatataattgatgtagtttgagagatgatctatttgtgaacatttcatgtagagtgagtgagaggctccacacaacctaatatgaatacgataacgacaaaatataattacgcaataatattttttaaatgtgatgtaccatgaatacacgcttgtttttttatatataagatcaactgatttaaaatgcataggagtattccatatatgtagcttatggttgttttaattatgtggttggtgacttacggacactctggagggtctttaattgatttttgttatgtacaatgatttagtataacacaatacatattttcaattaattttcatgtttatttagtgttcatgcaaacggtagggtataccttcaaatgatatattttaacttttatatagaaaaatatagctaatgaatgtttaattataaataaaataatagttatgattgttttatattatgttagttagaaaaaaaagaagaggtgataattgcattggagaggagagaatgcgagagccacagtggtattacgaaagacaggatgatgggaggagattattatttttaagatagatcgaatgtatcctataattttgagttatctatttttataaatacatttaatcttagatctaatttaaaatactttgggtgttgtattttctaattaaactacttagattattctaattttagtgtattttattaatcagaaggtataaaatctatttgataaaataataataatttaataatttattggttaaaaatattcggtctactttgaatttaaataatatataaaaaaaggagggtggacactggccttggaacacgtacgaaggaggtccgtttgtacaaaagtgtataggacggtgatttggttttattttttttaacataaatattattataaattatgatttccatctaactaaaatagcatgaaaatcatgaaaataggagagaaaagggacagaggggagggcgtacacaaaaggagatcacgtacatggaaatgtacgtatgatatcaggtccaccatataattgtaaatctaatagctgaaaatctaaaatagtggatccaccggttaattagattgccgcatgacggtttaggaatgtttttaggagtacacgtggtggtttgggagtatttgtcggaagacatggtcaatagtttttttttatgtacgtacatatgcatgttttctttttttttttccaaataatagtctcctatacatgcatatatacatacatatattttatccggatgaatagtatatatttatttttccctcttgcaaatacacatagattagaagagagggccgggattaattactttaatgatttgatctaatctattctacacctgtacatgcgtaaatcaattgttatatatttatgtgactacatatacaagggaaagtgatgttacgtgtgggaggaaggaggtggaggtggaaagattttgtagataaatctaacggcttgaaacaatgggtctaccgattttaatcaaaacgaatggacagatgttttatttttttcttagaatttataggaattttttttatttattagaatgccatgtggcgatttaagagtgtttgtataatgccatgtggcggtttgagaccgtttataggaataatagatagatagatagatagatagatagatattcaatcaaatagacaactacaaagtacagttatttttattttagttaactaaataattcacgacccggtgaacacaattgaggtgcaggagtgcttctctcttcattaattgttcttcgatttttcatttctattttgcggttttttctttctttccatttcaaatgtaaatgtacagttcatgaatactcccaccgtactataaaaaaaccaacttaatattgtatatggtatattatgttcagattcgttattttaaaatgtgtcacatccagttatttatttttttaagtagctttaacaattgaatttacgtacgtacgttaccgctaattggccggttaccgctaagatatggaatcttatctcaacccgatctgtcaattccatttcccatatatgcactgctcctctcatttggtcggcgacgtatgagatctaactttaaatccggttcaaaacatgcatccatcgtgctgtacgtaaatgaacttcaaatctttcaaaggatatgatatatattcgctgacctaacatgattactactctctccatcctatataaaaatacaaacttctgagttgttctttttaagtttactagaaaaaaatatctatgcgttataatgggtaagatattttttgaatgtatatgttatactcctttcttagttttgggccgaaagcctatccctttcttctttttcagccctagcccaatgtgctgcctccctccgctcggcctatctctctttggcccaacctacaggtggagccatgggactagctcacacgtgttcaacctccagaagatggtgccgatgatgccggagctaattctcccaatcaaatccgaccgaatttttcttgatcttgtataattggtttagggtttttgatccactcgatcttcttattttttttccccaaaatcaaggcgaaaacttggaataaaaataattgaggaagcttaccaaccggccatcatcggcagcggttaatggagattaaatctggccaattaaagcccaattaaagggggaaatcatggggaaaatgatgagggaggagtggagatcgatttttgcaatcaattagaggagaaaatgcatggagagacatatcgatgtggcggcggagctagggtttggcctggcgaaggaaaaaagatggtgacaaaaaacggaagcccttatcgtgtgcgagaaaaaaaaccgcaacgaaaaaaggacggcggaaaaaaccatatgaaaagaaaggaaaataaaattaaaaccaatttaaatacagatgacgtaccaaaattttggtgaaaatatttttaattttcataataaacatattcaatttttataatagtgtagatgtgacttatgtccagattcaaaattaggtgctgttttcttttttaatacatgaaaacactaaacatacattcgcttacctaagcatggggtaataaaatcatttggaccgcctcatcactgaataaatcacccaaggccttgtatcttctccggttatatatgcatctcattctgatcaatggtttaattttctgcaactccaacgtctttattcatatccactttcccgccaaccactcgatctgcgacaacggcagtttggtagcttctctgttctatcgatccgaactattccggagttggcaaaacaataggacagatgcaaccgagatggggacatttgtgcttcactgtatgtgatcttttgtactatagcttcacttccaatgcatactggactcgccacgtgctattgatatcggggaaaaaaatgttgcggtgatttcctcataaatgaacatttctcttcttttgagtactgaaaaaaaaaataagagaacattaccaaggaaatatagaaatgtaaatatgtaataattttcaaaagaaagaaaacattttgcaacctgaagcctggacgcctaaggacgggccgggagggaggcagcaacaacaccaagaagtaataaggagggtataggagagagggcaaaagcagggaggactgtgaggttcgggaagaggcatgtggaggaacaattgtggctgagagaagggatgatgcgatggatttagggtgcctagttttttatagtagacatgtttatgttttggatggcttatttacgtaggacgtgtttggttgcctgcatctaggttggcttgcatctaacgtacaacgagaggtgtgtttggttgcttgggcgcggttgagagcatgtacgcgcgggtgcaaaaagcatcgccgagccaggccaagaaggaatgtgggattcaagcttcgctcctcaacttggcctaagcgtgggtgccacgaggcatgtgtgggtgcaagggttgtgagtcagcttacctttcttgcctattctcgcacctcaatttctcttccactctcttttgagccgtcgtcgtctgcttcgccttgcgaagtaccgccaactctgagcatggcaggactcgagctaggccagctctaatggagtcccttccctgcacttaatagttgccacctctagccttcttcagccacctaatcaccaaatctggacgcatgcgacaagttgctggtgctagagggattgcttggtaacaaggattggtgcaagagttatatggctggggaggtggatggagctacgtggctaggaaggggggtggaggaggaagaagagggcaacatgatgggcaagaatgtcaagaaggttaagaccgacgccgatggtgaagaggatcaacgataagatccacatagattttttctttgtttctattttctgtcttgtcctaaccgggtttattaaggcagtaatcttgactgatggaagcggataagaagttttgattaaacactaattttgtgattgatttaggcattcactgttcttatttctcatttctacatgcaagagattttatgaaatttagtcaattgaatattaggtatgtattcattttcatccatgaatcataaggggtaatcttaacatacaagataagcggtaaccaaacttaaccatcatgcatccaatcaaaaaatctcttacatacagtatttgttgtatcactaaccaaacaacatcacatatcatccatgctttactgatacgagcaaccaaacaaccctttttgcacccacccatccagggcggggtcagcctagataacatgtacaagctagactagagtgttacgagcaaccaaacataccctcatatgttgtgggctatatgactatgcaatcaatttaccatagtggtcggttccttgttctgttataattttgacatcaaaattgaaaggagtagctatatttatggctttatttttttatcaaaaaatagtcaaattatttttatgttgtaaattacctacactttcatggtagttcactgtaaattttaaaacttacactacattgtaagttttaatatttatattgtaattttttaatacacaatgtaattaggattaaaactacttaattatattttaaaaaatgagattggagagatgaaagtatgattatatataggagagaacaatcacagagagaaaaattgactgaaatttagcgagcaaatgtggcgtaataattatagaaatcctgaatttgtataagtgggattgcaccacttaactcgacagtttttaaaactatatacgtagtgctataaaatttacaccatatgtttcagccaactagccaaaaacagaggtagaaattttacaaactggagcagataccaaatttgttcctttttggatggtataacttgtaggcgctgcaatcttcacataattgtgcgttgacgacgctctttgagctagcagtagacgtggccctcaccaaactttgtacaggtggctccctaccgaattttcttgtccccacgtgataattgcacggatcaaattgaaggccagcttctcaaagcgatcgctgattagggcacattcatatctccgatgttggccatgcatcatcatatcatagattaataactattgctaggttaaaacaagtaaatgtaagcttgtaggaagtaaataagctaagtactgtaacctccagcttaatttgcatgtactgttctatttagtacatgtttacctacattgcaggcaattaattaggcaaagtgttaatagcacctcccgaccaaacaatctgttggttttcaagtgcaatctacactgcgtacttgccaagttttgacgtactgtttgtaacggagagttttgtctcggtttaatttacaacaataactctatcctgtcctgctatataagatcagaaacaaacataaataatgatactgcattggccaacgatatgatctctgaacaactgaatgaagtgtactccaccaaccagtgaagttatatcagctatatatgctgattaattaaataactccctaatccacaatgctgtatagtacagtatcatgttatatctagctagtaattagatgggaccttgcaacctcctaatgaaagccatgcgatgcatggacccgtttaatcactagtgttctgtgttcaacctgttcatcagatatatgtgcattgtcagaagccgttgatgataaatattaatttgttctatgcatcataaggtgatagctaccttctaaccctctccactagcttggcaggaactgaaggccaggcccccccttttgtggcacaatatattgatggcatctcaatatttatgtttgttctttaacttttttagatcaaattttctgttaattgcgcctttgtaaaggtttgatttgattgcatccatcacgcaggagttaaagatggctttcaagacataaacatgtaaaccgctgatgtataccattactggttggcttctcttctgttgggtaaattgtttgcagtaggacttcgacagctatccatgatcatattctgcagcaaatcgctctcgccactgcagaaatttgttgaactggattgacatatagatacaatcgtttagtatggcattgtactagtgatgagaagataaagagagggcatattttactctacatgttttatatcataagatgttttgattttgttatatcaaatttcttttaactttgaccaaatctataaaaaaacagcaacatttttaacacaaaacaaatataatatcaaaatatattcaatattaaatttaataaaatcaatttgtattgtatatttataaattgctttatataatatgaaacagatggaacagtttgagaagccagaaatcgtactcatagctgctgggcctgctgggaaggcctttttcggttgcagcttataatatgtatacatataaccggaacaattaaaattattttagggaaaaactgtttgtccttctactcttttgtggtccaaaaggataggctaaagaaaaacagaaagcaacacaaaatccgctaaatcaattctaaaaataagtttcaaacttcagcaatggccgcaactggttttattaattgagaatactatataccttagtacctaaggtggttggatatatatattcacttgttttttcatgtacaatggactattatgagttgaagattgactactgcgttagaacaacccatttctttagttccaaacataaatagcgttttcattttttttatagaaacacctctggttgtgtttgcatcatttttttaatgatgaaagctttatcgatataagataattacatcacaatgatataattactccaagacaacttctagcctttcacgatttgcatgacttaacacccggatttactcattggtggtcaaatcctgatctccaaagttatgtatattcggttgttgtgtctgcccgttcatccatataacctgattaaaaagaagtaaaataattttcaaggaatatatgtccttatatatcttttatatattgataactcaacaattaaaatcgatacaaaataactcctcacatgttttgaacatgttttgagagtggtttttgttgatgtgactcattgatttggtctattgagactatagaattttttatatttttttctccttatcacttatatgtgggctacacgtctacatgtctattttaattgctccaatgatttgactggcgctaccacatggatgccatattagtgaaaacaactcttaaaacaataaaacaataagaaggccacaacgcgtgcgctgtctgccaccccggcttggctagaatgctgacttatcggttgggctacagcgaggagggggagggtaaaaaggaggtacccattgcatttttttatttttaactagatattcattgacacgtgggtcccgtaggtttttccgacattaagtgccacatcaatgtcatataagtgccacctcagtcaaaaccaccagctaaattgtcttagtatattatttgcattggttttaaaagttgagggacacgtcatatctgattttacggttagacgaatttaagactcagccacaaattagtgaacgaaaagtgaacttattcccagacattcatcgaacgcagcggaggaaatcacaccgtcacacgagcagatgggcctgtgcgttgatctgccgtgaaaaattttgcgccaggcaggctgatcaagtgccgggccggacgtttggggtcaggcccagtggtttaggctagcctaatactattagattgttttgtactgtcccggccggccatcagaattttgactaaggccgtgtttagttatttttcaaaaaaaaatttaagcatatggacacacatttaaaatattaaacgtaaactaataataaaataaattacatattctatatgtaatctaccagacgaatctattaagcctaattaatccgttattagcaaatatttactgtagcaccacattgtcaaatcatgacgtaattaggctcaacagattcatctcgcaatttatatgcaaactgtgcaattgatttttttcgttcatatttaatgctacatgcatgtgtccaaacatttaatgtgacggaatgtttgaaagtttaaagggaactaaacacagccttaaatctaacttatttacaatctatactgtgaatacatgatcaaccattaggtagttttactttccatgatatcgtacattttcacaagctacgtactttttgccatcagatatagtttgaccctcccgcacatatttatgtatttaaattaggccacctttacattggacattcctgtcattaataatacggacggtagattataaattattatggattttctaaactcctaaatggtacctttgttgtaaataaattcttcactattacttcttagacaagtttttaaaatcaacatataaactttttatatctaattctttcgttagttttcttgaaaaatcaactcagtattaattatccatcattcgtcatctatcgagacagtatagtacatggatttttcaaggttttcttcaacacaataaaatacaacgtactgtatgtctgaagttccacggaaatatataaataatacatgcatttttttattcaaattgtatgcatgtctagaatattgcaaaacgttttgtttgctttgtcttatattaattcctccacaattattataaggaataaaaaatcagtcatgtatgaaccatgcataattatgatgtgccacatttacaagtactagctagccatacgcactaaaaggattcacttgtcgatcaactaaaaatatcagtttgatcgagtccgtatgaaccatgcaattttgtgaggttgtacgtagcagtaattctcagttgtcatataggccctgtttaaatgtttagttccaaagtttttttttcaaactttcaactttccatcacatcaaagtacaaacctttcatacacacaacttttctatcacatcgtaccaatttcaaccaaacttctaaaattcagtgtgaactaaacacagccatataccacctttcaatcaaactacgtgtccccatcacgtgtcattttcgttccagcctaacattcgtgcgcatgtggaggtttttgtaatgattaagagaaccccccaaaggaattaatgtttgttctaacttaacactacaagcatataattacacatagataccaccctagatagattaattaggttatgaattaggcgcatcaatacgcattatattgcaaccggtaattagcgtgcacatcgtcgtcaagtataaatgcacgctttatatatttacatgtcttatatataggttagctagctagctagacgtcaatcatttttttttctcaagtagattttttcactggctattggctatagctcgtagccacctcccgagttggtcaagcggtcggctccgccatagaagttgctactatcctgacagttcagtagtattgtcagggaatgctgcacatttactcggggccgtcggctattaagtttccccgtcaggaaaagtccattttctggtagtgaaattcccactatcgacaacatatatatataaaaaagaaaaaaaagcacgaattacccccctctcccgaactatcgcgatcgaccgaattaccccatgaacctaaaaaccagacatcgttcaccctaaacttttaataccggacgaattacccctcgacccaatccaaaccggttttgccctacgtagcgtacgcgtggcaatccggacaacattttatttttaaaaaatggtgggacccacatgtcataccccctctttctctcttcctctatctctctctctctctctctcttggtcagtcactagacagcggcgcgcacgccggcatgcatggcacgacgtggggatgggcggtgggcaacggcgtgcgggggcgggccggcagtcggaatgcacggcgtcacacgggcaggtagaggggatgggggagggagaggtcggcggccatggtggagaggcggacgatggccggaagcgtcggcgaggggaggtagaggggatgggggagtggaggtggatgggaaggtggaggaaatggagggggcgggccggcggcggccatggcggagaggcgggcgacagcgctcgccgtcgtggcgctggcggagaggcggaggtccacgaggtgaaagccgcgcgccatcaccgaccgctcggtctgtctctgcctccgcttccgcctctatgagctctacctcagctgaccacctagacgagctccgctttcgctgcctccgcctggtccgtccccgccggcgactccgacttagagcagcagggagaagaggaccgccgtccatgccatgagcgccgccgtccacgccgaccgctagactgcccgccctcgttcccgtgccgccatgcgcgcgacgcgccatctcgtgtcgaccagagatccggtggcgggcgatgggagaagaggcgcaagtggcggggagatccgccgtgctcgccacccgcagtggccttccggccgctgccgcccgcgcccctgccaccaccgccgctcgccacgcccctgtcgcgcccgccacccgttgctcccgtacgagagagaggaagagggaagagagaagagagaggaagagagaaagaggggtatgacaggtgggtcctatatttttctaataaataaaatactggctggattgccacgcgtacgccacgtaggacaaaccggctctggattgagtcgaggggggtaacttatctagtattgagagttgagggtgaacgatgtctggttttcggatttatggggtaattcggtcgaccatgatagttcgggaggggggggataattcatactttttccaaaaaaaattatcaatcactatcaaacgctcttcgtcggctggattcaacctgttagatttatcactagggctaactttatcttcaaattttatcttaaccctccacatgtatatacgtgtgaaaagagaactagtagaagtggaccagcccctgacaccctaggctatggctcgaggcctggtatcaaaagcccatggaccgcaataatttttcgatcatatatggattagctttctatcagatcaccacaggtccgccctaacaggatgcttctgccttccttgattgatcatcttgttaatttgctcttcctactcgtgtcactactacagaaaagccttcggtgccggttggtttcccaaccgacattacagagacggcactgattacttggggtcaaaggtgccggttttaaaaccggcactttgaggcacacatgagccaaaaaaaaaagtcggctaagccatcaagccgatcccaaataatacccaaatcccaaaattacatcaaatccatgaatacatcaactaaattgcctcaaatccatgaacacatgaactatagtgaataatccccagaaaaacaacacatctaacatcaacaaatcacaaacaggaatcacatcaacatcaacaaatcacaaatcacaaagagggaggagaagagatggatccgtggtcgccgactccgtcgcacctctagccgcctccctcccggcggcgcatcccccgtgccttctggtgccgcatgtcgcctcccttccaccgccgcatccccctcccttccgccgccgcatgccgcctccagccacagccgttgctgggccgcccctccgggccgttgtggcaccatctaccctcctgagccgctgagagccccgccgcagccgccggaccaccaggccaccaccgcaaccgctgggccgccaggctaccgctgccgccacgctgggccttctccaccaccgccgttgcggtcggatggaatgtaggggagggcgccgccaccacctcgcctcctactgtctggctgcagccactgagccgctgccgcctgcccttcgtcgggtggagaaagagggagcgagagagagagagagctaagagaggggaggaggcagagagaagagaggataagggacaagggagatgagagaataagggagagagagagcggaggtaataaaaagatccgcggttttcttaataggcgtcgtttttataaacaaacgacacctataatataaatataggtgtcggttctttaaaaaaccgatgctggtattatatatagatgttggtttttagttaaaaccgacacctatctctttataaagatgctagttctagccgaggtgtcccgtggatgcgcgtttgggcaggaaaaacattataggtgtcggttttatctgtttcgacacctattgtgccgacttatatgtgtcttttttatagcgtgttcatgtgtgcctttttctaatgctccacccgatatattgatctagctactaaccaacaaccgaagtggaatccaactcctcgcctcgccccaattgcatcgcatgcacgcatcactcatcgatggcgatgggaggcactagcagctacgtacacttagctagctaccttctctcgatccctttcgcagctaatttggctgcaaaaaaaaaatatatattggcacaacatatctgagattccacttggccacttctggtgtggggctgactgtgatccaagctggccatgcaacgaccaatagcggtgtaggatcggatcgcttcgccatctgattaagattttttgtttctaatgagaaacttccctcaataataaggtaatgaagtagtctatatattattgtttgttttgcgattacgcgtaatgcgagtgtgacacactgttatctttttagttgtgatgatttagtttaagatttctgatcaaatcaggtacaagaaagcaaagggctcttccttttgttaatgattgatttgtggcttgggtggtagcacttacttttcgatgcgataggctacatagatgcacgcatgcattgctcgagttaacagagaggttgtactgaaggcggccggcctggaggaaggagaggtgtgagaggagaggagctagattttgctttgcaaagtacagactgctttccgctttctgtatagctcaagggcggtaccactaactacttctttagttaattgggctacagtctaatcgacaaaatgctgaatccactacaactaagcagacatattcaaatttcttttttgggaagagttgcacgttatatatgagttacagtgtttccttttcggtttgtttctttttctgtgtatctcagttatgagatggaaagtgtatccaatcgtgtaacctttgaaaatggacacaactacaaaatgagatggaaagtgttttagatatagaagtcggatttctatgcactattttaaagatggggatagaattggcgaaggaaattcttgaccgacctagtcttgtttctgaaaaagcgatgccgtttcgatatttctgaccctagccatatataaaatgaacttcctaatttctttcaactccgtgttgtaatcatcactaaatagctaaattggtaaatatgaataattccgacaatgctcgttctcggtcgcccggggggatgggaaaaaaaatcgatcgctcccctccccctacgtgcgcacccccactggacctatccacttttccctccccttgttccacaaaagatatttcacctagtgtgtttacaatgtttcactgtgtatatatctaatgttgcagtgaattaaaatattcttttacaacaaatcacccacatattttggaaaccctttattaagggaatttggtttattttttgttccaccaaaaatgttttacctattgtactcacaatgtttcactatgtatagatctaatgttgcagtgaactgaaatattccattgtaaaaaaaagcacaaatatatattttggaaacccctattaagggaattcgtttcattttttgttccacagaaaaatgtttcacctagtgtacttataatgtttcactatgtatggatcaaatgttgcaatgaactgaaacattctttcactatttgctgaaacattatttttatataaggtgaaacaacacccaatttaaacgagtgaaacattttcgatctacttagtgaaacaattctgatatacctggtggaacatcgtgcaacatttaaaaataattcaataataagctaattttttttgtcagaatatattcatgtgtggtcttgttttgaagatttaattgcaacgaatttaatggtgcaatcagatcatgatttggataagtaatttaagagaaaaatctgtttaaagtagttttgcatgtaaatcaggcgctgacgtcagcgcccaattttaacctcctcttatcgggcgcccgacccggagtcgcgtccgaataattcccaaacgattgaggaccgttctcgttaaaatgatatcatttatgcgattgttttcatccctagttataaacaattgacatgcatgtaaatatctaatagttcattgaaaatttatttaattggcttatttggtttcctacaatacaaaaatatgggcaatgccaaatcatggcactacttaaaaaatggtaaaaggtgctggttgggagccccacatggatgctggatttcccaaccggcgtctcaccggcggttctgatgagagaatcaaaaggtatggtaccgggacctttgatgttacacgaatgaaaaaaaaaggcggcttgatgcactagctaatcgagccgatgcatcgagctgctctctaccaaactcagaccaccatcgatgaaacaacatccacaaagcacacgacataaatcatcatcgatccatccaacaacacagtacaaatcacataaattttaatggatatccaacaatttcacacaacacaaattgctcactgggacatcgaggttgccgttgatggattcgtcgaatccgcaggagtcgctgccatcaagggcatggacgccacgacgccgcagcggtagagatgggaggaggagggtctgcgcctctgcggtggtggggtgggagagaaggagagacactgctaccgccggatccacccgcaggagaagccaccgccggatccacacgtgggagtcgccgtcgtcgcagccgtcccgtaggagccactgccatcgaggggatggacgccatgacattgcagcggcggagaggggaggagggcaggctgcggtggcagggtgggagagaggaggagagactgagagcgcggaagatgagggggctgcgagaaaggaggataaggatgaggaaggagctcggtcggctcggctcagtgctatcaagaatctcaatatgtgttggtttactaaaaaaaggcacatatagtacactataggtgccggttaaattaaaaaaagagtaaattgcactggcggttcttaaacttgtaacgaagtttcacttatatccacaaacatgagaaacacgcatcgagatccccaaatttggtttaatatattatcccggtctaaagcctcgtttgaccgtggccttgcctacgtggcatgctacgtggacgatgacatataatttctttactcccttcttcctttttttctcccttcttatccctttttctctccactttgcatccttcctctcccttctaccgctgacaggtggggcccacctgtcagtgcccggcgaggctggtgagggggcggggagaccggcggcggcaatggcgtcgtcgacgggaaggagaaggaggatgggaaggggaaggcccccggtccgaagtggccccgctgcagctgtcaagctcgtgcccgccccgctcgcgctgagctcaccgatacctccaccgcacacgtggccgcggtcggcgacccctccccaagggcacggctggcgacatcaccccccgcgcgcgcctcggccgcttccgcatgaatgacgcgccgccgcccaatgaagtgcgccatccccctccggcgctggttgcaaggccataccacccgctcctcaccatcgccgtcgtcttgggcggcggtgggagaggaaatagtgggagaagtcaaatgtcagcgcagcgggaggagaggagccgcggacagcggctgtctctccatctcctcccctgtcggcctctacccggggctcctctcctcctgccaatcggcgcccgcacgccgctcctctcctctcgccggccaatgctcgagcacgcgagctgctcctctcctcaccagccgccacccgcgcatgcgcgccgcacctctcctcccaccagctagcgcctgagcacgcgcgccgctcctctcctcgccggctgccgcccgcgcatgcgtcgttgccggaaacctcgtccaccacgcgaggtgaggaaggagagaaaagatggagagaaaaaaatagaaaaagaaaatttagccatgtcatcatccatgtgacatgccatataggcaagaccatggtcaaaccaggctttggatcgggatgatacattaaaccaagtttagagatcgcgatgcgcgttttgcaaattcgtggatctaagttaaacttcgttacaagtttaaggaccatagtgtaatttactcattaaaaaaacaggcatgggaattatatgaaccggttcttttaataaaccagtacctacaaggtgttataggtgccagttttaaatttttacccctctaaggcttagaatgacgggaaaaagctcatttgtgtctatgtcggttttagattaacccatgcttatgatgtgtcccctattacgtgttcggtagtagtgtggtactgtgggtatgttttggaaatatttttgttttataggtaaatcttggtaaaatgccaatatattggtaatgcaagatttggctttaaaccatattggccccaccaaatgctccctctcacgatgaaccttgtgtcatggaaaaactgaaaaataagttttacattcaattgcgtcagccaagatttatactcgacctttagctttgatattaagttgtatatactaattcaatgcaaaaatgtaatgcatgtttcatttgttgccaaaacaaaacttatcaaattttggtttgaccaaatttttgtaaagcaatgaaccaaaaccaaaccaaataattttggtaaggtcttaaaccaacacctccacatttttgaccttgttaacatttggattaccaacctttagatttaccaaaaatggtcttaatctgacaaatgtgtctaccaaaaatgttaaccctctttactaaacatttggattcatttatttcagcaacgaatcaaatatgcgcttaatctgacaaataaaagacagctaaattcgcgaaagggcctatagactagtggttacaagagcctcagtagcacctgaggtcctgggttcgactccccatgggagtgaatttttcaggatttaacggtgttgtgctttcagtggtaggcgatttaacggcattgtgctttcagtggtaggcgacgtgcccgtcgacagcgagacgcctatggtgacttcgtcaatctcttcaggatttatcggcctagttttcgaagatgctcataggtagggtttacgtgcgtgtgttcatagtgaaaaaaaaaagaagccttgaacaggagggttaatgcaggacaagagagcgtaagctccatcatttgtttgttggcttgtcagccacagctaaaatgttaataataaaacttaaattttaaattgattttgaggtgttcttattttaatttatttttcagcattgacttttaaatctaagaaaatagacataaaaggtttacccgtaaattagttttaatcatttcatttatttttccacaccttatcaaccgtagttctcaccgtagctttggctctcgctttacacagacacccgttgttttctttctaactaactatgtatatatatgagcttcggcatatcaattttccctatctccttttgcggacatggtttttcctttacacgccatgtccggtacatagtgttttttgggcttgtaaacttctgctctattaatatacttccctcgttttatattataagactttctagtattgtccacattcatatatgtgttaagaatctaaacatatatgtgtgcctagatttattaacatctatataaatatgagtaatgctaaaaagtcttataactttaaacggatgaagtacaagaggcaaagccattacctttttcaatttttttcccctgtcatcagctactatgtcagcctgatctaagaaaaaaaaacaatgtcagccaacacagcatcccaagtgtagtcgcctcactagcctggtcatcggcagatacacacaatcacactgtatcgagcgatattattgtacactacttactttgcaagtgtttcagaaagtgattgcttagttcctgatatcacatactactacaactgctactagctgacacgactccatgacaggagcaaaagtctgcgccaagaaccgaaacgtttcttcagagaactctcaattctgccttcattcgctttgcatttctacagtcttctgtggtagctagtctcagcagcgatcgattgcacgatatgactcggggtcttatcctactcttatcttgttatcttcttagctggtagatctatggatagagaagtagaattctagcatctcttcatctgaaaacgaaggcctgattacttatgtttaaggaaagattatgttttagaattataatctaattttaaatttgaaaatttgataaggctaattccaaatacttgttttcttaacaatcatgaaaagagaggcagacagaaaaacagacatctaaaaacaggggaaggtaggccgtgtttagatccaaagattttcttcaaacttccaacttttctatcgcatcaaaattttcctatacacacaaactttcaacttctccgtcacatcgttctaattttaaccgaacttctaattttgacggaaactaaacacagctgtaatgtataattgacagtgaaagttattcctcaggtagtcaggtacttggaacccaatgataacactggtattgaaggatggagattcatcaaaaaagtaatggaatttatgtgacaactacaggcattcattaagatgcaaaccgcacgaaagacaatctgtacgactaccttgatagcggtcagatagctgtacttgtggcttcaattttcctctccatcaaaggatgatgatgattcattcagatgatcaggtcttatcttttcatgtcacagtagtgatagttaatttgtcaccaattctgattgatgctgactagttaatgtggatggttaacacgaatcgtaaccaaaatctgactttttagtagacacaaatgaactttattttaccattccgtaaaacatccatgtatatttacttttttctttttaccgactcgcacggtcgcaccagacagtgcgaagttttattaagagagcaggaaatattttcaagattacaaccttgtgaggtcggtaccaggaaaacgaaaaaagtataccaccatccgcacaccgataactccaacaaacagacccaggagaaggctagcaccggaccggccgccgctaagcgtgaccgaccgccgctaggccaacaacggtacacagccgagatcgcccaaaacccgacccttacaaccaatacaaaactccgatatatccaaatctttgggattgagggagagagggtgagagaaaagaatggaaccgctctccccactaagccctccaacgtggccgacttgtagaagctagggcgccgccacaagaggatatgaatctagagtgagcttgcatcaattgcttgggaggtttcggcaaggggatgcctagacgtcgtatccaaggagagaagcgacgaaagtaccaccgccgccgtccgtcaaggtcccaaagagaaccaagactgggctttcacccagcagccccacttgagggggtgagacagcacgacaacgccctcagaaggggattgacgctcgaatgccatcattaccagtctagccaaggccggtctgggttttcaaccgctgtccaccgcatgtcgatctaccactgatgcaccattgctccactgccatctaaacctccgccggcacgtgggtaccactgcaccggcgccccctcgccggccagtctccgcacgctgccatcggtcggcctcgccaagctccgcctctatcggcctctcctcctgctgcgctggccaccgcctccacgccgactagcctcgtcgtgtcgcaccagctcctcgatcgcacctccacacacagcagccgcctccgctgtcatcggccgcgcctcaccggcctccgctgtcgccagccgctcctccgtgcgcgcgctgcctccgccaccgctcctcccaccgactgcccgccatcaccgtcgtcgccgcgagtctcctgggccacgccaccacctccgcgagcagcctccgccagccctcgtctcccgggccatgcttctgtacgcgcaatgtctccgccgtcaccggctggccagcctaccgccgtcgctcctccctccggctaccctcgatttgtcaccattgtcgccgcgagtctcccaggccagctgtcgc

SEQ ID NO: 15747 - DNA, 4604 bp, Oryza sativa
  unsure (1)..(4604): unsure at all n locations
ggtgcatgagaactgctaccccctggcnnnnnnnnnnnnnnnnnnnnnnnnnnnnnnnnnnnnnnnnnnnnnnnnnnnnnncctgctgcagccacgaccattcaaggagcaaattaaagccagttaaaaatctctcatcaaacccagacaatgctgttctgtagaagcttcgatcagtttgcatgggctgctttatctgcaacattgcagctcgatacaaaggtacagtttgcagcttagagagttcgtgaacacaaaactattcatgacagaaaagtccacttgtacttggccttgacataccactagctggccaactagcttgtcaatatctcactttgattattaacgctctaccttgacctagtttctagaatatccttttcaggaatatatcatatcttagccaaatggacagatcattctcagggtataaaaagaaactaatgctgacaagaaaggaggcactttttatgaaagcttttggggtagataacatacaatgcacactggctagtaactggtgtgggtgtggtccaacaacacatcctggttttctctaacgatccattaaaaaaaaggtttatgtccatgacagctatcaacttcttgttgatggccaaagccatcaacctcatgttgatggccaaacttttgtggaggtgtaaattgtttatttattaattaatcatatagcaaatgacgaacatgagaaacggacttaacatgaagaacccttacgaagaaaaaccacaatcgtgtaggcagcatcagtaatacgaggagagttataggcaggggatggcagtgaggcagtgtctctatcttcctagatatgctatggtaatactcactctgattccaattatatgggtaattaaactaggaaaagaatcataattacgtctattgaaattgtgtacaaattgggacatgtaaaatcaacagtttgcaagcacttctgtctattagaattttgcatgtagtaagtataattcacggttcttctgttgtagatttgaaccgttattatcatcatcaagggtattagtagtatataaatatatgctactaccattctgtaatagttcacttatcaatcataaccaaaatttaaatttttaaacttaattatataggggtctttttaatcgtggttaatttttcagacttggctttaaaactgataatgactcaaacatacaagtttttttttagtctcttcatttctctatggcttattgagctcaactgatcacagctaacacaggcagcgaaagaactactatatcactatcaataacactgttttacgatatgtgcaacttatcacagaaagcacacgagaactgatgtttcatatcacaccagtaaaaacaggaaccagcttttaacaactggacttggtaaatctgtctcgcaagacaagacatgctgagagagaaggggttcctcttgaggatatctcctcaattttacgtgtcataaaagatcatgttaaaaacaaataacaaatatgagtgtcacatcacgcctgtccatagctgttcaaacttacaggttaatttgctgagtgctatatcgagtattttttaaactatttataacttcttaagtactcctgccatcctaaaaagagacaatctattattgatacatccgagtacaatgaatctagatataccctacgtccagattcattgtattaaaatatatcgcatcctagtactatgttgtctttttttttaaacgaagggagtaattgagtaagaagggaggggacgagagacatttgtgctgtaatattctgatgctcttcatttcatcatatatattcttgtacatagataatcagaagccatatacaattacacggtagcactcaaatccatccaccttcctgtgcacccacccaggtagcatagcaaccaccatagccaaaaaggacgagagagcacaaggcccaaacacagcaacactcttcatccccttctcatagccaccaccacccaacacaaagcgcctcccaaaaaaaccagaggacgcgcgcgcgcgcactgtcagtgtgtgcacacagaacagtgtacaggagagctacgataataactaaaagataatgctccctctctaattaatcacccctccccttaattacatatatttatatactactaatacccttgatgatgataataataataataataatctttctccgatcctaacccaaaacccctaggagcagagcagagcagtagcagagagagagagagagatagctgtcgggaaatgtgggttgaagccgtcggcgaaatcaccacttggggcgagcacgggagaggcgctcccactccaccagccgcagcaagaactccatcacctgcaagagaaaagaaaatgggagaaaaaaaaattttagccggagtagaaaacacacggtggtgctggtgcagtgcagaaacaagttggtggacgccgggccgcgccgccctcccgagtcgaccgaccggtcgacaccgacggcgccggctgtccgtcccccgcggcgcgcggtggtccccgggaacgaaagcttcgcgcgcattgacgtcgactaaagataataataatagccgcgacgcgcgcgccggaaaactacgcgcgcgcagcgccgcgccagtagaacataacagtgtagtgtactagtatttcctttcctttttcatctcttttactacgggtgcgtttagttcacgttaaaattgaaagttttaatgaaattagaatgatgcgatggaaaattggaagtttatgtgtgtagaaaagttttaatgtaatggaaaagttggaagtttgaagaaaaagttttaatgcgatagaaaagttggaagtgatttacaacgggccaaaccatataatttgggatttacaggatgtgtggattgagataaagcacgagctaagcccatattatcgtgaattggctgggtgggtagattgataataaaataggatcctataattgttacacacccaagaagaaacatgaggtgatcaggaggggatggaataaggacgactgcgtttttatttatttaaagtagaagagtttccttttctaaaaaaaaatctgaacatttttgtgtgatgtacgtgttgacagttttgagatgagaaatcagaaagaaaaattgaaagaaatgcaaggggggtggtcattacctcggctggctcctgcagggagtaagaggcgttggtgtccttggggtacttggacacgaggatgccgatgccctggcctctcttgcggagcaccttgaacgcgtcctcgtcggtccggtcgtcgccgatgtacaccggcagcacgttggtgcagtcggcgaaccctgcattatttttattattcgtttcacaacgagcacacaaaacaatcagtgccaagcccagggaagaagaaaacgacggcgacagattaagcctgaacaaaaaaaaagagaaaaaattccattacctagcgactcgaggaggaactcgagggccttgcccttgtcccacttgatggtgggccggatctcgaacacctacaggagaagcatccaatgatcggaggacaatgactcagtgatcgtctcacggccgcaacatatcaaagcttaataataataagcatatatctctacctagcaaagaatcgattgatggctacacatgtctgcagaaacaaaaaaaaaaagaaaaaagaaaagaaaagagagtgagatttgaaagaaaaaaaaaactcaccatcctcccctgcgtgagcttcagtttggggtagtccttgagctctgccttcactatgtcagccaatgtgctccagctctgcatgcatgaaatcggttaattgatcatctagttacagagagaaacaaattaaggagatcgaagaggctgatgattagttgatgtcttctttttctaatagtactaataataattattactgctgaatagtgacaattttaggatggggctcacacactaattaagacactaacacccaaagaaaaaacaggtgctagtagtagtagatgcagggaaggaagagaaagaaaaggaaaggaaacaattgtgttgtgccgcaccttttcatcgacacatctgaagtggacagacacacagaacttgttgttctccaccttggctccaggtatgcacttggtcctttctatcagagaatcgtgcacctaacaaattatacacaccacaattaaccaagtttaacatcagatcgaacccaaaaattaaaagaaaaaaagctaaacttctccttcagctatagtttgcataattgcgtcgcagcagtagtactatgttctaacctgttctatcatggggaggaactcgctagccggctgaaagagaacgcctttcgcctgagaatcacacagaggtgcaaaagcagagaaagataagttttgcttttcctcgctgtggttgacaagtgcggcagtggaggatgctcaccttggccttgttgtggcgggaggccttcgcggggcccttgatgtccatgccatggctnnnnnnnnnnnnnnnnnnnnnnnnnnnnnnnnnnnnnntcaagacggtntcaatgggttcaa

SEQ ID NO: 15748 - DNA, 10311 bp, Oryza sativa
ccgccccccgcgccctgcgcggacacctccccgtaaaatttgtccatttctctcgcactccgtcgcagccgtagtactagtccgtggcggccgcgttcgttgctctgctcgtgccagtgtcaccgtaccttaccaccccgttgtctgagccgagacctcgtggactcatgctgaccccgccagattcagaggccagtatagtacggagtactaccgctagcagcctatggtcaaagcacgtagtacctgcaatgcatcggcgcgccctggcacatgcatgcaacaaacggcagaaacagctaccggaacagacacgggcggcacgggatcctatgcttacaactacgtactcctacgttcgcgcgccacgagctgccacaccgagcccacgtacgtacgagctgttggtcgatctccccctgcctgcttaccaagacgtagacgccgcaggtgcgcgacacggcatgcatctacctagtcactggcgtatgcatgtctcgttttatcgctacttcagtcactactaacataaacaaatctataatacgctatgatataacctagtataatttttagagaaggcatttcataatgtagaataacatatactttctccgtactaaaatataagtatttttaactatgagttaaaacaaactgttatgacctgagcttgtgagggatcgaatcacacaaactagcagcagaatacactgataactcgagataatttaggaagaaattggggaatcgggtgaagaacagacagggggcaaaggaagaagaagaacagcaggaggaaatcagatttaattcatttcattcactgaatctctcaatacatgtttcttgccttatatcgtggcggtaagactgacttgtgggacccaatcctatttctagggcccattcgtcattcacccaacactagatacatttatctagtatgggtatgacattactgcccccagaaaaacttgcttgaggtcaagcaagagttaagtgtggcatcgatgactttggacacgcaccaactttcttgcagaagtttagatgacctgatttccacttgatgagaagcacatgcaagtaaagaacatggcaccaggacacctatggactgatgacatactttcaaagctcccaatgcagttgcctacatatcaagtcgatgatattcaggaatcccatcagatctcaatatatagcatttccagacttgatgggggtggtggccaaggtaagataaagattttagcagcccttgcatcaaggaggtcttcagggagtagcattatcttgtcattgtctctaaaagagccaataagtaatagcacttcagcacttgcaccgactacaacatatgtgccaatagctgcagcagaacttccttgacagattgccatgaaagaacaaattcccttgttctaaaattccattgcctcttagccaataatgctactttataaactgcccaattctttttcacaacccactaactgatgaagcttgtaacaccaacaaattcttttgcgtaattcatgacaatagagttgaaaatacctagatctcatggcctgctgacaatcttcaggttcaggtactgatttatcacattgtggaatgattggacaatttctctataacaagtacttctggtaacaattagttcatgcacagtggtttgagaccaactcaaaatgctcaggtcaatagccagggacatatttgacttgataatgactagcaatctgaacattcttctcaggtctgcaactatccaaatgacatgaaagtactgttacctcgagaattatccaaaatggataaactaaaaactgagaaggtggaggccatggttctttctgccataacatcttggtgttttgatagtcaatggtttgtagtgtcatgagagccatcctcataatgcttgaaacttgcataatctgatttttggttgccgcatgtaaacatctatacaagcagtgctcgaatatctattgttggttcttgtttccaggactaaaaccatttctttgccagggaaatatcttgtcaagcaataattgatcaccttttgtttcatatttccagggacataacccatctctactccatggaaaaacctcctgaagcatttgattgctatatgaacaagcccgccatagtggcctacacaaacaccatatgctcattggaatgtcactggtctcacagcacacaaccacattgaccatggagtttggcaccatattttgaacccaaggggtgagatgctccactggtagcttgatattctgtggcatttcaacaaatgcaagagctgatgattcattgctttcgtaagacgtttcgtgtactagatcattttcattcatctcaaacaatgaaacgccgccaatatgagtgagcacatacacctcttttttcttcatggcccaacgtattgggcgatgagcgacgcgaattcgtgacacccactttatgatacgttggcttgtgcccttcctttctgtgaaaaatgaggctgaaatgggcttggtgctggatggaacatcatttacatatgttggacttgagatagagctggcatccagagaagttgttatgggcacagagctaggcaatgccgtggacacagccatcagcaaactagtaccatgtccgttgcatattgacaaacacctcacaggcgccaccgacattatgtcattggggcatgattgcatgtacttgacatccaggaagcaacagccattgtaaatgcagcacccatggagtgcttctctagctcgtgttgcatcttggcacagccggaacagaatgaaagcctcaacttgaattgttccctggttatacacacgcacttcctctgcaccatatggactgaatacctgaagaagaacctctgcggtcactggatagagcacatggctcatcgtgacgtgaaggacacttgctgtggttggctccttgttacttggcatttcatcgaacaccttctgggaatcaacactggaggttgcccctggacttgaaactgataccaaggaatccaccggggtagcaggtaccgaggaaggggatagagagcccatagcatgatccaatctggcccctaactcatcgagcttcgccaaaatgcggccatacatggcctccttcctctgttggtccagcgagtcactggcgacggtctccatcagcatgataaccactatcttcactcgtctcttcgtagatcgaaccttggttggaatcacggcgctcaagctgaacaccaacccttcctttggctttaccgatcaggctgaaatagaacggatcataatggctctgataccaaattgttatgatccaagctcgtgagggatcgaatcacacaaactagcagcagaatacactgataactcgagaaaatttgggaagaaattggggaatcgggtgaagaacagaaagggggcaaaggaagaagaagaacagcaggaggaaatcagattcaattcatttcattcactcaatctctcaatacatgtttcttgccttatatcatggcggtaagactgaattgtgggacccaatcctatctttagggccactcgtcattcacccaacattggatacatttatctagtatgggtatgacataactgtgtatacagatttatatagctaaattttaggacagaggtagtatgaagagactatatttcatccagcttcgtatataaaaagtaatgtttgtacatgagtttgataattaacatactatgtttaaatttgtatatatagcatatagaagttggtttttctaaagaccgatagtgttctcgctctctgtacatgcgtcgtgtcaaagactcgatcgaagccctgcatgactcatggctggtcggtcgtcgacccgatcgatcgatgtcagtcgtgcacgcacgcgaatgtccaactctaacggtctgacgcatgtgatcgatagctcatcagtagtcatcacggctttgagctgtcgatcgagccgggtctctaacgtacgtgtgcccaagcgacgggctacacgcgtatcgccagctaccggccgggtctcggccggtgacgtgcatgcatggcttcaccagccaatgtacttgctttgtcggcgacatgtccttttcccctccctacactttctttttgactgtgcagcgaccacgtcgacatctcgcgtgtatacatatacggagtatgtacaaaggtcaattgcataacttgctttgttcccttggttaattaatttgctatagctaatgtcatcttctattgatcagtatctgtcatcagttattaacttaacttaggaaccatcaaactaacaagaagtttgtccatgttagctactcctacctacctacaacctagtataactggcacataggtaattgatgagttgatgatttggtcggcggtttaggttataacccacgggtaagtatgcatgtcttacatgtggacacacacaaattaaactagtagctagcacgcagcttgtacgttgtaccttgtaccggtgcataattaccatattgtttctcccgtgtacttgtggagtttggagatcggaatcattaatttagggggaaataaaacaccagctgcgcctgcgcacaagattcggcgaaacgagaggcgatctctctcgcctcgtcgccatcgtatcagcgacccgggccacatgggttcggctactaatctatgggttcttttcacctaacaatggctgcaagagatttaattaattagctctgcaaaaagtgactcgctttttttttatctcctgcaggcccagcagccgtgcacgcacagtggctgtggagaagccaccttgcagttacagtggatagaaaatcaagtgattaacgatcgattttgagctggaattgttaataattatcctgtggtattaaaaatggatcaaaagctaactaattctgttagtgtagtgtatgcttgtattggtcgttacgcggcagcattatcattgcttcgaggtctcgttttaatttttgggtgtcttttcttgacgtgtcagtaagtacgtgttgatcagagaatctagcgctggcacacgtataattggttgcactaatatttctgagtagtactcattggcagataaaacacatatgcaacataattaacctggatttggtatacatatatgtacagatcgatatatatatgtgcctgtcaagaatataattaatataattagtttgcactatgcatgcattgcatagcatatgacacactagctttcgatgatgcatatggaattgaaggaggggtaccaatatagcatggctgcacatggacgcatatgcgtacatagctgctgacgtgtacgttttattcgatcgaagagacgggatcgatggtcgttgcatgatgagtctaagctagcgaccgagctcactatgctatagatgcccttaaaatgctgatcactagctacatagatgctcttcttcgacctagctagagcaatcaaagcatggtgaaggaccaatccaggagacgacaataatgtacaattcaattagttgagagcgaatttgatgcttaattacgtggtacattattggtacgtgacattatatatatatatatatatatatatattcacgcgcgcatctgatgaactaattaaatggctagatatataaatgttgggagatgtatatttatatatatatagatagatacatgtttgtatagctagtaatttcaacggccagcttcttccccccaaggaattaatcctttttcatcaacagaatccttatccttcaccttagttcctggctccctatgtactgtgatgcgtgtctccatgtatgaacctggctagcttctttctagatctctctagctcgtgcactaccttatctcactcatatatatgcgcatatattagtcacatggcttcgcttggatcaatggatattagcatatgtagagtcataaaatgcatctttcactttggatatatagcctcttttactttatatatagtcaagagctagccttagctagcaagctagcttgctccaccaaaagttaagcatgatacattccagaatgaattgagcagtacagtctaggaagtaggaagtaaacagagaacaaaattagcaaaagaggaaaatggaggacgagagagagagatgaagaatgctgaaacgaagtcagctatcaacactagtgaaagacacccgctttgtaaaaagttttggttaagttcatctacatttacatcggacaatttggttacattattagctagatcctaaatcatatcaaggcgttttcttccccgggcatatcatcaaggcgttttcaaggtggcaatgtggcattggattcgtctgatcttttctatcgtttttccctttgccccatatacccggctggccgggaatcagcatatatatatgttgaacacgtagagcatgacaccgatataaaaccaagtctacatatataaacctcgcatctaaatgattggagctctctctatctagctataggccagcactgacatcgatttgttcttttatttagtttttgacaattagaggtaaattgcaggatacattcttcttcttagatcgatcatgtacttgttggttaattttatcggttattgatgatacaattaaggagatatctgtgtggtggagtcaggatttttagaatgagtattcgagatttgcattaatacttttatattaataagaaaaccattcataatttttgttggagcattttcttttttaaaaactatgttttgtcccaagttgtagaaaaccataggtattacaatttatggcatatgaccacatgtttcatagtataagggttccatcactacagcaaaacaggcaactagagacggctaaaatactacgggtcatcaaaccgttgctactaaactatcccaacgtacgtgcgagaaatcccccatcacctagagtcggataaaagagacggagagataaactgtggctacctccccacttaacagcacccaccattataatatcctttaaaattattaattaatcagataatcactatttatttttggaactgctcggtacaatcgtaggtctatcgaaaccctcgacagagtcgcacgccgccgcgcgcccgccccagatcgccggcgtgcctcctccaccaccatcgcgcgccaccgctgaccaccgccgctccggtcctgcaccctcgcttctcttttttggccgttgctgcctatcgccactgtgctgccaccccattgcagccaccacggctcggttcagatcttgcgagtcactaggtagatgaacacgtggggagcatatttgtggagggatgagactgatttttggctaattcagagtatgatcccctgattggctgattgaaagtgctaggacgaccaagggattgacctgccgtgaggaatcagatcgagtcggacagcttcatcaaagaaaaggtaatttcattgttctctctttctattgagaatccacataggtatacattggtttaggacgattcgtgatgaacatctggtttggtgtgctttggtagttttaatttacattcattgggactgtggttagaggccattgttcttaatgatctttctttcctgaaaagttaggtatgttgttcaaaattgtcaacattactgcattcaatgtaaatctagtttctggaaaatgaacttaatcccttaatttctgaagtccaaaaagggcacaacagatatacaaagatatatattgactttgattgctttcgtatgcttcctaccttaatgcagggtttctgttagcagactagctagagggacggcttttgctgctatttgacacatatgcgattatcaattctcaggaacttcaattactgctgaagcacctccatgttactactagcaaggtgaggttgattaattcccaataaaatattatgcatatatgattgctaacttacatgttgccttatcaagagaaatgatatcaactctgcacttgttgtcaatatatattttgtttcactatatatccaatacagggcattattaatcatgtttcactattcttttgcttttcctaagcagatcaaaagacgatttctttagacttcaatacaagctgaacctggaaactccgtgatatacttgatgattgaaaggcatattcctttgcatccatggtgcttcttgtaagacataacttttttgttcatagattctctcacaaactctgagtgatctactttcagtttcagatgttcagataaaccatggagttaatttgatctattatttacatgattcatagtccatcccgtgttgttttccacggtaagtcttgtcattattttgttgacagaatattttatcagtagcttccttcacaatctctactctagtccactttcactatttatttttttcacattgtaaagttacattgtatagcaggttcttgtgtgaagatgatgattaacgggtgcatgaagatgatgattaacgaaataacagttcaatcaatctggagcaatagatagtatacttcaattagatggagaagtccaagttatgtatttgtttatgatattgtagctgaaattgtacattttttttcctgaagttcaacttttcatgtaagatgtaaattaccattcagtgaatgaaatgtgtgatttttcaacaagtccctccctgattttttttatttataatgctaaagtgtgatgcagtctgatgttctccaaataaaattgtggatgccagaattgaggaggtttgtttctgtatctaagaaatttatttgtagagacggtctgaagccgtgtctagtgtgtttattatgatatttctgcaaaatatggaaaatatatgtagagacggtttttctgtctctatggaccgtctctacctgatagacacggctagcaaaaccgtctcttgtttattgagacgggagcaatggcaacgcctcagagacggttcacaggccgtttctagtacacctagagacgggcaaaaccgtctctacaagagaagaaaaccgtctctatatcttgtttctgctgtagtgcatagaatcctgccttaatgaaatttactcaagtaaattcagcatatctaatataatatcatttataataggaaagaattaaaacaacaaccacctatatcaagaaatcaataattgaaattattatagatacttcataatatgaaacttttaattagtaaatacatattctacatgtatatataggagtatgtacggggtttggtgaaacattaggaacatggtatttgggttatgttcttcaagtcataacatatttcttttttgcaacttttgttatattaggttttctgatatttagtttttctgaaatcaataagagcacttgataaaatttaaataatttataatcgtgaaaaaatagcatttgtaaaacatttatatgtaacaatttagttatcagcatgaatctttcaaattaaaataaactagtattttggaccgtcatactaattaatatttcaacaatatgatactatcttgtaatattgaataaagaataattagtaagacgatgtattgcggggttaatgggggtgggctattcattcctgtcaccgcaccacaccacaccattatacattgtattattcttttaaaaggggtagtatagataatatatacatagctaattagatgtgtgcatcgaagaagtatcgtatcacctggacggcaatcaagtgcacaccaatagaactttcgtgtagaatttaatcatactaagaataattagagggtccacatgtaagtgagtggtgcaaaatattatagtagaggtggttctgtggctttatgccctaacttttccatgtttggaaagacgggcaaaaaggtaattacaagagtgtaaattctgcttgttgaacacgtcgtctcctaagcacacattgtcatgcatgcaactaactaatcataacaccaaatctttcgaagcttctttttgtatcgttgtaaatcgcttaagaaaaaacggcaagaatattttcataacggttcaagaatatgtacatataatatcggcttttgccacttgccagtagcacattttgattgaaaatcgaaaagcaactttagcatagattacccgtgtggcctctttatgcaaattgtctttatatttgtccctttgtacgtacggttaactagagctttgtatccatgatctctctcc

SEQ ID NO: 15749 - DNA, 38628 bp, Oryza sativa
  unsure (1)..(38628): unsure at all n locations
ttgaagaggttctaacaactgtagtttctcttataattaaaaactccccaaacaatcccgcatattatccatattttgagatattggagttacaaaatctagaaaataaattagaagccagattatggatttcttatagcatatccaaattctcagaagttagctaccaaccagctgtttcttactccatccgtcccattttaagtgcagctatggttttccgcgtctaactttgaccgtccgtcttatttgatttttttttgaaaaaatttaaaaacataagtcacgagtaaagtaatatccatgttttattatctcataacaacaaaaatactaattataaaaaaaatttaaaataagacggacgatcaaagttgggcatggaaacttatggttgcacttaaaatgggacggagggagtacaatattaagcttcctcaaactgggtttaagaaagagatattcttccattgttagagaggttacttccctaccatttgaaaggtaacgaatttaaatcatttgaactgattaaaacaaactattgataatataatgttaatacttttctggttcttgtgatgatgtataaaatgttatatatacatcgtagtattagacaggagctagatatatacccataactaaaaatattttactgtcttcgagaaaacatctgcatgtaccaaaattttgtaccgatatctcgagatacccaatatatgtaggtaccacgttttacattatcaaatccgatatatctcggtacaatttttaaggatggtaaaattacctcctaactatatctaagttgaactaatttggggctgcaacgatcaataagtatatacatatatattcttatagaattgatttcagacttgaattgagttaatgcctccgtaactccgtttgacatttcctttatatttttgtggcaattcgtgtgctcacgtgtagcatcaactgacctatatatatatcttaacagtttggctgaaaaatgtaacttgtaacaacttggtacgcaactggatcaataagtacatattttcataaactcgatttcaacgaccttggataattgatcaacttaatgtctcagcttaattagaattttgttcgtatttttatggtgatatatatatgcatgctcacgcgtagtatcaattgacctagatctgttgcagtacagtgtattgatcataattaacacatcagtactgcaacgcagcaatcgcaaatgcacgcactgtggcagaaagaaaattccaacttaattcataattgtccctgcacgagattgatcaacttctgaaacttaggattaattgcacgggctgttttaatcaagtcgattgatctctgggtgtcactggtttgtttctgagtcgattcgcatttgcacctaattattattatttcgatcgcgtcagcttcagcaagtttaatacatgtcctgagtgactcgatagcgttgctttcggggtcagcgtctagaataaattggccattaaactcggtttcgctgaactgaaacaagaagaagaagaagaagaagaagaagaagaagaagaagaagaagaagaagaagaagaagaagaagaaactgtagctagctcgatgtgtgagtagctctctctgctacgtacgcgtgtacaactacatatatatactgacatacacatcgtctgacggattcaattcgatcatcgatccatcgatttctcccccttaatgtcacgccgcagtttactcctcgatcgacagtgtgcggctttaaattttgtttgtgtgcatcgtatcgatccatatctcctacgatcttggacgacaaattcgtcccatctagtggcgaaggcaggaaatttcctgaggcaggacgccttcttcgtagcttaattatggattatgcattatcattagcaactaaccccttctagctatgaacctaaacacatgcatgtccagattctttatatctagagtttctttcttttgagacaaagtagtaattctaactccaactagcatttttctaaaaataaacacagtataatcacaaacattcacgtacacgtacgcacgcactcacatctaacaacatacacatgcatcctagtcctataaacatctccaagaaacttagccgcatatcttcatattggtaaagtcatctcgatatggatgattgggaatcggcatgttttatcccagaaaacctaaccagttaatctacgctcacttcgtaactgatataagcatcgcattagcatgtgaactcatcacaccctaatcttattctagctagtgaaagttaacaggggttttgactgtatgcgtatatataagcatgagtaataattgagcttaatttgagttttgggttcagttaattaatcaaggtaggcatgcaacctgacagtagtgatcataatctgcgacgaaattcccccacatgatgccaattactccaatcactaatctgccagtgtccggccggtgcatgcaacgggataacaatggcgctagcaatgttgcagcaaaaattagctgtacgcatgtgatggtgtgtgtggccgaatagttctagcgtacacatgtacactcttatattgtccaatatatatattctggtgccacacagaggagctaggcagctgtttccaatggaaaattaaatggaatatgacgacacaatcgatccatgcatgaatgccggacatttgagatgcatatatttctccatatatgggtcctgaatctgcaattaacaccactgcaggagttactcgatgcattgtaattgcatccagtactatactatactaactcaagttattatatatggcaggcaaagtcagcagcataaaatctagaggttgggttgccaatacttataccagctagtactagtcagtactcagtacatatactgctacactgcttcttacacatattttcctgcagtaacattgcaccatgggtatacatatcatctctcatcaataatgtatactccctatgttacctccgttccattttaagttcagttgtaatttctgtccaatgcttgaccattcgttatatttgaattttgttatgattagtgttttttttattaaatgataaaacatgaatattattttatgtgtgatttttttaatttttttattttttttaaataagatggacggttaaacatacacacagaaactgataactgcactcaaaataaaacagagggaatagatgtgatttgttctcactctcttgcagcctcgcagtgctgcaatttagtagtagtaccatgtcagatggctcttctactatccatatggcaaataataatttattgtgagcaacttaattaattatttatatatgatgatgatccatctctggatagtaggtagtactatgaccatgtttagatcccaactttttttcttcaaactttcaactttttcatcacatcaaatttttctacatacaaacttttaacttttttgtcacatcgtttcaatttcttcgaacttctaattttatcgtggaactaaacacaacctatatatagatacccttgatgcatgcatgggcataatttctccttagattattgaagaaaagatatgtaattaagctatagttagtacagcaactttgcatcgatgcttcagtgcaaaacacacatcatccatgcatcctgtgctctctcctccatatattgatctttagttctttacagctaagctagcaggagaggcaagcggcatatgcatgcagtgaagtacttgtatggatgatctctctatctagccagagcatactaataagtcatctcacatgtgcagtggtggaggtgtgcatttatgaatttgttttctcttttgctcagcattcaattcccacactctttgagtctgagttttctctgccactttgtttatcaccatgtctctggctccatcagcaccaccgtagctgtttagatcgaggggtgtaaagttttaacgtgttacattggatagtattatatagggtgttgtatagggtgttcgggcactaataaaaaaactaattacaaaattcgctagtaaaccgcgagacgaatttattaagccttattaatccgacattagcaaatgtttactgtagcaccacattatcaaatcatagagcaattaggcttaaaagatttgtctcgtaaattagtcgcaatctatgcaattagttatttttaaacctatatttaatactttatgcatgtgttcaaacgttagatgtgatggggtgtaaattttttgtgcgggaactaaacatggcccatgtctctctctagtctatatcttttctttgactgctatatatttcatactcctactcctactatactcagtaattaagagggtgtttggatccaggggtgcaaagttttggcgtgtcacatcagatattatatagggtgtcgcatggggtgtttgggcactaataaaaaataattacagaatccgtcagtaaaccgcgagacgaatttattaaacctaattaattcgtcattagcaaatgtttattgtagcaccgcattgtcaaatcatggagcaattaggtttaaaagattcgtctcacaaattagtcacaatctgtgtaattagttattttttaacctatatttaatacttcacatagatgttcaaacgttcgatgtggtagggtgaaaaattttgaggcgagatttagacagggcctaaattactgccaatgttcaaccatgcatgtgctctttctccatgcaactgcactgaaatttttgatggagcagtagtgcccaaattctttaggattatgaatgggggtaacattaagttttccctgcatatatatattcacatgtctcttcagcatgcttgcatgaaatcttttttaacttttggccatgaggtcatggcttgcatatgagagccaggccatatttgaaaagttttttctaaaaaaaaaattaagtaagggtgtgatgcatgaaggacatcatgaacaggacagtgcagtgccttggctacctgaacatgcaggagaaaggaaaggtcgatggcactctataaaatctctgcaagcgagagtgagctatagtggcatttaagcgactctttgtacgtttccaagaactactcaagtcatgacattgcactctagctcttgtttccttgtacttaaattcagcagtagtatatctacaagcatatgtacatgtgcatatgtactatccctgtaatgcgatatactacttgcatatacatttgtttttaactctcccaacatttttgacagtatgggtaaaatctgactgcatgtaaaaaaaaaagaaaagaaaagggagaaatctcactactgaaccaaccatatactctacccgttccaaattataattatttctaggatttaaaatttctaccttttcatcttaaccaatcctaattcttttttacctcaactttattaatttccgctaaaacttccggaaatacttatagtttacagaatcagtaaaatatcactgcatctcaaaaaagagaaatctctgacgttctgaaccaactagattctacacgctgtacaatcaaacatgcatgtcggtaaatttattagcataggcttgaatttttatcccattattaaaaaaatgtcggtaaagttattcaataactattcccgtttgatatatttgcctatttctatctcatcaccctggtaagtcatttattcaagataataccaatttatagttttctacttcccgggctccttatgatgagttgatgacaatcaacattggcatgtaaaatagtctttattagcggtctctctttatcgtcatgtaagtatatttggtgacgtggaagagagaggaagaaggaaagagaaagatggttgctacgcatgacaacggcatatagtcgactcttagcatttattagaaattttttgttgcattgagtctaataaaggaaagatgactagtaagaaagtattttggtacattaatggttagagaccgtactatcttaactattgtaacgtgatagcctctaattaatgtagagaccacaccggtctctacctttgtacttgccctcagtccctcacttacttgtggttttccgaaaaatcatgcataaattaagctagcatccaacggatttgctaactggtatgcgacagaaatttagggataaaatcttacatgttttggatcgtcaaattcgcaccaagatttgtgcctgagctccttctcctataactccggcgccggtgacgcccagcccaactcgatccagctgattaatacacagttcttcacaaccaaacggaagaaattcgccaccatctgctcttcccaagtttctttggagctctcgcgtcgtcctcccctaggggcggcacgggaggcggcgacccggccgcccctctccctcccctcctccccctctgcttcgccgccgcccgagcggccgccggcaaagccggccggccgcaaggacggcggcggcggggcctctcgcgtcctctcttccgggcgggcagggggccgtcctaggcggagcggcggtgaccaccagatccagcccgctccggccggatctggcggggtagcgactagcggcggcgagggtgggggcaacggcggcggggagggcgacggcgatgtcaagggcgcgtgacgctgggcggtggtggctgaaggcggcggggatggcgatggcggcggggatggagttggccgatggcacggaggcggcggcctggtgctctcgtggcggcgacggcacgttacttggtggcgacggcggcggtaccccccagatccgcgcctctcggccggagctgcagggtggcggcagttggcgacggcggcggcagtttggccagcggcagtttggtcggcggcagtgggcgacgacgacgacgacggccggcggcagttggcgacgacgatgacgacggccggcggtagttggcgacgacaaggacgacggccggcggtagttggcgacggtctcggccggatctagataccggcggtagttggtgacgacgacgtctgtgtggtgtcgtcggcggcgccggcagtggccaggcgaaaacgtggtggctgccgtgtcaactggcaacggtggtggaagccatggcgttgagctgttagctgctcggtggtggagggcgacggtgcagcaaaggttttgcggaggcggtggtgatgtcggcggcggggaaggagtcgggtacgagttgggaataatgacggcgaggtggttgggtgttcgccagcagcggctgtggtggtggtgaccgtgttcgcggtcaccgaaggcatagcggcctcggttgactagccgagggcgtgggagacgtccgcatctggtcggcgcggcaccgttcggtggaggggtcgaagaccggcttggcacagagaagtgcagccgatggcagtggaggccggctcggcgcgaaaggcacggccggcgnagatgaaggccggcttggcgcggaaggcgcgcccgatgaaggaaggccggattggcgcgagaggcgcgtccagtagaggaggccggcttagcgcaaaaaggcgcgcccggcggtgaagaaggcgacctaggtgtgaggaggagctgccggtgggtgtggcgcggtcttcggcgcacgaaggctggccggcgggggacgccggtgcaagggtcccacatgtcggcaaagcttgtgtggtggtggagcatcggtgcatcagtcgtggtttcgcaagggcgatctcgtctgtgccctttgttgatctagtggcggtcggtcacgcttagcggcggccaatccggtgctagccttctcctggtcgtgtgtgttggcgatgtcggcgtgtgggtggtggtatattttttccttttcctagttacgactctctccagggttgtaatcttataattttttcctgctctatcaatagaacttcgcaccgtctcgtgcgagtcgttcaaaaaaaacaaccaaacggaaagaaggatttcgacaaatttgctaattaaggctgttgagccttaattagctgttagaacattcagggattcatcgttaggcatattttggtgttgatctttatatagaaatacatataaatgtgattaaaaagacacactacaagttgttataaatgtgatatttatatagaaatacatataaattccttagactctgtttggaattagtgctggctttttttttctgaaagtagtgctcggttgtcattggttggataatcccccgtccaaaaatataacaacttttagcactcaggttttatcctaaaatataacaacttctccactaacattctcttaccaaccaatctcaatcctcccaccattcacttttcacaccaaccaaattcaaaaaatgcatattgaattttaattttttttgacaaaatttgatcggaatttaccaggaggcagtggtcgtttttggctcggaaccggttaatttgatgaaccctgaacataactctagtaagatacagtatatacttgccaaaggagctagctgagccacagggtcgccatctcaaaggaagaaaaattaggtcaaatgtctaagtagttataagagctaacaaaaatgtgatgctgtcgaattaatctaatgacgtacaaatggtcttctaggtacacatttggcggtgacggagaggctgtaggagagctagcactccacaaaggcacaatgccaatttatttcccatccctttccttgtgtcgatgcctatctttactcaatttaattcgcattaattggaattgtcatgtaaaatcatgtattgcaagtgcttttaagagcttccgctcttttctataatttctaagatatcgacttagactttgatacatatatatgtttgatcgatcattgtcttttcttatcatatatccataaaaataaaaaatatataactacctaaaagtattgttatgtccaaatttgcttattttcacatatgaaatcttaatttttttttctctgagctggttttgttagacttggccacaataacgtggggataacatatcttaaattaatttacatagactatgatgacccagttggcacatttgaggaaaggcaatcaatgatattcactaaatgagatgcaagatttattgggcatgcattatttgtcttgctagtacatagtagcagaggccctatttacatgtatatataaataaataggagaaaatcagaaaaggattatgtgttgaaaatttgaagatttttcttaagacattaagtccatttcaaagtagaattaagttgcttttgggaaatcagcaccatctataatctatttttttattggtgtggggaatggtaggtgtatgactccacctatcaagtaccaagttttagatccatgtgttcagaaatatggttgtgtacactttttgacgtaggagtcacaagttatacttccattgtaaaaaaaaaaatgtttgttccacatatcaataggaggaaaaaagttacagtatatttttatggaattgggctgtgatgtttgttattagagatgtagttatatatactctatcgaagtgcatcaaatagttgatgttttgttattatccaggccaaacaaatatatattgttcaacctcttttaaacaaagaaatactagcaagtcaatggaagtgatacactatgcaaattttaacgtttcatatacagctccatgaaagtatttggataatgaattatagtaattaattggcatttcatcctacaaaaaaatatgtttttttttaaaaaatacaaatggaaattattaaagattgttattagcccacacaacctcgaatttggtgctaagtatagttgctaacaagacaaagtttaataaaatcgatgtacatatattatataagtagagaaattaaatactacctacagcatgcatgtgattttcattattaaatcgaatcaaataaatgcatgatagctctatttttattctaattgaataaaaagatcatttgattttcattatttatgctttgtctgataatataatttaggttaaattaaaaggtgccacaaacacacaagcattcatagaaaaattaaccggccggtgcaacatgatgcccggatctcaagatttaaatacacgtaatttaaacgagtatgatttcttatgaatattaactagctctcaaacgagtttaaactaaatttgagcttaaaaatgcctttttttaaaaaaatcttatgtgataatggaataattaaaataaagttgagtttaagtttgttttgttgttatgtatatttataccgattcacttaaaaaacattggttaaaagccttaaggcatagtatttaaaaaaatgcaggaatttcattggaaatatgtcatttccaacagaattcgggaagaactcactttccaagctactactcatcagagcggcaacactcgctagatttttctcagaaaattaattaggggaaacaagacacgatgtatagtaaaattaataaactgtaacatctatacacatatatatcttttaaaaagatgtacatttatgtctttatttatccactcaggactaactaatcacaagtcacaggcctaccattagtataaattaacttacatatgatcagttccaaaccctagcatcatcagagagactaattaactaaaaacctacaaaagaaaggattaattaaccaagctagatcaacacctgcaaactcgatttaaatcaccgagaattaactcgaagcccttttaattagctttgattagttgcatcttgattaattaactcggcaactttccattatttttttttgttcttgctgtctacttgattaatttaattttggttgtactacacttaaaagaactcactggggtcccccaatggcaccacgtccatgagccccatgccgccgtcgtcgagcagccagctctccagcatcgagaacgccggcgcggggccgccggcgccgccgccggtggccatcttgctcgtctccgtcgagcactccggcgtctgggcagtcgccgcggcggcggcgccgctctggctcgccgacgcggacgcggatgccgcgccctcgccggagcactgcggctgctgctgcgtcgtcgccgtcgtggaggtcgaccccgacgcctcggggcccttgccgttgccgccgccgccgccgcccgggcgcatccagccctgcagcagccgcgcgatgttgtccgcgctcgacgcgtacgccgccgacgaccccgctggcgtcgccgccgccgccgccgtcgccggcgacgggtcggggtggtcgagcgagagcgcgtcgcgcagcgcctgccgcgccgtgtggatgtccgtctgcagccgccgctcccactgccccttaggtgcggcggccttcacgcttttcccgccgccgtcgccgtcgccgcggccgccgccaccctccgaggcggcgccgctgtcttccccaccttcggcggcctgcatcttcttgagcttcttcttgaggtgcgtgttccagtagttcttgatgtcgttgtccgtcctctccggcaagtacgacgctatcgctgcccacctacacagccagcaacccactcatcagccatggacgccatggacaaatcaatcaaagcaaaccatgaaaaaccaagaagaaatcaccggttgccgaggagagcctggaggtggacgatgagcttctcctcctgctcggtgaagttcccccgcttgatccccggcctgaggtagttcgtccaccggagccggcagctcttgctgcaacgcatcagccctgcacacgcgacgcgcacagatgaaaacaaaaatctcggatctctcgccgatcgatcgatcaagaacgcaagaacacgcaccggtgttcgtcggcacggcgcgccagttgccggcgccgtgctcctggatgtaggagaccagcatcaggtcctcctccggcgtccatggccccttcttcaccccgaccttgtcgcagcacggcggcctccccatcctgcagctcgccggcggcgggcggcggtggttggtggtgtatgcgtgtcactactactcgatctcgatcagggaggagacgaggggagaccggggtccaagaagaagaagaagaagatgggggtaaaaggggagggggcgaggtatatatataaagctagctagtagctagctcgccatggccgatagatggcaagctcgagctacagctgctgctgttgctgtgaactgtgaagtgtcactgctagctgcagtttgtgctcgggtttgacctaggtagaaagctgagctaataacatataacgatggatgaactgcggcgaaatgacatgttacatgtacacatggtgacaagaacgcagatatatactagtatggcgtaataaggcgaaaacgaaatattgtttttttattaaggccctttttagtttcaaagtttttttttctaaacttctaactttccatcacatcaaacatttcatacacacaacttttctataacatcgtaccaatttcaatcaaactttcaaacttcagtgtgaactaaacacaaccctgtttattttattttgttttgcttgctggcgcaagatagatatgcttttttaaaaaaaacaaagtacaaacacatacacttgtattgcgcacgcatccgcgcacctatctcaatgagcatctccgaaagacaaaactagtatatcttgagactggcgaagttatcatgagcgtctcgctgtcaacgggtacgtgacctattactgaaggaacaattagccgtaaatgcaaacattcatatcaagtttagaacttaaatccaagcggttagtttcaccacaaggatcataattagttgagttacgctcatttcgtgtgtgtcgtcattttagtttgctcttaaatattaatgaattcatttaaagtggtatagtagatttgatttagttgtgtggggctgttgaattttataagcagaaaaatgcaaaaataaataaataaatcttctcatatgtaattttcctacctagacattttggccacgccattggtgacgtgtctaaacaggacaatgctgccacactggaaagaaaaacaaactttggggttggcagcctctcgttgccatgccgttgctaatggcatgacaaaaggttgaactattgggaattaagatgcaagaaagcttgtatgtattcttttaggaaaatatttaaatatttttaatatcatctgtctgttgtgattgaattttaaaataataaccgtatgcatcatttctcatgaaatcgtatatatatttaatttgtggtgtcttgtcgtcacacaaataataattatggctttccggtgaacataaagatagtaaatatgctatcttgctttcaagtatttgtttttagggttaattggtccatgccattacaaatatgccaaattagaaaaatattattactattcgtgatatcagctaagtgccactgaaattttataaaattaaaatcatatcatcgccgttaaatttactgtcaactccatcgattttaatctcgttctcctccctctctctctcttactgccgctctctcttctccactctctgtgcgaggctgaggccgaagaggtggtcaccgcaacgctggctctggtcgaggtagagctcatcaaggggaagccaacggtggtggccataggatctagggatgccctgaacgacacataccagcgtccgaagctcatggcaaaaatggagagagaactcggaggaactatgaggtgcaggaccttggaaatgaccagtggaagggaggggaggaggttgatgccactttattggtaggaggaaggaggggaatgaccgtggggagctcggccggccatggaggaggcgaaatggccgaagttcaatggagatagaaaccggtgatttaggtggtatttgaatccagggactaaactttagttcctattacatcggatatttggacactaatttgaagtattaaatatagactacttacaaaactaattacataaatgagagctaattcgtgagacaaattttttaagcctaattaatccataattagagaatacttactgtagcatcacataggctaatcatggattaattaggctcaatagattcgtctcatgaattagtccaaggttatgaaaaaatgggtttgtcagtagtctacgtttattacttctaattaatgcccaaacatccgatgtgaaaggaactaaaattttttatagctccatccaaacacccccttagtgcggtattgaatggagattcatgggggaaataaaaagaagggaatggggaatcgatttttgtaattactaggaaatgaaattgtgtggggaggtggattaacttgttggtggggctatggttttggccgggagagatgaatggctgagctgaggtgaaagacgacgacgtgtcacctccctaggttggaacttatggtgggtcccacatgtaagggtattttggtcaatatgatgatagaaaatgtgacggcgatggtatggttttaattttacaaaattttagtggcacccaaccaatatcgctaatagtaatgttatttttctaattttgcacatttataatggtatggatcaaatttaatctactcttgtttttaccttgtcttgtggatgtcatggttgaaatccaaccaaaccttgtcctctgccaaaatcttgtgtccctcttatttctctcaagggaaaaatggaagaaaaaaacgaatgcgtgggagacggcagtgtgaaaatggctaaaacataaaacaaatttaattttaacttacttttcttccttacctttcttaaatcatgtggtttagatttattgttcccccgagagcctgagacatgcatgtatttgttctttcttctcgtttgatctcctttacatctgtaaaagttcagggtttcttcaagaacataagaatcttaattataacacgaattttgtaggaattagttcaattcctacaaattttcttcaacatgtccttcatccaaaagaagcccttgaggccacactagcacaccaatggacaacatattgaccgtgtatttgtatctccaataagattaggtggtgtttggatgcagggacgaaactttagtccctgtcacatcggatgcttggacactaatttggagtattaaacatagactacttacaaaactaattgcataaatgagagctaattcgcgagacaaattttttaaacctaattaatccataattaccatatgttactgtagcatcacataggctaatcatgtattaattaggctcaatagattcgtctcgcaaattagtccagagttatggaatggattttatcattagtctatatttaatacttgtaattagtatcccaacatccgatactggatccaaatttagtgtaggtgtttcttacaccccaaactcaagtcttttcagtttttttagcaagggcttggcagcccctatttctattgccagaaatgtgacaagctacagagttccaactcaaatcttttcatgtcatctcatcttacatggcagaaaattaagaggtgcactcacactaggatttaatttagttaacccacaacaacctagcttactatcctaattaacacgatgttgacgacccaaacattgtttagcataactcatagtacaaggttccagaaatagattttctgggcaaatagctagtacaacagtgaacagagattgtcaaacaattaacaagaattgtcaacaagccatgttttcacaagaatacacaacagtaaaatcttgtgtgcagatgcgccaaacacgtggtactattatctttttggcagtgagtagggagttcttcaaaggaggacagcaagggtgcatttaatcggatgggggctcgctaaagtcagcttgattggagtgaactgatctgcgtgcatttatttcctgagcccccctcatcatcatcgtccccggcccacacacctttttttttccctccttaaactcactttttctgcaccatcttattagagcaggtataatagtgggctataagccagctgcaaatatattttaagaagataaatgatgagagagaagggcagcgggctacagatttgtagccagctatagcacggactctaagacgctgtgtgtgtatgactggtgggaccagatattaatagtatagtatgtaactattgtatgaatgagctattagattgtctatagataaattggagctagtagttggctatactattgaacttgctcttagtagtattaaggtttttaaacgggtcaaatgtgaattcaatagtttcaaaatgaatgcagcatccgaacatggcatgtttggttgctgctacaatttaccatcatttgttagcaaaattgtcaacttgtctaagggtatatttgggggagctactcccccaaagagtttaaatttcactcacattctaagaatctagttgtagaatctaaaaaatgaactagaacccagaaactgaaaaaccccttcttcagattctcagaagctggttactaaccagcagattcttaaaatcttaaactcacccaaacagaaccaaaggttatgtgcgtaaattctttgccaaacttaattagcaaggctaaaagaatatctccacatttttttaagtcattcacaaatggaacctaatttgttggttggaaatattatcgtaattgtggctacaacggaacaattatctgagttaaacaatcttaaacgtgataaattatggtaagtgtgttgtgtctgacaactaaaacatgtcaatagcgtggacatgatctttgaaactattcatacagctcggatgtcatactaagcaaacagataaaaattaccagctcgccatcactttagaatagtgacaatgatctaaatgtttaatctatgactgataagtcatggaaaaataaactaagtaaccaaaataatttatggacaaatcttccattgtatacggactactttgcaatacatgattctaaaaatatacgaaagtagaaaaatacggaaatatgatgtcatgttttacacaatgatcttaggcaaccatgtttcagtagcaaataataaaacaataaatggacttttaggggaatttcatacctttcactcctcctctttcttctttagctagaaaataataaaataatgaacgtggtgtctaatagcaaataaccatgttttgatggtgtctttttttttctaaatattgacttctatcgtatccaccaacaaaatttaccttaatcttatagggttaaaacacatgaatataaatttggtgtgtttggatgcttcacgggaaataaatgtaggaattttaaagaaattgtgtgtgccagagatagggtagaggaaggaagagagtgcatcggacaaaagaggtatgagctcatgtttattttcctatgaaacaggggcaaacccaaaccatcggaattttggcatctctatgcctttgatccgaagggtctatagaaatttttttttgaggatttcagttctccacaaatcctttgaaaattcttcgatccaaaatagccctacatgtgttcttagcgatataaaaactaataatggaaactaaactgcaaaaaaacttcaaaataggtttcaaataggttgcgaaaaaccaatgaactaaattatgttttaaaatctaaattttagctacggtagatataagacaacaagcaatcgaggagaggcacgtctcatttttatagttaggggctgatcggaactgttggctgctacagccgtcacggctgtggccgttttcagctgctgctgctgctttttagctctcgtagccgcagcggttgcagcaggaagcgctaccgatcacactcttagactcaaatagggaacggtttcctattcaaagtacagtgccggtttgaagaacctcgtttcctatgtatttttacaggggtttacttgcagtaaactttgcttgagtgctcttacctttagaaaggcaggaaagatcaagtatgtgtggtatagaacactagttcttgttgtatcctaggacataacccttcgaagggggttaaatctcactcaaaagtcgctcaccttcaaattgttttgatatcacatatgtgaagccttggatcatcaggttatatataagcaattttaccatccaacatttggtacctcgaggtaccacatttcacacacaattttcatacctcaaggtattactccctccgttccataatataagggattttgacttttttgcttgcactatttgaccactcatcttattcaaaaaatttatgcaaatataaaaaaagtaagtagtttggataataaagtaagtcacaaataaaataaataataattttatttttttaataagacgagtggtcaaacaatacaagcaaaaagcctaaatcccttatattataggacggagggagtactaactaccactaattaagtacctcaaggtaccacatttcacacacaattttggtacctcaaaggtactactaagtacctcgagctaccaaattttacactagaaagtatgtggaggtaccaaaaattcgtagtatctcgaggtattaaatgttggatgataagattgctcagctatataagctatatatagttaggctcatccctttgagtatgccaattgatatcagggaaaggcatgactcaagtattattgacaacatttttttgagggattattgacaacaatttatatgctctaaaatttactgcatgtggccggccttcaaaaaatgatcaaaaaatttatagaaacacgtcttgtttaattgtcctgcccatcatgtactgaacatatgtacgtagaatacgatgaaattaagccagcatggtcccttcttgagtgtctacttcatgtattaattaacgcataagtaattattgattaagtaaagccggaattgcatgcgctgctatattattttgagtgaatcttctatgttgtacagaatcaaaccagctctcatgtatgttctgtacgtgcatatatacgcgcgtgtacatatatacgtactgtgtacacgcgtatatacagtatgtgcattagcgtgcaaattttaaggcccatttgaatagcaggattgagaaaacagaggaaaagaatatcatacttattggattcctatgggattttaaaacacaagaaagtctccaaactatcgtttgattagcacatgaaaaaaacgcaggaattttagatacatgaagatgaaaccatgaggtgagaccttatatttattttcctctaaaattgctctagtaagatctattccataggaattttaaagaaattgataggaaacaatcctctgtttcaaaggattctataggattatttttcataggataaaatcctgtagaattcctatggttttttccttttgaatcaaaaggggcgttagtatatatatacggagtagatcagtaggatcgatgcacgttaaataatatatatacttatatttgcgttctcgattggtccacaacaatacttgctactcgtgcatttacacacacacacacacacacacacacacacacatatatatatatatatattgattgattctgactcgttaaattgagatataaaacgcactactttcatcgtaaaatataagtttttggttaataacggatcctaaaaacataaacctcactttagtggaattaaatagggaatgttgtgtagtggaattaaatagggaatgttgtaattggttgagaagatgaagtggatatggaattttaatgatggaagattctgattggttgaaaagataacgtaggtgaaaaagttgttatattttggatcaaatttaaaaggctagatgctattacatatattttgtgatagatgaagtaaaaggtcaaaatgttttataatataaaatggagatagtacctgtgtacactatatataccattatatattcgtcattttcactgtataacaagatgtgtggatttaattgtgcgaagtaaaagtagctcaactgatttggttccttgtggtggaatcaacccatccggattcaagtctagacttgaagtgaagcgctcgtgatgatttcatcaatctcaatatatgctggtccagtcttccggaagtgatcataggggtagggtgtgcatgtgtgcgttaatagggatgagtatgcgcacgttacaagtgtctatgattgtactgtgttttttttaaaaaaaatgtgtggattttgtcgacgggtggtacccgtagaccggatatagagggtattggggtacgttggtacaaggatctacgtagtacgacatcaagcaaacaaaagacaagaattatactggttcaggccccttgataggtaatagccctaatccagttgatgtgggattatatggtagaaaacacaggttacaaagagaacaagggaatttgttggatccggcgagattgtagtcgagttgattcgactagctctcgatgacttggctcctcgtaagctccggcttcgtaggctgtggaggttgtgttggctctgagattcgatgcctaaaccctccccggggggccccttttatatcgcagatgtggaggtctcctcatagaactcggaggtatcagaccctatacgatacgccaacgacccggttctgcccgagtaggattcttcccatctgtagattccgtgaaaggtttccttagaatatacaggaaatatccgcatgcgcgtgggtatgccatatcaatatgtaacgtatatcgaagggtaaagggtatgcctaacccgtaaccttgacagtagccccgacttctgcttaaaatgaactcgtgcaaccatttgcgacttcgggtgtcgagactgttgtcattcccggtgcgaggaccgcggagatagaccgtagtcgagcacgccatttgaagcccaacggtcacgagcgaattttaaactgaagtccaaaaaaccgccgcgcgtaacgggaccagaaatttccggcgggcatctctctctgttcagtggaattcgcaccgtcggtagtgcgcctatttaaaggaattttgggagtccattttgaagtccaccgaacctgttaaacacacaccacctccaagcactctttgccttctctgccgccgcaagaaaccctagttcatcaacctagtctcgttttccggcgaccttcgatcagcaatggacctcggcaaatcagcttccaccagtgcaatgttgaagaaactccaggaggatggcgctcttcctggccgtggaaccatggagagggaagcaggaggtactaatcctcagcccatcttgggtcgcatggttgcgatcgaagattatgttctctgcggttttctccctccaccttccgaatttcttttcctggttttaaatttctatggtctttctcttttccatttgaaccccaattccatcgccttccttagcatctttgtgcatctttgcgaggcctacatcggggtagagcctttccttaatctttttcgcttttactacgaactgcgttggatggaatccaacagggtatctggttgcgtcgggttccgacttcgggatggcctgaagtcgcgttatattcccttccactgcccttcttctcgcagcaagtggaggaataggtggttttatcttgagatcaaggaatcgaaccctgtcttcgtggttcccgaagatcaaccggacaagattccgtcttggaccgcaaagccccccttgaccccctctcttcagtcgtttatcgacatcatcgacgatctccgagtacggggtttgtcaggatatgaagtcgttgcagacttcgttggtaggcggatccagccgcttcaggctcgagcccatccagcttataactattccgggccagaggacgcgacccgggtttctcctcagggtatctttctcgcatttatcttgacatacttgtgctcacattcctcttgacttatcaaaggttggttctcgattaacaggtctgagcggtgaaaccgtggagcgccgcgtcggccaagtgatgatcagtggcccgaccacggcgagtgacatccctgtgcccctttgtgaaaagggggcggcggaacgtgatgaagccatcaacgtaagtatattcgatgaacatcccgcattctcctttcgaaatcaatttatgacttgattgagcgtaggcccttcctttgactgatatcatcggaccgctcgcggaccatcaggtggcgtcatctctgaaagttaaggtcgtcaaggaggtgtctgatgctgccaccactagcggtggcaatgttccgacaaagccgaggaaattctcgtctgtaagcagacaacgtcgcaagccgtcgaccccctcggtaatttattttgtcgttaaatcatgcagcaagaaggatttttccttactttgcgttcattgtcttccaggcctcagatgcgtctcccccacctccacgacgacaatgcattgtgacaatcggcgagaagtaagtagatgatttcttcaatccccgcgcttattattcgattgttgtctgactcgtggtcgtcctgtagggaggcgcaggcaaaggctgcgcgagccaagtccggaggagcttccagtgcgtcgcctgtcgtggcctcgacggatgtcgtgcccgcaaccgggagccgggaggcgacgcctagtgtcccagtcagcgaccccgcggcaggtcgtgatctgccagctgcagtcctcacctgggaggagctccaagtcgagatggggcgcctcctcgaagccggtgctcacggcatcggccgcgagattgcggaggcgaggttggaagcggcgacagcgaacgtgcgtgctgacagactggtgcgcgagttggctgaagcccgtgaagacctcacgaagatgagggagttggcggccggcaacgagcgacaacggaaggggctcgaggaccgaatgtcggaactcgggaacaacctatctgagatccggggctcgttgagggtcacctacactggccttcaccagctcgccggggaatgcggcgtcacgtccacgatcccggcgaatcccgatgagttttcgctgacctcctctctcgcggaactggcgacagcgatgggggaaatcccctccaagcatgcggccaggattgcggaggagacgtcaaacggaatctacaccggggcgtgtcatgtcctcgtgtgtgtaaggctgttgcgtcctgaactcatctgcgcgagatcttggactagggggcggccagcaacacgcgtaaggaggtgatggaagaagtcggtgatctgggggagtctgttctccccctttttgaagagtaggacttcttgtatttcctagataatgtgtaaaactcgaactctgaccgccttcgtgcgtgcgattactatcccggcttactttggtatgctgacctcgggaacttttgtcctctgtagagatgttgatgacgaggatgtccagcagcgcgggcagcccgagtcactggcagtaatttcggtactcgagtttgaaccacacgtctcgcctgaccatgtggatcaaccccttgatatagagggaaggatggcgacgacttcctcaggttagtagtcccttcaccccttaatgcccacctgactaggtcagccatgttcccgaaagagatgtatagcttgacttagtggttatcacgtttagcagatctcgagggtgcccttgctagccaagatcgtcgtatccaatactggaagacgaagtttgaagtggcggagctcgagagaaccatgctggccgtgaagaaagagcaggctgtggaaacgctccgaggccgtgaggtatggtttaactcgtacttgaagagttgctgcacatccatggccagagtatgcagggagcttcgagtagtccgcggagatcccgaggagtcggtggccgggtacatctcgtggcttaatagggcctatgcccaactcgatggaatcggcaagcgtatcgacgaggccttgaagcaggagtgtcgtcgatcgagccgatatgccggggggcacgtgttggcttgcctacaagatcatcgcccacacttggacctcgaatatcttcgtgagggttttgctcgttctcggaggactccggcggagatagactatctggcaaggtcaatgtcgccgctggccaagaagatcttccagtctatggactgacgttggccttcttggtagtactcgtaccctataacaaatatcttaggaaaagatgtaatgtagcgaaatatttgtgaaaaaactgtaaggagtattttgtgaataaagaaatctatctttgacaaatgtctcttactctggatgtcatgtgtaagagtgcgttctcagttaacgactttagtcagccgtttgagtcgtacactctccctagcccccagccttgtcgtcggaggaattttctcagaggataaagctcttggacctttggcctgccttggttgaataagctctgatcctagcccccagccgtgaagttggaaagttgatttccgatttcacggcttagttaatacgcatggcgagaactcttacacgaccagatcttacatggtctttcgtctctacaggatctgacaaggccttatcggctctgggcgtccctagccgaagatcccttaggttcctcggaggccttgtcgagacggcgtaaagggacataaggacaggtttcaacgctaggtgtcatcacagtgagggatcatcgggcgaaacacgttgattgtgatatgggcctagaaatagcctttattgatactgtaagggtgcttacaggtatggatgatattgactcatacatagaatttacgtatttggtcaatgttccaagaatttgctaattcgcgaccgtcgccgtctgcgattttgaatgcgcctggccgcaagacttgtgtgatcgtgtaaggtccttcccatttaggtgagagtttgtttcgccctgcttggctttgaactcgtcggaggacatagtcgccgatcgaaagtatgcgtgcacggatgcgcttctcgtgataacggcggagggtctgttgatagctggctgctcggacggcaactcgttcccgatgctcctcgagaagatttacatcgatatctcactgctcctcctggttctcgtcggagtacttctgtactcgtgtactctgatgttgtagctcgcttgggagcatggcctcagagccgtacacgaggatgaagggtgtttccttataagacgttgtcggtgtggtgcgtacggcccatagtactgatgggagttcttcaacccaccttttgtcgtgtgacatgagcctgtcatagacgcgggttttcatcccttgtagtactatgccgtttgccctctcgacttgtccgttgctttgagggtgagagaccgaggcgaagcatattttgaccccctgcccgatgcagtagtcctggaaatcggcgctgatgaactgggagccgttatcagttatgatgtagtgtggtagtccgtatctgcaaaatatccctttgatgaatttgatggcgttgtcggccttgatttcccccgtgggtactgcttcgatccatttggtgaatttgtcgatcgccacgaataggaatctgtagccaccctgtcctcgtgggaatggcccaagtatatctagcccccagcacgagaatggccaagtcagagggatagtctggagcgcttgcgcgggtagctttgtgtgtttactgtggaattgacaggcttcacatcgctggaccatgtcgcatgcatctttaagggcggttggccagaaaaagccttgtcgaaaagctttgctgaccaatgtccgaccggcggcgtgtgacccacatatgccttcatgtatgtcgaggaggaggtgtgtagacccccgattttggaaatcagaaatcttctgtgtttatccgtaccaatccctgtgtcggtgacatggggccgggggtatcgtgactagaggcttgggtagccgtggtcacctacgtggcctgaccccctcggtgggggggggggggtcgggcccgacggtaacgtgcccacccctccctctgtctccccgaggggtcggcccgctcccgtttcggccccgagggttggggcgccccgaccccctgtggttttggcgccacgtgtgtgggttaggtgagcacaaggggctcacctaccggcatttatagcagttggcacgagcgcgccacgccgcatttaatggggcgcagcgcacgcttatccggaccgtgaccagtcgcggtgtgtgaccggtcacagcccggtaagatcgcggggtaggtggcaacaggcggcctgtcacacgcctcgccccatccggtaagaataatgagagcttcctggctctcgtccctagccggagccggcgtgctaactcctggagttggtatgtcagtcccggtcagatccattccaggcttcagcgcaaggatggcaaggaagtcgctggccattaaatgaaggttgaagtgggcgtccccgggaaaagcgggcgagcggggcaggaggcgtgtgctccgcttgtcatatgtcctttccggctgtagattagccctcattgtaaaagcgtgtttcctttcttaggtagcgggaggcccatgtggtgacccctgaccagataaaaaggaggcccaggcctgagagagaaaggaggagaaaaagaaaaagaggagaagaggggggcgaacggggctagagcctgaacgctctctcgctctccggctctggatattccttcactcacagatccaccagaacacaggagtagggtgttacgcttctcagcggcccgaacctgtctacgtcgcccgtgtcttgcgcatttcttctctcgctgacgttcctcagatcgagggcgaagaacctcacttagcgcccccggtcgaaccggcaaaggggggcctgcgcggtctcccggtgaggagccccacgctccgtcatctggcgcgccaggtagggggcgcgcgggtctttctaagccctcgtcctctctcgtgtgcgccaagcttcgcccgctcagccgaatggccgaacgggcagtggcgcacagcctctctccgaacgctagcggtgacgatggggagcagaacccgcgccgtcgggctcgcaccccaccgtccccctctcgccgaaatcctgggcggggggaggcgctcggggaggtcggaggatccgcgacttcgccgcccgcgggcaacgggggaggacggcgagacggggcgcgtcgccgcctcgtctacggcgatggcagcacgccccagggcgcgctccaggctgcgggcgcgctcctgcgtcacccgcccgtcgtccccgatccagagactccagcccgacgttagctggatgacgtggccgacttggtcatgacggcgcagcagcgactaggcgccggcgggcggtcctccgccatcgaggcttctggcgctgccgccgccggctccaagtcgtcgaggcgaagggcgcggcgagcggcggccgttacccgccgttcgtccgccattccctcgtcaacgcccccaacccaagaaaatgtgcgtggggggccgaatgcccgcctcgatatcgagcgccggcgcgacgctcgtcacgccgcccacgcaacggagggcgcttcctcgtccggagcgccacttcggtccgggcacgggagccggccccccgtgtccccggttggcggtgccggctgtcgagcctttgtggcgagccttcggaacgtccgttggcccccaaggttccggcccaccatcaccgaaaaatatgacggaagcgtcaatcccgccgagtttctccagatctacacgaccgggatcgaggccgccgggggtgacgacagggtcatggcgaattttttccccatggccctgaagggtcaggcgcggggttggctaatgaacttgccacccgcgtcggtccactcttgggaggatttgtgccagcagttcaccacgaacttccagggcacatatccgcgcccaggcgaagaagcggacttgcatgcggtacagcgaaggaacgatgagtctcttcgctcgtacattcagcggttctgtcaagtccgcaacaccataccgtgcatccccgcacacgcggtgatctacgcgttcagggggggcgtgcggcacaaccgcatgctcgagaagatcgccttcaaggagccccagaccacagcgcagctttttgagctcgcggaccgtgtggctcgcaaggaggaggcctggacctggaactcctccgtttctggtgtggcagctccggccgcccccgggtccgccgctcggttagggcggcgggacaggaggaggaagaaggggtcggcccgttccgacgacgaaggtcacgtcctcgccgtcgagggcgcttcgcgggacccccgaaaggggaggcctgcgagcgacaaaaagaaggaggccggcgctcccagcagggagcgcccgaccggcaagtggtgtaccgtgcacaacacctccctccacgacctcgcggattgccgcgcggtcaaaagtttggctgagcggacgaggaagtgggaggaggagaagaggcaggagcgccgtgagggcaagaccccggcggctcccgccggcaaccggcgaggtgaggccaagcagaaggccaccgccgaggacatcgacgatggcgacgatgacctggggttccaggagcctgaggacaccgtcgccaccgtcgatgggggagcgtgcgctcacgcttctcgccggagcctcaaggccatgaagcgagagcttctggccgcggcccctacccatgaggcgacgcggcgggcgcggtggtcggaggttgccctcaccttcgaccagaccgaccacccgccgtgcgttgcccggggaggacagatcgcgatggtggtttcccccaccgtttgcaatgtgaagttggggcgtgtcctcatagacaggggtgcagccctcaacatcctttcccccgcagcctttgacgccatcaaggccccggggatggtgctccggccgtcccagccgatcatcggtgtgacgccggggcacacctggccgctgggtcatatcgacctcccggtcaccttcggtggttccgacaacttccgcacggagcgggtggacttcgatgtggcggacctcagtctgccctacaacgcggtcctggggaggcccgcgttggtgaagttcatggcggcggtccactacgcctatctccagatgaagatgccgggccccggtggccccatcaccgtccatggcgacctcaaagtcgcgcttgcttgtatggagcagcgcgcggaccaccttgccgcggcgtccaagcctgcgggtggcgacgagaggctcagcacctccgtcccggccgccccaaggcggcggatggtcacgtgcgacgaggtcccggtcaaggaggtttccttgggcgacggcccgtccaagaccacacgaatcggtggtcttctggacgacaaataggaagacgcgctcgtctccttcctgcgggcaaacgccgatgtcttcgcctagagaccggcggacatgcccggggtccccagggaggtgattgagcaccgtctcgccgtgcggccgggcgcaaggccggtccggcagaaagtgcggcggcaggccccgaaacgtcaagccttcatccgcgaagaggtggcgcgacttctggaggccggattcatccgtgaggtcatccatccggagtggctggcgaacccggtcgtcgttcccaaggcgaacggcaagcttcggatgtgcatcgactacaccgaccttaacaaggcatgtcctaaggacccttaccccctgccacgcataaaccagattgtcgactccaccgcggggtgcgaccttttgtgttttctagatgcatactctggttatcatcagattcgcatggctagggaggatgaggaaaaaactgcattcattacccccataggaacttattgttatacgacaatgcctttcgggttaaagaatgcaggtcctacttttcaacgtactactcgaatttctttgggtagccagataggacgcaatgttgaggcctatgttgatgacttggttgtgaagacgcgcaaccaagagaccttactctcggatctagcggaaactttcgaaagtctccgctccgcctgcataaagctgaaccccgataagtgcgtgttcggcgtgcctgcgggcaagcttctcgggttcttggtctctgcccgaggcattgaggccaaccccgagaagatatgagctatagagcggatgcgcccccccaccaagcttagggatgtgcagtgcgtcaccggctgcatggccgccctaagtcggttcatatcgaggctgggagagaaggcgctacccctatttaagcttctcaaacgctccgggccgtttacctggacggaggaggctgagcgggccttcactcagttgaaagcgtacctcagttctcctccagtcctggtcgccccggagccagatgagccgttgctactctacctagcggcaaccccgcaggtggtcagcgcggcgttggtcgtggagcgcgacgaggacaaccctcgctccacgcatccctaccctgtgtcgactcgacccgggagagagcagggaggagaggcccccgagccgaacggcggcccgaggcccccgacggccggagctggccctccgcctgcttgtccgacggtgccaggcgcccccgacccccaggatggccccggggccactgcgggaaggccgcgcctgtcgccctctgaccccgaggtcgtcggcacagaagccgagtgcaccccgcgtggcctctcggacgaagagcaccctggagatgcggcccctggcgcagaggatcggccccgccgaaaggtgcagcggcccatctacttcgttagcgaggccctccgggacgccaagacccgataccctcaggcccagaagatgctttacgctattctaatggcttcgaggaagttgcgccattacttccaggcgcatcaggtcacggtggttacgtcttaccccctcggccaaatcttgcataaccgagagggtactggacgggtggtgagatgggcaatcgaactctctgaattcgatttgcgctttgaaccacgccacgcgatcaagagccaggccctcaccgactttgtggcggagtggaccccagctcccgagcccgtctccgcccccgaggccagctcgggcccctcgcatctgcctcacaccgcctactgggtgatgcagttcgacggctccctgtctcttcagggcgccggtgcgggggtcacgttgacctcgccgagcggagatgtcctcagatacctggtccgcctcgactttcgggcgaccaacaatatggcggagtacgagggactccttacgggactcagagtggcagctggactggggatccgccgcctcctggtgttaggcgactcccaggtggtcgttaaccaggtctgtaaggagtaccagtgttctgacccgcagatggacgcttacgtgcgccaggtgcggcgtatggagcgccattttgacggcatagagcttcggcacgtgcccagacgggataacgcggtcgccgacgaactctcaaggctcgcttcctcgcgagcccagactccaccgggcgcctttgaagaaaggcttgcccagccgtcggcgcgacccgaccccctaggggagacggacgcgcctgaacggcccccgaggcccgtcggagtccaggcctcgggacccgaggggagcgctcccagctcccctagattgattgcttggatcactgagatccaggcgtacctcgcagataagactctacctgaggaccgcgaagggactgaacgcgtccggcgcatctccaagcgctacgtgttggtggaagggaccctttaccggcgcgcggctaacgaagtcctcctgaagtgcattcctcgggaacaaggcgtcaagcttctcgccgatgtccatgaaggcgagtgcggagcccactccgcctcacgtaccttggttggcaaggcctttcgccagggtttctattggccgacggctctcaacgatgcggtcgacctggtccggcggtgcagggcgtgctagttccacgccaggcaaacccatcagccggcccaggccctgcagaccatacctctttcatggccgtttgctgtctgggggctcgatatcctgggtccgttcaggcgggccccgggcgggttcgagtatctgtatgtcgctgtcgacaagttcactaagtggcccgaggcttatccggtcatcaagatcgataagcactccgcgcttaaattcatcaggggcatcactgctcggtttggggtgcctaaccgtatcattacggataacggcacccagttcactagtgagctcttcggtgactactgcgaagacatgggcatcaagctctgcttcgcctcccccgcccaccccagaagcaatggccaagtggagcgcgccaacgcggaaatcctcaagggcctcaaaaccaagaccttcaacatcctcaagaagcacggcgactcgtggatcgaggagctgccagcggtgctctgggcgaaccgaaccacgccaagccgagccaccggggaaacgcctttcttcctcgtctacggcgcggaggcggtcctcccatctgagctcaccctgaggtcccctcgggtcaccatgtattgcgaggctgatcaagattagcttcgccgagacgacctcgactatttgaaagaacgaaggcggcgcgcggccctccgagccgcgtgctaccagcagagcctgcggcgctaccatcagcgccacgtccgggcccgatcactctgcgtcgacgacctcatcctacgccgcgtccaaacgcgtgctggactgagcaagctctcaccaatgtgggagggtccgtatcgagtgatcgacgtcccccggccgggctccgttcggctggccacgggcgacggcacagagctgcctaacccgtggaacatcgaacaccttcgtcgcttctacccctagtggggatcgggcatcatgtctcgggctcgggccaaccccgcaccccccccgggcgtgcaggattggccgggggctaccacatgcatatacttaccttttttctcttccgtatttcaataaaagcatttttgatttcctgaggactgtgtctgtgccatcatttccttttgaagaatcttggcttgaattagcacgctcgtgctcgaccttgccctcggcggcccgggccggctaaaatcgccaaacggggcccagaaccgagccgtgccctggggcatggtgaactccgagggggaatcggcaaaggcccacaatcgggtcatccataaccctcggtcaccgcgctcccggcctggccagtctcgacacgaggatctccccaggcactagcctcgacccgcgccgtttgaggctgggacctgggcacgagcccttgttcaagccaagacacagaaggaccgcggcacaaaccattctcgtctcatacacacaacaaacagaactgacgcggaaatttcctctttacttgattacagattaaatcagtctatacaagaagggggcccgaaggccacggaagaagaagcaaaagttattaagattggcgggggcctgggggctcactccgacgcgcccgggacgtcggcctcgtcgtcgctgtcgtccgcaccgtcgtcaccgccctcctcgtcggagtcgagcgcgaacgcgagccgaggggccgtaccctcgaagctgtggacgatatggtcggtggcgtcccggaccttcgcgcgcgcgccgtcctcggttccgggaggaaactcttccagcgctgcccacggggagaagtcagggtccctggcctggtagcttgccagtacgagctccaccgccccccgggcgaggtccctcgaggatgacttgatcgtctcctcgagctcctcggggagccgctcgagggccccggtcatctctgagaggcgctgggcgaggcccgcctggttggcggcgtacttcgcgtgccgcccgccccagaggcccgcttgccgcccggcgcggtctagacgggagacggcgtcccgaagcatgccgggccctacttcgctcgccaaacggagggcctcgacctccccggcggacgagtccagcgcgccctgcagctcggcgatggtgtgttcggcggctgcgaggcgggcggctaggtcgccttggcccgcagccgctccgccgctgtgcgctctcgcgtccagctccttcgcccgcgcttcgagctcagcggcccgctgatccagtgcggccctctcggcgcgggcgccttccagattgcggcgcgcctgctcctcctgcgctgcctcgcggaggaacagactgtccgccagccgctgcgccgcggcctcggcctcctcgagagctcgcccccgctcggtgagcgcgtcctcgcggaagcggagtgcggactcctcttcggcgcaggcggcctcgtgcgccgccagtgttgcctcccgggtggcgacggcggcctcgcggtccgccaggtctctctccttcgcgtcaagggcgcgggcgtgctcctccagcgccgtggcgcgagcctcaagggcctcttcgcgctgccgggacgccgcctcgttctccgccgcccgccgttcccgggcagcggcggcgtcaaggactccccgggcggcgtcgagcttctcctctagctccgccgcccggctcccgtattggaggcggaggtcgttccgcgcctcgtcgagcacggcggtggtgatgagggcagtctcccgctcctcctccacctccctggcgatctccgccaggtccctacgacgggcttcgagctgtgaggtgtgccggcggtgcgccttgcggcccgcctccaccatggcctccaccgagcgccgcccctcctcgacgcgcgcccacgccgtgtcgagctccgcccgctccgcctgcagggcctccatctgggcacttaacccatccagcaccgtgctgttcgcggcggccaaggcctgcaggaagggctccgcgctcagtggggcagcagaagacagaggggagagccgcctcggtgtgggtgccgtgcggctcggcccgccgatcaacgtgccggactcgggggcgtcccccgaagctggctcgtcctaagcgtcacccgaagggtcgggcccgagcggcgcgcccgcggcctcgtcgtgggtggcctcggaagtcgtcgtcgcctcgggcggagtcgggtcgggggtttggcaggccgcctggcgtgcgcgcgccgcctctgcctcccggacggactccccggcccggcggagtctggcctcctcccgagcggcctcctcaacctggcgaacccggacggcctcctgggcagcctcctcggcttcctgaaggcggtccgcggcttctcgccggtcagcttcccgcctccgggcctccgcggtcgccgtctcctcggcctcagaccggccgggcttgaaagggcgggggggggggggggacgcaacgggatctcgctgaggcagaagaaaaaccagaagacaaaaagaaataggtgagtgaaaactcgccttgggagatgggagaatgaatacggccgcggtgggcgcggggacgaacctgcgaggaggtcggctaaacgaccacctcaggggcgagatgaggttcccccgacatggcacgatcccccccatcttgcggagccgtttcttctttcgctccccctcgggctgcggcatcggcacggcaccctccgggcgcctgctgctggcacgcaccgccccgccccctcggggaggagatgggggaggggttccctcctgcttcctcttcccccgggcgtcggcagggcggctgccccccaggcccccgtcgcggggcccagaagcacgaccccctcccggggtagattgttcccccctgcggctcccgcccgcgccatcgtggcctcggggggcccgctcccctgacgccccgaccacctgcatgatggtcaggatcttggcgcgctctggatcgcagcagagggggaggaccccttgggggatgagggatgcctccacgtagctgagattcagcacccgttggaccaccatcctgaagtcctcagggtcccagtcccatttgcgcccttggtgggtcctcatgtagtcgtcgggcccggtgtactcccaggcgccccgggcgcgccgctggagcggcgcgatccggcgacgaaggtagtcgccgaacaccatggcccccgtgagcccctgggatcgcagacccgccaggcggtcaagaacggcgtcgtagccgtctcccagatctactgtcgctcgccagctggaggcctgcgccgggggctggctcggaagtcggaggcgcgcttcgtcggcgaggggggtgtagaaccaatcgcttttccagtcgtcccactttttgcggaggacgcagggaatgtagcggttcaacacctgcccccgcggctggaagtagcagccaccgactaccgtcggcggcgacaccggctgtacggtgaagaaccaccggaacagctggagagatgggcgcaccccgataaacatctcgcacaggtgcgcgaagatggccaacgtcattatcgcgttgggggtgaggtgcgccatctggagatcataaaactccagaatatccatgaaaaaaatagagaatggcaggaccagccccgccattgcgaaagagaggaagaagatggaccgccccgggtagtgtggcgccgggcgtccctcggccagcgcgaccacctcccggccggtggcggattccggcatgaatcggcgcggcagcccggcctgcctctcgctcacgatgcgggaaggcggcagcacgctaccatcgagcggtgcggagccccgtgccatgacgccggcggaggaggagcttgagagcgagcgagtgcggcaagggtagggcacaggaaacggagagttagagcacaagtggcaaaggcaaggggaagagtggcgagaggaaggaaacaaatcccttccttggcgtctttgtacccttgccaacgctatgcccggctcctcgcttcccgcgcccactacctcgccccctcgtttctcgcgcccacgcctccactaaccccactcgcccgtttgcggcgcacgcggaagatgtgcggccgtggcgtttgagatggggcagatcgtgcgcgcattaactgcgctcgccaaccgcgaaaaacgccatcatcgtgtccccgggcgaaacaaacctgctcgagtaatgtagcggtcttgaagaggccgctcattattgtcgatcggtttttcccttgccaatgcgcgcgatttgcgaccgttgggttttcgcccgcctgtggggaccggccccacctgtcaccgggcctaaggagtggcatcacgcccgagcgcctccctcgggggggtggtcgccctagcgtaacgctgggggctactgtcggtgacatggggccgggggtatcgtgactagaggcttgggtagccgtggtcacctacgtggcctgaccccctcggggggggggggtcgggcccgacagtgatgtggccacccctccctctgtctccccgaggggtaagaaaggtaangaagaaaagtaagttaaaattaaatttgttttatgttttagccattttcacactgccgtctcccacgcattcgtttttttctttcaatttttcccttgagagaaataagagggacaccagatttttgcagaggacaaggtttggttggatttaaaccatgacattcacaagacaaggttaaaacaagagtggattaaattcgtccattacattataaatgtgcaaaattagaaaaataacattactattagcgatattggttgggtgccactaaaattttgtaaaattaaaaccataccatcgccgtcacattttctatcatcatattgaccaaaatacccttacatgtgggacccaccataagttccaacctagggaggtgacacgtcgtcgtctttcacctcagctcagccattcatctcggggggccggatgcccgcctcgatatcgagcgccggcgcgacgctcgtcacgccgcccacgcaacggagggcgcttcctcgtccggagcgccacttcggtccgggcacgggagccggccccccgtgtccccggttggcggtgccggctgtcgagcctttgtggcgagccttcggaacgtccgttggcccccaaggttccggcccaccatcaccgaaaaatatgacggaagcgtcaatcccgccgagtttctccagatctacacgaccgggatcgaggccgccgggggtgacgacagggtcatggcgaattttttccccattgccctgaaaggtcaggcgcggggttggctaatgaacttgccacccccgtcggtccactcttgggaggatttgtgccagcagttcaacacgaactttcagggcacatattcgcgccaggcg

SEQ ID NO: 15750 - DNA, 4551 bp, Oryza sativa
  unsure (1)..(4551): unsure at all n locations
attgcgacccgttgggttttcgcccgcctgtggggaccggcccccctgtcacgggcctaagagtggcatcacgcccgagcgcctccctcgggggggtggtcgccctagcgtaacgctgggggctactgtcggtgacatggggccgggggtatcgtgactagaggcttgggtagccgtggtcacctacgtggcctgaccccctcggggggggggggtcgggcccgacagtgatgtggccacccctccctctgtctccccgaggggtcggcccgctcccatttcggccccgagggctggggcgccccgaccccctgtggttttggcgccacgtgtgtgggttaggtgagcacaccgggctcacctaaccgcatttatagcaggttgacgagcgcgccacgccgcatttactgcggcgcagcgcacgcttatccggaccgtgaccagtcgcggtgtgtgaccggtcacagaccggtaagatcgcgggttaggtggcaacaggcggcctgtcacacgcctcgccccatcccgtcagaatgatgagagcttcctggctctcgtccctagctggagccggcgtgctaactcctggagttggtatgtcagtcccggtcagatccattccaggcttcagcgcaaggatggcaaggaagtcgctggccattaaatgaaggttgaagtgggcgtccccgggaaaagcgggcgagcggggcagaaggcgtgtgctccgcttgtcatatgtcctttccggctgtagactagccctcattgtaaaagtgtgtttcctttcttaggtagcgggaggcccatgtggtgacccctgaccagataaaaaggaggcccaggcctgagagagaaaggaggagaaaaagaaaaagaggagaagaggggggcgaacggggctagagcctgaacgctctctcgctctccggctctggatattccttcactcacagatccaccagaacacaggagtagggtgttacgcttcttagcggcccgaacctgtctacgtcgcccgtgtcttgcgcatttcttctctcgctgacgttcctcagatcgagggcgaagaacctcacttagcgcccccggccgaaccggcaaaggggggcctgcgcggtctcccggtgaggagccccacgctccgtcaccctggatcagtagttggtatacacatacatagttggatcacaacatatcacgaatgaattcaggctaaaagagttaaatacttacattagggctaggtaggccaacaactatcagagaacaacagcggaagacaaaataatataagggcccggttaacatgccacaggcagtcgactggggaacgagacctagaacaagaccgcactccgatcatcttgtgggatacgcaagcgtaccgacaagggcttctcttcaacactctcctaaaagatatataaatagcaagggtgagtaccaaccgtacccagcaagccaccacaacaacaatgcatatgatagagggtttttcaaggaatggcttcaggttcttttgcataaagctagttttgtaattcttttcacaagcctaagacctagcatagactgatcaaattttaataccagttttcacattaaacaacgacggttctgtccaccatccattatgatcccaaggatagctttccgccattgaatcgtcatggttttctgaggacttccactttcccgcctctcaggaagtggctccaacagcataaaatcatcatgcaatatcccatcccacacaagttaaagaatttagagtctagccaagtgtaatacatgtcccggtgctcaataaccgcgagcacggctattcgaatagatttggtttactcacactgcagtggatatacactttacccgcactccgcgactgcccaacacatgagcctcgtcccaacacatgagacgcgtcacggcaaagcttttcgataacctcgcattggcagtatccgctccatggacttaaatcctcatgcactctaggcgtccatgtttctagtagtgtgaggagttttggcgctcccgggaaagagaagtctcacacatattaaattatggttcaagttaagttctctctctcacacactcatggcagtcctaccaatggcgacaccgatgtagggcacgcctctcggccctacctcaacggctgtcccatcgtagcgcacctgcctcactcaggggtgaaccatctatgcagggatactgcctccgctcggctatctaatccgctaggtctatacccattcgagaagtacggttgtacgggggtcgtttcatgcttaacttcatggctcggtccttaattgaccggggacggtactagcctttcccagataccacccaaatcctccgtccgcccaagtcgaaaacaattgtttaattttatttctcctttcacaaattatgtcatcaacatcatggcaatgtggcgctcatgtctccacatgccgcatctcaattaccttcccaaaagtaattgcccaagcatcatttgataaatatgagtatgcatgattctagaatagcatttctaagcaattgtcataattgactagggactcatacgtaaacatggttacgaaggaataaggggcaaacaataatcaaggcatggcataatcacaagtaggatgttcatcattgcatgcaattttatttgtaaacaaaacaatttcacaattgggatcaacatgttcaaggaatagtgatgacttgcctgctcaggatagtccttattctcgatataatctcgatcaaccttcacctcctggaagttgcagacattgcctcacgactaaccgatacacaaagtctatgatacgcgagaaaaaccaatattcaaacaacaatcaaatatgcacaacaaaatgtacttgttagggtcgtacctagggttgctcatactattattgcttgctaggggattccaatcatgctaagggctaaagtttcttaatctttctgttgtcacggtggtttatttggagctagccatcgtagtataaatgagatacacatcttgctaatatggggtttagtctagctagtggttatggaaggattatggctatatatgcatctatctaaatagaacggttatatactagaggttcttttgtcggatggatttaggatcaatcaaataattacagtgaatcatttgtattattatgaacatattttatttgtcacaataaattatgaaaggttaataattatccatgctctatatgttacacttgtgaggctaataatattacagattatcccatcacataattttacaatgaataatcctaatttacaattgaacttagatcatattagatcaaggtctataattagtatttatccaccatacatgttgatcatatattctcttaaattttaatacatgcaatcaagcaatttaatactacagcgtatagctataatgggttgtacagtatatgtgtatgtgtgcaacaacgtataaggttttggtcgcctactgtacatgagcttatttagaaaatgtactacccaatgctccaagtgattcctgaatatattgtagtttaattatacattagctagtttctatgagtgatattgtatatgtgatgtgacaagtttaagcactggttctattgggttactaataagtggtaatcaatttaggcatatatatgctattctatatggtattgcatcgattaatttacttagtgattcctccacatctagctctgttattattctcctaaacaggttaaagattcatctatgtgtgtttatattttagttacataatcataaggctatacttgatttaaataacctataagccatggatttaattatatggccatcgaatattaaataagtactagtattttcctatacatccattcatttgagacatcacataaaattagtttgtgtggttgttacagtggcaagacatgttagagacaaatattattacatccactctactgtacaatactaattttatttattagcatatttttaagttgactattatgcatcatcttgatattaattatttaatatttataaatatattttatcaaatagtgaattatatatcattggaaagcttatgaatttaggttcaagtttcactcaaatcggagctgaaatgaataagttatgctagtgtaaagattcaaatttgaattaattctaataattgcgaaatggtactgttcctaattcatttatttataatacaaccttatccacaagctatagtgactgacaggtggggtcaaagtcttgattttcttttctacagaattagttttctaagggaaattggatggaattaatgacaggtggggccactctaacctctctcctccattctcttttctctctcttttctctgttttctcctctatttctctcacggcctcggatagaacaggcgggcggcacggcgcgatggcaagcggnnnnnnnnnnnnnnnnnnnnnnnnnnnnnnnnnnnntttncganngnnttgtgcagctgncgatctcatccgc

SEQ ID NO: 15751 - DNA, 11210 bp, Oryza sativa
  unsure (1)..(11210): unsure at all n locations
gccgtgaattgaagatcgnnnnnnnnnnnnnnnnnnnnnnnnnnnnnnnnnnnnnnnnnnnnnnnnnnnnnnnnnnnnnatcgtgctgcagcctcccagttacctccaggcacaggccattcttggtgagtctcttgctctgtcgagctctgtcagtttttggcttcactggccctgtttcgatgaacacgggctgctctctgattgtggggttggcttgtatgcggtggatctgatccttctcttcaggtggtcccaagatccggtgctcggattccaactggcgacgcgacgggcgacgcgacggcggcgacgggagtggcgcggggctcggcgcggcgcagccgacggtgacaggcgatcatgacgatgtgacggcgatgacgacggcgcgcggcgcggtaatgatggcgacgtgacggcgacggcgacggcgcacggggcgcgaggcggcgcgacggcgcgcggcggcagcggcggagcgaggcgacggcgactgcgacggcggcgcggggcgcgaggcggcgcgcaccagtgggcggcagcggcgcggcgcggcgcgtgcatgggcacggggcgcgagggggaacgcggcagtggagggggggaagggctagggaactacatcaaacacctaggccataatgaacagtgactttttcctaattatccacttttgaggcctatttcctattaaaacttgtcccataatttctagatttcacacaattagagttttacccaatatatgttttattttagatgaaagttgaccaaaatttaatattacccatattttatatattttcctattgtattatttaaatgaggtttaaatctaaaattaacctagataattttggaggctttgagggttctaaaattaatttaaaatatcctaatgtggccattattattacaatagcacattgaatgaacttatttgtataacaatgcattttacgtgggtctactcattctataaatataaattgagacttagtacaacattaatctaattgtttaattaaacactcacatattcttatttatgtataaagcctaatttatttatatgaccattattttatatgagtgattttcatgctatgaggagcttgataaggtgtttcaaatattaattatatattctagtgagatactctattatagatggggccattgatgtgatcatcatttcatgtgtacttatatttcatgtgagattggattcaagtgaattatattcaactatgttgtttccttttgttaaatatgaaatcaggctatcaacatggtttgattatttaatatttgatttgtgatttataccacagggtttaataattgacttgtactttatttggcctggctttcatgtgcataaatatttatgggattgataataaatatcgtatcgttgtaaatcgtaactattgctcgggtgtaaatctttagattgatttttttccattgcgtcgatttatggtttggcaagcaataacaaccataactttcagcatgatgcaaaaagttttaaaaagttcgaaattttagtgatttttaatgtcaggaattttcaggatgttacaaggtgtctaccgtcgtcggtcgagatgcatttgagaagtaccccgtttggcgctttcttgtatagatcgttgccgaccatacagtagatctttgctttacgggttattttctcggcctctgtatcgtcctcgggcaactcctcgctgctgatgaatttgattagtggggtgcgccagtcgtctgtggtttcgatgtcggcaacggcgcgttctgcctcggtgacctccgagctaatgtcgggggtgttcgggctgacttcgccgctaacctctttcactgatggctttgtcaggatatcgagaaaagtgccgggctcgagcgattctcatctggacgcatgtcgtgctatgtcgtctggctcgatgttgtcctttcggtagacgtgtcggaccttgatcccatcgaactttttctctagcttcctgacttctgcgagatacttggataactcggagttagagcatttataatctttgtgtacctggttcgcgactagttcggagtcccctttgacaattagtcgcttggccccaagtgtagctgcaactcatatcccggcgagtagtccttcgtattctgcagtgttattggtcgccctgaagttgaggtggattacgtgattgaattgatctccggagggagacgtcaagataaatcctgccccggctccttggctgttgagtgtgccatcgaacgccattgtccatgttgcattgtcgccttggttgtctgatttgttatctggcatagtccaatcggcaacgaagtcggcgagtacctgggacttgatggctgttcgtggcacaaagtgggcatcaaactggctcagctcgactacccatttcgcaatgcggccaacaacgtctttgtttctcacaacttcaccaagaggaaaagaggagacaactgtgactctgtgggcttgaaaatagtggcgtagcttccttgatgtcatgatgactgcgtaaagcagcttttggatctgtgggtatcttgtctttgcgtcgtggagagcttcgctgacgtaataaactggtcgctgtactttctctctctcgacaacaatgacagtgctaacggagtgtggcgtggcggcgatatagaggaataattcttcattagtttagggagcaacaagtacaagggggtttgataggtagcgcttgagtgcaatgaatgcctcttcggcttcctgtgtccatacaaatttgtcttgtttcttcaacagagcgaagaaaggttgtcctcgttctcccatcctagcgacgaatctgcttagtgctgccatgcatccggttagcttttgtacctccttgagtcctgtaggcgacttcatgttctcgattgccttgatcttctcggggtttgcttctatccctctgccagagacaaggaatccgagcaacttgcccgacggtactccgaacgtgcacttctcaggattgagcatgaggcgatattgtcggaggttgtcgaatgtttcctgcagatcgtcaatcaatgagtcgtctgtcttggttttgacaacgatgttgttgacgtaagcctcgacattgttgccaagctggttgctaagtgcgccctggaccgtgcgctggaaagtattcccagctgtaatcagtccgaacggcatcttaacatagcaaaataccccgaacggcgtgatgaatgctgtcttctctttgtcctcttttgccatgctgatttggtggtagccagagtaagcgtcgaggaagctcaataactcgcaaccggctgttgaatccaccagttggtctattcgaggaagtggaaagtgatccttggggcacgccttgttgaggtcggtgaagtcgacacacattctccattttccgttggccttccacaccatgactggattggctagccactctagataaagtacttctctgatgaagccagctttgagaagtttgtcgagctcttctcgtatggcttgttttcggtctggtgcaaatctccacagtctttgctttactggcttggcatcgggtcgcaccatgagtttgtgctcaatcacctccctagggacccccggcatgtcggacggctgccaagcgaacacgtcggcattgtcgcggaggaaggtgatgagcgcgagttcctatttctcgtttagtgtcgccccgatcttgacggtcttgtcggggttggcactggagagtggaacaatcttgatggcaccgtctggtttcggcgtcttgtttgtcttggtcactttcttgggtggctcagtcgtggcgggtgggctgggcgtttgctcgaccatgtcgaggctccgcttgtcgcattgcaccgccagctttgcgttcccctgaatagtgattgttcccttcggtcccggcatcttaagcacttgatatgcgtagtgagatgcggccatgaacttcgcaagtgcagttctcccgatgatggcgttgtaagctgtatcgaattcagcaacatcaaaggtgatctgttctgttaggaagttgttggcttggccgaaagtcacgggcaacgtaatcttgcccaaaggtctggacgatgattggggagtaattccatggaagggttgatcagttggtgtcaactcgttttgcgaaattcccatcgcgtccaaagtgctggcaaaaagaagattgattgagctgccaccatcaatgagaactcgcgctaccttgatgttccgaatggtgggttcgaccacgatcggatatcgtctgggataacggcgatcttagggtggtcttcttctgagaactctatcttctgctcagaccacttcatcttgggtgcagccccctgccatgtcgagcagacttcacgttccactttcttgtattctcgcttggacgagtacgttgtggaaccaccgaagatgtgtgagacgtggaggtcggagtctggatacgctgagtccggttcgtgaggaaccgtctcttcgttcgtctcgacaacgcgtactcgcttgcctttttcaaatgccatgtgcttctcgagcgactttttgaaaacaaggcaatcttccagagaatgtctgtccgtcttgtgtatggggcaccatgatttctttgtgtcgctactttgtgggtatgggcgtttgggagggttcgcgtattctgctgcgaggacttctgcttgagctttccttttcccgtttttgtgatttttcttcttgcttgactcagatgtgtccgtggctggtttcttctctcccccggtcttcggcctattgttcttgcgtcttagcacatcatcagcgtgggcgcatcgctcaacgatctcgaataatctccgagtggttctgatgcatcttgtcgccaactcctgggtagtgtagcgatctctgacaccagatttgaaggcgtgaattacagaagcgtcggtgatttcaggaattgtgtttctgcactcgttgaaacgtcgaacatattccctcaatgattcacccgagttctgtgtcaacgcgtgtaggtcgtcttcgatcgcgtggcacttgtatgttccttggaaattggcgatgaattgttgccacaggtctgcccacgaagagattgagtagggaggaagatgcatcaccatgaacgtgcagaacccttcaacgcggttggtaaatagttcgctaacgcgttgtcgtctgctctggcatcatagagtactgtggagtagacttgaaggaactcctcttggtcgatgctcccatcatacttttttattgctccgggtcagaatctctcaggccatcggacatcacgtagggaacgcccgaaagccctacacccagcgttgggggcggtgggttgccggcggtcgtgtgtccttcgtggatgtttgtctgacgatgaggaggacgtggatgatgacgatgacgatgggtcgcttggttccggcgtacgattacgaggatgacggcctggatctcgggaatcttgtcgtcgtcttccgctgttgtctcggcgccgatctccatcgtcgtcgtcgatacggcggcggccatgaccagtattgtctggcacccgttgttcacgatcgttgtgatcgtggtggttgtcgtggtcccggtcctcgtttgagcgatctcctcgatttccgttatcatggcgccgtgaagagacatgacgccgagagcgattcacgttgtctcatgtgcgtcgtgcttcccggcggccgttgatttgatctcgaagatcgccagtgccgtgaggtggaggggtagcttgttgaggtgattccctccgttctgaatcttcaccactggcctcgccagttggtggctgctcctggtgtgctgcggtagcggcttcttcaaacgcgttgctgaggttagtcaccaattcccatagtcgttctgtccaacgctcgaggtcaacgttcagaacgggatcataaggagtttccctcagtatcgcttgaacggccctgatgtgctaggctggagtagtcgattgattccccgcttctgtgttggcgtgcgctgacgtaccaacgtcatcgatagccaatacctcccgcggcgcgctcgttgtcgataacccatagtcctcgaggagatgtaagaccgatggttcgtgaggatcgatatcgattaccccaacgaatcgatctgaagttggagtcgctccttgttccttgccgttatcccttatggggatatatgacttaggagactgagctttcatggcgccgagaaagactttgtagctcgagaggtcgtgattctttgtcttgtgaataggacaatagacatcccgagttggagaagtacgctgaattccacgttctttgcaggcgcgaatttcagcacgaacgttgaggaaaacccagcaatcttgcagggtgtgtttcttggttttgtggataggacaccaagaccttgtggcttcggaagtcatctttgtcggctcgtggttcatgtcggaaggacaaggtttggccgtatcagaatccttcttgagcttggatgtcgtcgatattccgttctccgtctcgatgggaggatttttcgacatggaatcgccttggttcgtaaccactgcgttctcgtctccggtcattggagaaccggttgagatcggcgtcgtggtgtaaaccgggaagacgatttcaccgacttgagtccatatcagcattgttgaagcagggagtacttggttgaggctggtgctgacgttgttgtcgacgaagctggatgacatagtagtagaaccttgagtaccaagatcccctacctggcgcgccactgtcgatgggtgatatccgtagaccggatatagagggtattagggtacgttagtacaaggatctacgtagtacgacatcaagcaaacaaaagacaagaattatactggttcaggcctcttgataggtaatagccctaatccagttgatgtgggattatatggtagaaaacatagattacaaagagaacaagggaacttgtcggatccggcgagattgtagtcgagttgattcgactagctctcgatgacttggctcctcgtaagctccggcttcgtaggctgtggaggttatgttggctctgagattcgatgcctaaaccctccccgggaggccccttttatatcgcagatgtggatgtctcctcgtagaactcggaggtatcagaccctatacgatacgccaacgacccggttttgcccgagtaggattcttcccatatgtagattccgtgaaaagtttccttagaatatacaggaaatatccgcatgcgcgtgggtatgccatatcaatatgtaacgtatatcgaagggtaaagagtatgcctaacccgtaatcctgacagatttattttccagcagaggaaaaaaccataatagagaaaaaaaaatgttggcaattgctgctggtacagtagacgaggtgggtggcgatgcaataatttccacgttttcgagctagtgatgcacaaatgcatcaatttatccaacacatatcattaagttattgcatactttaattaagtactctctccgtttcaatatttgacaccgttgactttttagcacatgtttgaccgttcgtcttgttcaaaaaaaattatgaaatatgtaaaattatatgcctacataaaaatatatttaacaatgaatcaaatgataggaaaacaattaataattacttaaattttttgaataagacgaacggtcaaacatatgctaaaaagtcaatggcgtcaaacattttgaaacggagggagtaccatataatatatgttgctgcttcaaatcgtgactttggcacgaaaaggtattttttgtgtgttttctttgaatctgatcacacaaagaaaaagggttgcttaattacatatgtgtggatatgcatatgatccacatgaaagatcgaattaattaagcaccaaatttattgcaagccaccaagaacagcctgttaaagagaggaatacgtatgagtgtcacatgtacgtgactgaagtatatattttccttgttttcgtacgtcacagttataaaacagctacagtgatgtataattattccaggcttccagcagctaagctagatggccgtatatccgtatagcatctagtagaaattaatttaaattaggagtactaataaggaagaaagtactcttgtcatgtacatatgtctatttgatcctaaacataagagcaattttacggtacttaaggaggtaccatgaggtaccacttttcttattgtaaatttggtacctcttattgtaaatttggtacctcttagtatctaggtactatgaggtaccatgaggtactcaaaattagtgtaaaatttggtacctcatggtatctcctcaatgtcacgccccgaactagtcccgaccggaactagcccgtgacgctccaaattaacctgctaatcgataccagtcccaggaaacagtgctggtatcacagggagacagagtatcacagcaacagaggtctctttattatagagtagaagtacagtcatgttgggctgcggacagatcccgagctcacaactgcattacaaaaggaaagcggaagccaggacttggaccaatcatcacaggcgcgacttgggaactaggccgaaaccctaaaactcatcgtagccgacttgctcctggaagaactcctcgtcagcaggatccacttcatcttcttcagcaactggggggggatcatttatatagagcaagggtgagtacggaagtactcagcaaagccagggaaataagtgtttaatgcaggcttcaaggagaggctgttgttttcgcaatttattttatttgaactcttttctaaaaagtctaagtgagtgcttctcaaacgacacggatgagacagtgcgcctcgtccggtcggagtatgtgcaatgtatcagtctttagatcttgaaacagggttggcacccggccaacagcttttcaaacggccacccgggcctagctgatcccgtcagctgctgatttttttttcaaatatcgaacccagattcacaacagcaatttcacaagcagtagtcaaacaaaactacgctaggaatcacctcacatccgcccatgaccgtgggcacggctgttcgaacagtttgttaacctctgcagagggggtacactttacccacacgacattactaacccagatcacccagcccgtggggatcagccacgtcgggagacctccaagctttcacgacaaggcatttcgaaagccgatacaggtttaccatatgccgacgagaggggtcccagaccaacaacaggttaggtcccagaccatactgtgccaggaagcccaggggtcctccccgacaccaccccggcgaatccacatgtctctcggcatcaaggctcccctgataagctagttactcagccaggggtgtcccattccacccatgtggtcgtacttgtcttatgtttggatgaaattccaaggaaatcggtccttaagtgcgagagcgggaaaccgtacacccggtacgttccccggtccgcggttttggaaattcgtttagttcgcaagcaccgacccaggtgtcgggttttccaagtcttttgtaaaactccagttttacccaagctgttactcagattataagtttgaaggcgtccgtcgatactcgcacaggatgcacgaatatcaggacgcaactaggtggttacaaggggacatgttgtaacaattaacaaggaaaggatcaaatgcaacaatttaggtaggtctgccaatctgccttgcagacgggacaacagatttagtgtgatcctatcaatgcatagtatttcgcaagcaatataattaaatttcaaatataggctcgagatgttcaagggtggcttgccttgctcgagatctggagcttgatcctcgaaatcctcgcactgcaggtcctcgggctccggaactacacgcgaaacggaacaactcaacaaacggtgaaaataaagccctattaatgacctctaagcatgccattagatagatctcgagatttgaggaattttggaagttgaacggagtcaaacggacttacggttgggaagatattgaatttctaagattattggatttttggtctaacggaaaaaggatttaattaaatcctttttggaaaagaaaaagaaaagaaaggagggagggaatatagacttttctcgggtggctagggtgcggcccaagagatttggggcggctcggccgatcttaacgggccggccggcccaagaaggcggcccaagacggtcgcgcgcgcgggagggaggagagagagggagccggtggaccgggctcaccacgcgcggtcctgggtgggacccgcttgtcagcggctcggctcaccgtgcggagggagtatgcggcgtacgcgcgcgggcagggctgggacgcggtgcacgcgcgtggttcgcggaggaacggatgcgcggggcccacgcgcagcctcacggctcaccgcgggaccacacgcacggggagaaacgtagggagcggctggccgggtcggcttatccggtcgcggccgaggtggcgccgaggtggcgcctacgtggcagcctcacgggccggcgggaggtagacgacgacccggccgcgaatggacggcggtgcgacagcggcgagcggcggagcgtgccacggcgataccggcgaaagcgcgcacaccgggcggttgcatgtgacaaggggagacgagcaaacggctcggattcgccggaggtagctcgacggcggcggattgcggcggcggcaaccagcggcgggagaagagggaaacggcgacgaggtcacgagaggtcgattcccggcggtgagagcatctacgcgaccacgggaatccgatgctagcgtcggattggacggagctacgccgagcgaggctggcgacgagcgggtgctacggagctcgggcggcgacggcggcgagcacatggcgaacgacggcaacggtcggggcggcgccggctagctacggggagtctactcgagctactaccgaaagctagggggaggagatggagcgaggaggaagaacggaaagagnnnnnnnnnnnnnnnnnnnnnnnnnnnnnnnnnnnnnnnnnnnnnnnnnngtggntgtctcatngtcctaccnggggacagc

SEQ ID NO: 15752 - DNA, 32420 bp, Oryza sativa
  unsure (1)..(32420): unsure at all n locations
gccgacggnaagttgggcangncaanncnncgagnnnttggaaaaagctatcgatttcgaaccctacttattagtgctaagcagaagtcaccctttccttctcttgtatccagatctgagcttgcagtcaaccgattccggcgtctcctgtggttcctgtggctaaatccttgtccaaggatgcatctagctttaaccccatcaaaaatcatgagctattggatcattagttagatgctctttgtgtactagtattttgtttggatagtgggcatgcatgttgtttcgctttgttttcttgttctatttaagttgatgcatcagtaaatctgtttttattttccttgttagacctcttaccagaagttttttttggtgtgttcttggatactctacaaatcccccaatttctatgctagctgaacaaattagatgctagttctttctacaaatggtgagcttcctttgccagttgatctatttccgtttctttcagataatatttaactactgacatgcatatggatgactatcaaggatggttgaaaggctagctaatgaatactaatctgaggtaaacttatttttgccttctcagacagagtgaccccattttaatttgttgttttggagcaacttatgctgattatctggctgttaggctattcttgcatagttatatgcatttgtaacatatcgaagctgttcctgctactgtcatcccatctgtaacatatatctggttgttaggctgttaggatattgttgcattaaacttctctgaatgatgtcattgcaggcactgggggctgtacttatgctgatctaattgtaagtttgtatgtcataccatattcgtcaggctcagaaaccaaagatggaaatgctatgttcaagtttgtggcacttaggctatatttctcatttttcagtatgttggcatcgaagtatgttctcttttttctggatttatttctggtgctttgaagcatcggcttggctcaatttgagaacttgcaatgcatgtgtgtgaatgtctatggattttcggtgacaacttggaatgcatgtgatgttagtttgaaacttttaatgcaatgggctgaaactggagacatatatattgcatgtgtatgttctgtttttccagaggcatggctagcaaatcctaggggaaattattatttttctggatgtaagctcaccactgacggttcatattgcaaaagccgtcacaggtgaccataccagtgacggctttgcacatacatgtcgtcacaagtgacacacctgtgacgttttttactctctgagccgtcacaggtgagtcatctgtgacgggttgcaaaatggcatgggttagcgcagacacttatctctgacgggccgtagagttctagcccgtcagaggtgactgtcatcagtgacggtcttccacccgtcaaaggtgaccgaactcaccagtgaccactgatcactgaccaagcctaaagccgtcaaaggtgagggtttgggcccgtcactggtgaccttgtccagtgtagtgttctgaattgcatgtactcttatcgaaatgataattgaatcaaataaataggctgagaaatcttaaaacatcgaggtttttttagagagaggaactatatttttttcaaatataaatgctacatattcataattttgtcccatttcaccaatcatatgcaaattcggttgggttgtgtccatattgaaatgataactgaatcaaataaataggctgagaaatcttaaaacatcgagtttttatttgagagagaggaactatatttttttcaaatataaatgctgcatattcctaattttgtccccatttcaccaaccatatgcaaattcggttgggttgtgtccgtatcggcgagagtgaaagattaattaaccaagaggatcaaatggtcattgtcaaatatatcctcccaagtaattaatcctctcacaatccaatcgatcaaagtggacaaggaagttattttggtttgaaaactgtctataccaattagcaaactgtttctcttaagagttaaagtggatcgttttcacgtttactagctacttcctatgtcctaaaatataacaatttttaacactaaaaatttgtcctaaaatataacaaattttgtacctacattcctttttaactaatcacaaccttccaccattcaaattcttcacctactttcccttcttaaccaatcacatttttttcctatttaattccacatgttttcttaatacctgttcttaagcctaaaacacctcatgtattgggacaaaggtagtatttgttaactcagaacatatcctatacatacaagtttcgcgagtacactcaccctgtacatcaactaataaacatcatcaaaaatccagaaaaattatacgagtatttctaatagtattatacttgtatatatatgaactctcaactccaaaattattatattttagccataattaaaaaaacaaaaatctgatagctttaatagtataaatttgtcaatcttttgtttatttctgctctatatatatgatgaattttaggttgagattttatgcgtatgtataatactatagaagtatatgtatgacttctgttaaaaaaattatgataacgttttgtttgtgtgcttgacagtatactccaatcttaacgttatcttgcgtgctgcagtgggaactacaaatcagatatactgagaaaggaaggatgagggaaaaaatacatgtatgttttgtactcgtttcgtcccaaaaaattaaatcctagctatgaaactggatatgcaattgtccagtatatagctaggatttgcttttttttagacggaaggtgtatctgggaggtgccaaatataatagaccaaataatttggcattaattaggcatgcttgactaaaaaaatactaggatattagggaagcccctactaaccatgtttagtaatgtatatgcggttggagaaactccatataaaagagagatcaagtccatggagagtgccatttatatactagattgccagggcatttataacaaatactgatccagcaatacggtgcggtcttcatctgcacagcaaggcgcgtagtagttgatttttagtggaataaatttaaagcttacaatcaagtggttctcgaccaatatagctagctccatatcacttcaagtggcagatttagctcaaattttaattatatagaaatctagatttctcatatccaaaaaatatatacactaatatgtaaaaaataaaataacttcacaaaaaattagaagagaaaagggtgaaatcgaaactcaccccagtgaagcaactctcaactggccaatggttctagaaactgggataatcaatgataagtaaacagctttaacaatttatggggttagcaatggcccattgccacacctggacacgtggtaagagcatgagcagataccgacgcaaagagtataagagtttaatagtagagtccactactagctccaattaatctatagccgatctaatagccaatttatacaatagttgtttactatactgttaatatatggtccacttgtcatacacacattgtgtcttgaagttcatgctacagctagctacagatctgtagcccgctgctcttctctctcatcttttatctcattaaaatatgtttatagctagctaatagtctgctattgtaccttctctaatgtgtggtataagagcaagtataatagcagactataagccagctataaacacatatcgaggagactaaagaagagaaaaatgagcagcgagctatagatttgtagccagctgcagcatgaactccaatacgtaatgtgtgtatgataggtgggaccagatattagtaatgtagtatatatttataggtaactattgtatgaattgactattaaatcgactatagattatttggagctagtagttagttatactattaaatttgctctaactccgtatgcaagttttccagagctggatattctaactccataaacctatggatttagatatgtaactatctatgttaatgatatttgaatgaatcttttttaaatcattttaaattttaaatcactctaatttagcacacaaactcaatccagcatgtatatatgagatctagagtaagacttagcagggcttacttataagtctacttatttacaacccaatgtggacatcatctacagtactggcaaagtggcaagaggcaacattaatttgtttggattaatttccgcgtgttgtcttcttaaggaaaaagattatgcaaataatcgaaatcaaccgtaccttttataaccttactgcttcatcatactccttctcaacaggatacctatatgtctagttgtctactttggactaaagcatatgttactcttgtgctagagtacctgacaataaaggtcgatactaggagggaggccatactatggacgcactataacgaaacctattacatcatggtcgatcggtgataaagaacctcctttcctaaaacgaatccatctcgatctagagatgaatctagacacacatgcatgagtcttttaggatagcgggatcggagtaaataggaaagacggcgggaaaatgtcagcatgcagcttgaacggactatcattgttgaaattagagagggcacctaaggtggctacacaaagatgacaatattagcccttcctgtaacgatttcctccttttttaaaaaaaaaaaaccttctcgaagaaattgatgcatattaggctactttgaaaaaaaaaatctcctcatatacatatataaaatctcgcatatatagaccccttccaccacttggcgtttagttgtgtgttttcttttaaaagaatgcctaatattttaaagaaatataatatgaaaaatagaaaagttctaagtgcgtaagaaacccaaacttattagacaataggttgaaactcaaaagaacaatatatgtttattcctcttatattaacacaggttaccattttgaagagtctatgatactctaccatgaaacacttttgaaatttttcataactattttatatattcaaaagatggaagcacatatattccatcgtgtttcaaatttttatacgcgtgaacactgaaaacgaaataacaaaatcaaaaacagataattgtaattaattgtccatgatgaatcgtcatctgtgtgtgctgtatgcacccgttcatcaaaagtgaatttatgtgcgttgcaacaaaaaggatatgatcaatatcgtcccagctgcactgccagcaaaacgaaatggtttttgcaaacgtgtgatttgtcatgttgggcttgacgtgtccaaaatagtagaagtacgcagaaagcgccagcgtcacttgagtttctgtactcaacactcaacaggtttttgctagccgacatgagatgatggggcaccgtttaataggtttttcccgatgagaaggctatgaatctaaaggacgaaccactgtatgtgttgtctcttgtgtgcatgtatcaatttaggttaattttattatctttaaaagataccccaagttactacatttgtaataaggtggaaaacttggagataaaatttagttatctcgagatatattttgtcaagcattgcaattttttttatgatttactacataactacttatatccttttaacacgtatgttaatgtttctttctaatgctcataatatagtatcataggattatataagacatcacctgatacaatgtatctggataaagggcatattcagataaattgtactgggtgatgtcatatccaatcttaagttattactccctccatcaacttttgatagtcatatttcatcttgacacacagaccaacgataagtgattctacctatcatccatttaaatatgctactagtcatttctcgtaaacaagtgattcattaatatttatatttctcgatgcccatgtaaccaatcttatgtagaagaatggagagtcgcgcattaaatccaagaaagctattaagatgataagttgttggattgaaatatgcctatcaaaaataatttttttagatttggaaatatgactatcaaaagtagatgaagggagtatattataggacgaagggagtactacttttgcacctaaagattaataggctgtgttcgttggtgggtgttgggaacccatctcccacgcacggataattagtggtcaattagagcatgattaattaagtattactagttatttttttcaaaaatgaaacaatatgattttttaagtaactttcgtatataaaactttttataaagtacacactatttaacagtttgggaagcgtgcgtgtgaaaaacgagacggagagagttgggaaccaactgcaacgaacgcagcctaaatggctctccgtcatccccattacccttcaccaaacctatctcacagtcaccactgttacacgtcagttacccaaagatttttcatcctaatgttcggtttgtgaaacatattatgccatggcatattgcaccttttagcaatcattttcatcaataaatatatttattgactttttggtcagcctttcgaaaaatgagaccatctttatcacctttgtttaagcaatgcagccgcaaaattcaactaatgaaaaataagattttaaggaattgataattctatatagattttatagaaaagttagcaataattcaaatcttatgaaaaaattctttaatttgagtctatctctcatccaattcatgtatttttttttctacgatctcaaattattatttctgtatttttcctataacttacatttctctattttgcacttgctttttaatcacgtgtaaaaaagcccttggttgttcgttcaacgtatatacagttatacacacatgtatgtactctaaataaataaggcataccatgttcgtcctattaaagctatgcttggctctactttcagatcataatcaaaagtttgtttttttcaagaataattttattttacttgtgttcttagccatcataaaaagaaagcaattagccatgcatgcagtaaaggaaaacccctaaaatcaaatcaggcaaattaacaattcaactttagcttcatatatattaattataatccaaagtagagacgagattcgtcggcaactcggcgtcggcgcgtgtgggacagtgggacgttgcaatcgcaaggccgctctcccggtagactggtgtgcgtcatggagtcaattggtgaatgctctagttaatttactcctgattacagcagtccacgtcctaattaatctctacatgctacatccatcacccctaggctgagtttggatgttgataagctctcattttctgtaaacacgcttttaattggtgtttttttttttacaaatattttttatatattttttaacatctaattattttttaaaaaaattataattaatactaaattaatcatacacacataacttgtctttttttttcgtgacaccaaaaatctaacacaaattttactttcaaattcagccttactgattgctcacttttaaactcagccttgctcattgctgttcttaatagccttcccttttaatgttgttcgacctaccatctatatgccaaaaaaaaagggaagaaagcagttgtgtcaatccggtgaatatgtaaattgaaatgaaaaccatccattctcacatgaaatgaacaaaaaaatatgtaaaaaaaatccatccaaacctatgaaaatctgacgttgagaacgggacaagaaactacctatatgtaccgagatgatgggagctaaccaaaaaggccattgagatcacgaagcagccctgcatttgttacagttggtgggacttagcagggaatagaggacactgacgtagcaattcagttaccgtggactcccttccatcccaaaaaaatatcttagtacaattaatctgttaattttagtataatcaatctggtaagggttatatcctcttttaggttaagcttttttaaacaggacgagtcacatttatttctaggttaagttttttttaagagcaggaggggtcgtagcaacaaaggcccccaaaacagcgcgttgttatccacgtccacgagaaagcataggacaaagggtatttaagactgttgctatttgtgatacggagcggattgcgagtggatattgttctgtatccagagctagacttttcagagaaacgctgcttaccaaactaaacctttgtcacggctatacgtgtggcgaaagccggaatttggcccccatgacctcccttttccattcggtttggaatgatacaaccaacaaaaggaaaagttgcaaggcgggcactcatagctcacgttacaattccagcaaccccacagaattttggagtgcaaattacaacaatggaatttcttaagccccttttgatttagattattaagtggattgttgtcgtggattatctacctgattaaagggataaactatattttctaaaataaagttaacagatagtttaaaataagtggtccaaacagtgcagcagaaaaaaaggatttcgagaaaacgtatttttcgaagcgtgagttcaataatcccgtggatgagctaaaaagaacagagatcatacggcttaggttagtttgggtattgacagtggaggtcttagagtaccacgggctgcggccagctcctttggaacgcatgattcttaaaacaggaattacaagaaaaaatgtagaattaaagtgcccttacacctcaaatcccatggattgaaaaaaaaaagacataaaaactatatgaatgacgtgagaaaaatgctagaaccagaaaagagatattcacaaagggtttttattccaagaggttgaagcttatgttattcctccaaaatttctatgttttgaggttttgagccaatcgaaaggaattgcccaggatttttgcatagctattccatttatacaaatgaccatataggaaaatttttcaaaggattggattcctcccaaaatcctttgttccaaagcagggttttcaatttcgaaattggattttatgccaggggtgaccgtaatttcgggaatttctggctgaaattatttgaaaatttgactgaatttgaataaaatttgaccaaattcgtaaaaaattacaaaaaaacaaacatttcgggcgagatttgaacatgccggtaggggcgaaattattgaaatttcagaaatttcgaaccgggatttcaaaccctgttccaaagtggttttaaaatgtctgctcctaagggcatcaccaatgtatatgacaaagtgatccatatagatgggacccacataaatagtttttccctatagcaatctcaacagtgtatatagatacaaggtatcaataggagaagagagatgagtagagatagataatataatttattccatatgggtagtccatatgcatatgggtatcttttgttattttttctatatggactagttacacaatggttatagatggcttaatggaatattctattgcttatggactacttttacaccacattgtggatgccctaacatcttcaatttcaatcctcattaaatttcacgctatatgctataaaatctagaaactagcataaaatcactcctctatctccctccccttccactctctgtcgatcccctatcctttgacccctcactctttggcactgccttttccctctcccctctcccatctcccctatcctttgacccctcactctttggcactgccttttccctctcccctctcccatctccaatgacaggtagacctctcccttctcccctgcctactcacccttcttggtgacgcaaacggagacgaggcgagccaacaagctctcggcagcacagaatgaagtggggtgcaccgatgagctcccagtggagtggattaggcgatgaggatgaactcggcagtggcaaatcgaacgaagagctgagcgactgtgagactggacgaagaagtcgacgttagcatctcctcgcaaacttcataggcaaagtcgatatgtcactcgtagttattgcctctccattgtccacctccctccaaattaggcacagcatggggctccgtgcttttcctggtgaggccaccgtaacttgcggaaagcacaagcacacccacaagaccactcactccaccccctttctcctccacggtggtttgtctccgacatggtcaactagagccgctggctagctcaccgtgttgtgaatagccttagggcactcacaatgcaggacatgggtatgagggaccttagagagccacataagtcacaaatctatttatctcatggtgcaaagtggttctaggagtggatttaatttatcatgttagtggctaacttcttcacttctatcctgacattttctaaaggaaattacaaagcagtccaatattttacacggaacactctaaaaattaaaaaaaatcatctccctacattttccccacacccacctgtcacttttcactccactcgcatttttgtctctcccttgctcaccggcgtcgccgcctttaccctcaccttggcaatgcctcaaaccaggcaagcatcgagcagatcaacgcagcgatgagcagaagcatcgaggaggccaaggcaccgtagcaaggaagctactgctgtagacgggtcgaggcggccatcatcgagctggtgttgcggacgggttggggtggcttggagtgggggacgataacaagctcgacaacgcagaacagggaacaacaataaggtcctaggcaccaaatctgccaccgccatcttccttttttcttacctgcatctctccccaagctgtcatcattgtcctgtcgagctcgctagatctagcatcaggctcgtttgctagcaccactgctttagggatgacgaagcaactcagggtagtgccctcgccaacgacaaccatgcaaggagcagcaggacgactgcgccacatcacacgggtctaggggcatcgcatgtgataacaatccggcccaggtggggttgcccgaggcccaataacttaaggttgcccggaccccaacagttcataggcacacccactcggggaaaggcccaatctccctaaaagactagtctgataggggaaagggtggctctcccttttaaggtggcttcctcctcccaagctaagcaaagcaaggtgggattattcagaggctcacatggtcgtcgcccgacttttgcgtctttgcctgcggttaataatggaggatgtcctcatcattcccacccccttaacaagggcccagctctgataccaaaggataacaatccggcccaggtggggtttgccgaggcccaataacttaaggttgcccggaccccaacagttcataggcacacccactcggggaaaggtccaatctccctaaaagactagtccgataggggaaagggtggctctcccttttaaggtggcttcctcctcccaagctaaacaaagcaaggtgggattattcagaggctcacacggtcgccgcccgatttttgcgtctttgccagcgggtaatagtggaggatgtcctcatcagcatagggcaacgccctcttctaatgcaacgtgcgagccatgccctgtcttgttgcgacaaacctaacgaggaacgtgcctcaagggatccgtggatcttcatttggtaacggagaggcagactagaatctccgacgtgagaaatcggggcaaacgccacctaggcatactgcgaaagcccttagagcagctccattgtgtgtttgactactgcagtaccaagatagcgaacacactttgattcgatgacttcagcgtgcgcaccgatttatgggacccgcataaaaaaagtttggaggaaattttaaattatgtgactgaggttggatgggttcaaccccatctgcaacaaatactattttaattatctaagagcgacttatattttgagctcgatttagttcactgacacacaacaatcgactcccgatagttcaatttctccacacaccatagggttgtttagcacagctccagctctagcttcacctctcatagaattaaaattcagccaaacagttttagttccacctaaataacagcggagctgggtgaaacgctctcataaaataaactagttagagtttactcccaaacaagccctataggctatagctgctcttatgaaatccggttctgatcgtttttgtttgtccttttcatgtgcgaggttttaggcagcagctgcagctcagctctacaaccggagctcctgcaatgcaggcactccacgcaaccgcaaccttgaacagttcactagtactagtactggctctgttcgggagggcactctattattgtattctattattgcataattaattaagtatttactatttattttaaaaaatagattaatataattttctaaaataacttttgtatataaactttttgtaaaaacataccgtttagcaatttcaaaaactttcgcgtgaaaaacaagagagaggatggtgggaactgctactgcagaacgcagccagagcggagcagagaaaaggaagcgcgatcgacgccacacgccaacacgtgcatcctatcctaccagtccactcaggcaaatcaaaggcaaccccccatcactccgcatttataaccccacccgatgcaaatgcggtggcgcctctaaccgcgttcttttctccaaaccggctaccttcacccgtgtggagtccaagcgtccaaaactccaaacccccgcgagctgggacacctcacttgccacaccgaacttcgctttccaagcccttcaacgcggcgcccacacggccatcctccggcatccctgaccctgtgccgcgcgccacggctcagacgacgacgacggcgacggcgcccgccctgacgcggccgacagccgacgaggtggtcgacggcgatggccaggccagaccaggctgagccgaatgccgcgttgatggtagctgcggcacggcgcggcaataggatgcgtttgggttcttctctcagttttcccaactcacatctctcatttttcacgcgcacgctttttaaaatgttaaacggtatactttttaaaaaaatttctatacgaaatttattttttaaaaaatcatattaatccattttttaaaaaatattaattaatactttattaattcatgtaataataccgccgtgtctagttccaaaataattcttcaaacttccaactttttcatcacatcaaaactttcctacttccaacttttccatcacatcgttctaatttcaaccaaacttccaattttagtgtgaactaaacacagccgggtgctgttttgcgtgccggggaaggtccaattattgagcggatctgcacgtacagcgccctgtactgtactttaccaacttgttcaggttgtagcagcaggagatagcgcgttttcagccttcaaaagcatggatgatttgattccccaggggataataacagaaacaagaatgcatcgatcggcatatcgctatggtcaaaaaagtagagttttgtttacctgtggagaccaattgtcatggatgtgtgggcttgtacttcctttccatggatgagaggggatcagggaattagaacagagattcgggcaaccgctgcaatcatgtgcgatgaataaatgccaccagatcaaaagggttaggcatcgattcgatcataccggaaccaccataagctgaggagcatgatggtgagctgcaattattgatcagggcaatatgctttgcacacactctctgtatatatggaattgtggttggtttgccaagcttggaaatgtggcacccagacaggaattgatgctgctgcttctgttactacaagctctagtacagtatgagtataggatgttgttgaatttgaccctgccgtagttgtcgtaactgcacattcatctacctgacgagaatgattccttcagaaagctgtagagttcctccgcgactggtgatgggaattcctcctgcggcagaagggcacctggaacctccacgaattttgtcacgcctttggcgcctctgagagcttccatctcagccttcgacctcttcggggcattcacggtcgatgcaaccagaactggagcgtcaccgtccaacttggcaaacagctgaaggaattcttcccttgtttggacagggtcaagaaggcctgtcaagaatgcagccgggacaaaccgtgcacctttccttttggttaactcgtagcgactttccacgatatttggagtcacgttctcagggttggcataaacgtgagacttgtactgggactggatggacttctcgttgctcaccagaacattgtacatcatccagccaatagccggggccctgagggtccctcgtagaagcccatacctgttgataatggttagggaaacaattttcagcatgatcaattttgtatctaaagaaacaaaaggctgagatgtctgtaaaaaggctcaacgggaacatgttatcacataattatctacatcagtcagttttcaaaaatgtaaaaatatatatatacaccattaattgttattttgttacatgtactttactacatctcactgattagttacacaaatatatcattagttaaatgaattgtactaataaacgtaaaaggaatgaaaacgactaatggaaaatcaaatcagtagctttcttaaccaatttggaaaataaagtgccagcagaaacatggcactggcactttctgtatgcaacgacagtataacacacagatatgtatttatcaacatggaaaacgaaatgcctgcataaacatgctagttgctactggcacttcatctatgcaataccataaacatattcaaaccataaatggcatccaagactatattactagtggcttgactgcataaacacaaccatattttctcagttgcaatgcatcataacctcactgcaatacttacttacccatcacccatctaccaaatgtgcctcttgatttaatgagataggtcagtaagtatacacaattcaacggatgacaacatgaaagatggctctattgcaagagcccaaggattactatatagaatacaagacaaaaaatctagaaattactcatctatacacatgagactgcactattacccatttacccttgacagattacaattaccattcacaattcacacatatcacaaaatatatttacatcttatatttgtatttatgaagggataggtaatacatactacaggattacaacctgcaggacgagatcttaaatagtgtgtgtggtatcaacaaggagcatcgaaaatgcaaactgttgctgaaaatgtagtggtgaagataatatttcatattagcatcaagtgttcgggcctcatcatttgccccatggcttataagctgctgctgaaatttaaatttctaaacttgatttcgaaattgattttgatgttttttcaacatagtttctttttcagcattggcttttaagtcgctaaggacacatataaaaaagttttacccataaattaatttttggttgttaataagctgttacagtttataataagctgtaagcaactgatgaggaccttccttttttatagtagtactgatgttgtctttgaaattatcttaccaaaaaaaccactccgcataatgctgagcataaatcaaagagcaaaggtgataggaggacctttcctagcattctctgacaaatatttgtaatatcaaagctatacacttagtctataccttgtctccatatcagaacctcggccaaatacaatgggaaggggtccagcccaagtaggtgcaactgcagcaatgccagatggccttataaggcccttcccagccgcacggactgcaattgttgctgcatgacctcctccaactactaccacttcaccatctgatcatgataaagaattacaatggcaccatcagttgagtaatgatattcaagaaaatgtgttgttacagaagtattaactggaatatttttgtaaaatatgttttctgcactgttttagttgcattgggtaatagtactgctaaccttggctatgagtaatcctgatttctagttgaatcattgactattacagtaacaatatgcagataaagtagtcatctataatataagaaccagaagaaagaaatgtattgttcattacagaatatgcccaagtgaagtagagtgtattgaatcaggtaaaaaatacagtggaaatgcttacagtatcagactatcagtgcgctttaagatgaaaatgttgtatacctgtatttgccacaggactatttggtgaattaattaactgaaccagaaaattctccatcacatcagcattgtagttcagtgatggcctgtctgaataacccagaccaggccaatcaacaattgtagcacggtaacctaattctccttttcgtgccacaatatctttggctaccaccctccattcctccactgtgctaacatcagaaattgtaggaatcataagaatgttcttcacgttctcagcagtctcatgctcatgttcctcatagtaaatgtttattggcttatcctcaaatgtccactgccatttcccagtctagaaacacatgtatgtaatgttatagcttagtgtcacagtcaaacaacaaagaaaagcagaacaaaattttccatacaactacatccaaaacatttcattcaaaatctagtgtttcagtacttgccactgtggtgactgaaatccattctgaacattaacaattgagacaaggacaattgatcatttgccactctaaagagtgctgtttcattaaaaaaaatgccattataaacaatgtaaatcttttttcttttgctgctctaacaatggaattattcatatttgcccctatgggcaatttaacccctctccccctctgtaataattggttgtagctctcttgagtaaaggccgggatgttatattccattatctaaaaaaaaaaccctctccccctctcatccttcttcctagtcttgccatgcccactggtgaggcgctctaccacaggcaaacaaaaatatagaaaaaggcataccactagaacttctgatctcttgccatatctattcttctatgctcccaaaagaacacaaaaataatatatccacccattatttgaccgaacccccacaagcattcttgtatgatctggcagttgagagtcacctttcttgaaattgtgaatttctcacccttcaacaatcaaaaccattcatgactagcttccttccaatggcattcatatcattggttttagggttaaaaaaatggcatcaattataaacaggagtaacatggacccaacagagcaggaggcatcatgtttataaggtagggcccaagataaaagcatgcaaatgacaggaagaaaataaaacctgcatatctcaaaaatgtaaggctgggtcccatttttgtaaatctaccaggtgatggatcattaacctatcttcttttaggaaaaaattttcaaaagatatcccaggaaggaaatgaagagaacagggtgataaattccccttgcctctgtccctccatatggttgaatcgcattcctcgttttaaccataggagcaatttgccaacaattccctctcatggagaactggagatcatgcacactatgcaatcagccaagcgcatgcatgtgtgtcaacagctaagtaataaaattccaattttccctgaaattgtctactccataatcacttcagtagaggccaagtaggattgatctaatgatgggaagatatagcactgattatgaaaagaaactaacgagacaaaactagatattccaaactgttaacctagcactctgaaactaaacggacaattactagactaacacaagaacacgtacgtaaaaactagatcttataatttaacaaaagaacagctcgtcgtaattgggagttcaaggattcgctagatgtattctgtaacagaaatgcatgttaacaaaactgcgttgtttcaggtcaaaataagcagcagtttgcgccaaaagttaagcaactagatcccaaatgttctattctgttcacgatcagagcaaagttttgcaaacatcaatgggattttattcgaacctgcataactacgcatttcagaacacatttagcattaccaattctgcttgttcatactttagactcacaagtcgacacgggaactttactaattactactacccaccaatttgagatctacaaaaccgcacagaagcagttagtgccgtgtggattgcatggcttcaacgcattcactgaccacccaaattggcgatccgtccggtgagctcgatccaccaccaggcgcaccaatgtaacaaatagtacatgactaccggccgcggccaactcggcgagcaagtgagtaccaggcgatctcatctcaccttgaaggggggagccgcgggcttggggaccgttggaggggaggcgacggagcgcacagcgaagcgcctcgagcggcgaagtcgacggcgggcggcgagcggggccgcgcgactgggaaccgcgacgaccggtaagacaaagccggcggtgccgcccccgtcggtgggacgcatggttggtaaggaaggagtgggaggtttggtggaagcaacggtggagttggagtggatagaaaccgaacgacgtgtgctgccgtcgactcgggactccaacgttcgctgccgtcgttttgtcgcgtccatttcctctcctctggtgcaggtttcacctcgttttttcgtctctttcgaattttttttctcaaaccactatggttccttttttttctcttgattaagatacatgttttatctggtgttaacacgtttttccaaaccattaaattgtatattttatacgaaaactttatattgtatataaaaattactttaataattaaaacttaattgattatgatctaatgattttcttattttatatgtcagtactcaatctcatctaaacgcaaatggctgataggccacgtatatgtacttgtatccgtatcactatagtacgtatccatatctgatacggatacgtggcctatcagtcatatccgggtacttaagaaaaacacaactctatagcaataataaatttagatcagctactagctcaatatatatatatgtgtaggagaagtaataatggtgtagtggtggagtagtgggtggatgatccattcaccaaggtttaaattttaatgttcacgaatattacgtacatataggtggattttcaatagtattgtagtaagattagggatgtgcctgatttttggctttcaacagaattttaggaagagtaaagatatgatgctagtttttagcttttcacagattttagcaaaattaaagatatgctggtttttatctttttagaacgtgtgaaagagagtgtatatgtgggagtgtacgtgtgatattatctgtgtagtagtgtgtgcgcgtgtacactactagtacgtaataaaaaaaagataatactattgtacgaaacagaatggtctgcgaccaaaaccagtttttcgtgggagccatacgaaaacgtggacgctccaaagtccaaaaggatcaccaatcgacgaaaatgaagtccgtatggtgaagtgaacacgcagccaaccaaactactgttgggcctctattccgtaaagcagaagctctctgctccgtgccacttgatgggctacaacttctgtagacgacgaacggatgcctcacagcaactcaaacccggcctcggatacatcacactcctcgaccggaaaggctaatgggcgggtgatccctcccccacccgcccagcgatcacccgtccaccctctcccctatactattagatgcctccctcttctctccctttctccattccttctcctctttctactacagtagaccacacaaatttttttgaaaaacaaaagttagaaaaatttatatatagaaatactatatataaaaagtttgaattcaaattcaaatttgaatcgggtatgtaaacttttgacttataaactttgggtctataaactttagatgtataaactttagatgtatagaaatactatatatagaaaatatttgaattcaaattcaaatttgaaccagatataatttaaattcaaatttgaatcgggtatataaactttaggtctataaactttagatgtatagaaatactatatatgaaaaatatttcaattcaaattcaaatttaaaacgggtatataaacttttgacttataaactttaggtctataaactttagatgtataaactttagatgtacagaaatactatatataaaaaaaatatttgaattcaaattcaaatttgaaacggatatataaacttttgacttataaacttttggtctctaaactttaggtgtataaatttactaaaataggaaagtaatgcggtgccaaaaaaggaaaccaggtggagggatgaaggggggaggtggggagcgaatctgatcgctacccccatccccacggtgatcgatcgcccattaggcgtacccctcctcgacggccctttcatttttaattttttttcttttaatatttacagaaataatctattggcgtaaaaaattacaaaaatagactctgccgctctagtggagggcggcaagctgacgtggcagacggcggctcgacggcgccgtctgcaaaaattgcatttagccccttgccgccctcggcaaggggctaaatgcaactttcgcagccctaaagagcatttggctagtactttttgcatctgagccccttgccgcccaaggggcctagatgcaaaaagtaccagccaaaaagtactaggcccgggctggcttttttgcatgggggtagagggcggcaagggttttcgtgcaaaaaaaaccctccctctcccgtctgccgtcaccgcccgtccctcctccgtttgccacgtcagcttgccaccttagtggagggcggcagggtctatttttgtaattttttgcgccgatgggttatttctgtaaatattaaaagaaaaaaaattaaaaatgaaaaaaattcggcaagtgcatgccgcccgagagacaggcctaatgcccaaacccacggttacccacctaccgcgacagcacgattcactctcgcgccacgtaaacgccacgcaaagaaataagttcacttttggtcccttaattttgtcgcccagtgtaagtttcatcctcagtccggaaaacccggatacgatggaacctccaacttacaaaacgagtgcaaacgagccatgtaggatgaagatatgtgggacgaagaccagtaaaagaagccacgtcaactaaaatcggggatctcgtttgtctggtctagtaagtttggggatgcgttgtattcgtttttacggttaagagacgaatctcagattcaacaatttgatgcatccagtgtgaacttattgcccacgcaaatcacaccgagcgggccgcagaaaccggagagaacacgcgcaccgcatgcgcgcgcgccggttgcgcgtcgcccccgacgccgagtcgccgacggccgcgagcacacctgcctcgtctcgtctcgctctcgctctcgcgggcgacgcgaccaagcgcacaaaccaaaagcaggcgagcataacaaaaggaaacggacgacctcacgcacaccgtacgagtcgtcgtcgtccgccgtttcgatcgatcgatcggctctcgggccagccgcattttccagattcgcgctagccggaaagaaaataaaacattatcatcgtcgtcgtctacgtcgtaacctcttcttttctccaataaaaattagaatattcgtgacacgcttttcaaactgataaacagtgtgtttcgtgtgaaaactttctatataaaagttattctaaaatatcagattaatttgtttttttaagtttgtaataattaaaactcaattaatcatatgttattattactccgttttacgtgaaacacttaatctttaatctttaccttgactacttttttcgccggcccatcgacgtcgtaatcgtcgtcggcgactcgatcgatcgggccgtggagttcacgtcatgggaagaacggccggacggaccggcctgagctttactcatcttttttgcctttttggcctcggctggcctccccgtccttttcatccgcttagctaagctagcgagcgccagcatgtgtgtgatgtgttcacaaaactttgtatattgttactttatggatagattggatcatcgatcgattaattggcgagtgtacttgcatcatcggaccttgattagcatctacgaaaacggtgagattgtgcttataagatatacatatataatactccaattaagtaatctttcatgtcgctctccgggaagacgagtgctccagagtctagaccgacacacacggcaggcacaggcaggtccttccccgttagctacacgcgccggggctcatcgtcaaggagatactatgtatgttaggtatgtcgtatgtgcaactcttccataggtatgggttcaccttttcgattgagtgctggattcctacccacctataggttcccctttttgattgagtgttggattccgacctccaatgatattatatttttttcctcaattttggattaaattttgattgaattttactatcttaaatttgaatttttaagaacctcgacagtgtcttgacctccatactggctctactgcgtgcagtccgatttgtaagaagaccaccttctggatagatgcgggggcgcaacagctcgggatcttgctggccaccctcgttacttcatgatttagcctcttctgcccaatctcctcggctggagcttgtttgctaatctgtgtgaaatcaatgtgtgttttgattatttagtttgtgatgaacaattaattttacaaataatttattcgataaattggtttgagaaaatgtgtgaatattggtgtgtgggtagactaaaatcattgtaaattctaagttttgaggttctggctgctagtaggtagacttatgcaacttgtttgaatttcgtctaatatattgatgcgcaagtctcttgcgtgtttcaaaagtaaatctcgtaaaccattcaaaattgtactcagaacctactttttgtcttgcgtcgaaacatcgaaattttgtcgaaaacgtgaactctgtttaccatgagttgttggataaaaaacaatcatgctcgtacgacagtgttgaactttttttatttttttcagttttgccgagtttttcatcattcatctttgttctttcatctccattgttaatttacccttcagcttattagccgcgtctaaaatttaaattttaaaacttaatcaaatggttgattatgagtttcttcatcataatttttttagcatttacttttaaattttaaaaacacacatataatatgttttattaaaaaaatacttttatgtcgttaacctgttacgtatacggggagcctaataggcgatcgtccagtgataagatctgccctgcctcctctcctccctcttctcccccttcctcctccccttcttctcttcctactacaatacatcacacatttttttaaaaaaacaaaaggttagaaaaatttatgtatagaaatactatatataaaaatttgaattcaaatttaaatttgaatcggctatgtaaacttttggcttataaactttgggtctataaactttagatgtaaagaaatactatatatagaaaatatttgaattcaaaatcaaatttgaatcagatataattcaaattcaaatttgaatctggtatgtaaacttttgccttataaactttaggtctataaactttaggtgtataaactttagatgcataaaaatactatatatagaaaatatttgaattcaaattcaaatttgaatcggatatataaacttttgacttataaactttgggtctctaaactttagatgtgtaaacttgagatgtataaattttaggtgcataaatttactaaaatagaaaagtaatgcggtgccagaaaaggaaactaggtggagggagggaggggatctgatcgctactcgatgggtcgggcgatcgatcgcccattagaagtttcgtacgtatacggccataataatctgtataagcgaaacgatgattgtgttcagatgttagctctgccatctagcatcttctccaggaacacgctctttccgtgtctcgacaaccacagctgcggtgcttccgtgtgttcctttgcagaacttttttgatgcttgaaaaccctgatctcaccacccaaatctgatactgtattgtcgacctgatcgagccaacaacaactgggtccaacagaaaatctaggccaattcctcctctctctctctctctctctctctctctctgttgctctcgagctgatcgtagttgggttttaggtaggtgaggatgtacgcgccaccatattccacaacataatcaacatgaggcacaaatggcaccaaaaaagaattcctggaggttgtagttgtactagccgtgcatgcaccatcaaaaaaaatactttaatctaaattgatatgatatgcaaatcaccatgaaagaatcttggcctgattttaagtgggatgcaatttgcaaacattctttttttttctgggaccagcatgaatggacgtctctgaatcgatcagttgctataaccataatctgagtatgaatgtgcatgatgatcatgtacgaaatgattagtggctctcccggaatcttctgcaggtattgaatactgatcactctttttttagaaggatggttagtaggtagaggtactgtattaagtacgttgatgtaaaggtggaggcttcaatttaattgtgagattttgcggaagaacaattaggatacggctcttcagtcttgaatgctaaatagtcgttgaagttgttgactccccctcaagtttaaattcagagtatatacaaagatgagaaaagattgttgagttgaacctaatgtatgaactgttgaaaattgcgaagaaccgtgaacgtttctgctggttttacttggacagaaactgggaaatttcagcggtctgaaactaacaaaaccttctgagcatcatgtcgcttaatagatgtcgcatctgaaactgttactgattttttatttttttttctttgtagaacatcttgtcgctttgactttttacttactattcgttttatttaaaaattagtataaatataaaaaataaatcatacttgaattacttttgataataaagcaagtcataaataaaataaataataattttaaatttttttaatgagacgaatgataaaaatataaacaaaaactcaaagcgacaactaatatgagatgaaagtagtagtattttttttccagaaagaagaacatctcatgtagtttattgttggagtggactattgaaggcaaactaattaagttcgttgcttctcttattttatttttgttgattgatgtatatattatttcttcttctcctctaactgttgcaacgaataatttctgtcgctctcaccggtctccctcaatcccatatggaaaatttgtcggtttttaactctatgacaggaacccgtctttctcccactgaaagcgatttttttactgttattgcgaatatttgaagcaaagacaatcaaccattgccaggcaggcatgcagattatcaaagctggacacaacaaattgagcctaattaacactatcaacttcctgtgcttattcctgcaaagaacgcagacaaggcccagtcctgatcaagaacagagctttctcaaaaaataatactaccaataatcaagatcagagcgagttgattaaaacagagtggaatgcacacaaaggcaactgattcgatcacccaaatggctccattcaagtggtgacccatcaaactgggtaaaagtgtttaatgaacctgccctcacgccacccaaaatcctctagagtttgtactccctctatactcgtaaaggaagtcgtttagggcaatgtttaagtcgaaccttaggaatataaatcataaataactctcaagttattgagtttgaaaaggtaaaaattatacgaatagatttatcttgaaaaatactttcataaaagtatacatatatcatttttaaataaatagttttatagaaacaagaaattaaagttatgttttgaagaccgtgtcgctgtcataaacgacttcctttgccagtacgttccaaaccaccaagaaccccgctttggtttcatggacaaaaaaaaaaagttgagattttgagggcgacttggaggccatctccactggttttttttcctcctctggtcgccatctgaatgcctctcgtctcgtcatggtttgggtttaacccaagcaacctcgacatgaaaggtgagattttcctttcgccggtgttggtgtcaaggacatcatttttcccaacaaggacaaatttgctgtggatttatttggtgcagatatattcgatatcgaactgtcatggctaatagttccttgaaggctcaactgtgatatggtacgaactcggttcatacaagtttctccttgacaaaacagatttgtgtgtaataatcaaaatgccatcaccatgagctgtttcgtggagcccatgcgaaaacgtgtactgcattcgcatttctatatgcattgtgcagatattctgcatttatccgtactcatatggagtgcttctcctctaagattaggcgagctgaattaatccatttattatttattacttggttttccgtactgctgccgaagaaggggaccaaataaacttgaacactaatcgattccttttcattttttatgtgttcccttgttctatttgaagaaatggaagaatggattaatggcacgcttcttaagcaccaaaattgttaaaaaaaaaatcaaaaagaaattccatataataatttcttaagaaactatttaaattccaatttttaaactttataataatcaatttatttgtttttctctcgaatagtaatcataaaatcattcagctattctaccatattggtaaaaaaagaaaaaaaaaacatagccacttagctaaattgtccgaataatttttttttacaacacggtacaaacgtgaacatccacgaaagcgtggacactcacagaacacatatatgcacaccatatccttatgagcatctttaaaagactgggtctatatatcttgtttgacgaagtcactgtaagcatcttgttgttgatgggtatatcacctactactgaaaaaaaataattagtcataattgcgaccattcgtgtgtgtatgacattgaacttgggtggacaggtttacccaatcagttgaattatgcttactttgcaatttgtttgaagaagtttatagcttctttaaaacacatgattaaaaagaaggtaagaataggaaaaacacaggatttggataggatgcaaatggcaaaatataggattacttaatacataaaaaacacatgaatgatcgtctgattagatcgaaaaaaaggaatcaaatgagagagatttaaaggaatttttttaactggttggagctatcactaacttttcttcaaaatttttatagtgttgttcattgcataggaatttcaaatagtttcatagaattcaattcttgtttcaaatgtctttgcagaaaatttttctttaggactaaaattctctaaattttctatgtaattgtttttttttcacaaacaaggggcttgacagaatggtaagagtatacaaatcctgggaaaatgcagagcgcggcgctgcgcacggtggccactgtgcccccgattcatttggactcatacgcaagctgcctcgccggcgacgcgacagggcgggccaccgtggtgctccgggccttaatctctggagctccgggcccactgtttaagagcaagtttaacagtatactccaatttttttttcactactcgtacgcacaagacggtgcgaagttctattgatagagcaggaaaaaattacaagattataaccccgaagggtcgtaaccaggaaaaagaaaaaaaataccaccacccacacaccgacatcaccaacacacaagcccagaagaaggctagcaccgaccgaccaccgctaagcgtgagcggccgccactagacctactagctccaattcatccttagccaatctaatagccaattcatacaatagttgcttactataatattaatatattgtctcatctgtcatacacacattgtgtattagagtccgtaatgcggctggctacgggtctgtagcccgctgctcttctctcttatctttttatctcattaaaatatgtttgcagctagctaatagtctgctattgtatatgctctaagcaattttaattagtgcacttttggtttggatatgagccgctcgtgatctgcaccacccggtagatgtcctgtttctgtttttctgctagattttgttggaatcatgtgaatgattttgctttttgctccccttctggtgtaaagcgcggttttgggttgccacgtctctttcgtgcgtggctgactggtgatcgatcttgaacggttcaggtgtgacgaactggactcgtgtggttagaaggttgtgcatgagcatcatctaaaatctgcccaaaagataatctcactcagtctcataaatggtatctgcatgtgtatatttataggaataattgtgcgtgcgcatgtgagcatatgcttgttttttttttaaaaaaaaacgatgcactcacgacacgacatgctatatcaatttttgtaaaaactaagataaaaaaaattgtaaaaactttataaggattttttatgtgtatcattttccctaacggccatttcccaactaaacgggcaaaattaatggagatctgaatcacgcaatttgtggcacgtattcctggttgccggcgactaatcgagtggagcagcgcgattacagtatcatcatcatcagctttgcgccttgtggctgcgcattgactcggatcgaactccggctttatgccaaattgccaaggccaccaccccttgcacaagtgtctccgcattaagccttttccatatccgcacggatgcatcataaaaaggagcgaatctcagatgcacacgcatttgatgccgtggttaattactacgaggcacaaagcacagtatagcatataatctctctcttagcgacaaggaataagggcatgtacaaagttagagtcaggtatgagctctatgctatatagagactagcattctataatagttggagacaatatggtctttaatcattaatgtatcaaaatattttttttcttactattgtttcctttctttcaccaccatgcaacaaaatatgctctaataaatgctaagagtcgactctaagccgttgttatgtataacaaccatatttctctttcctcctttctctttcttccatattatcaaatttacttgcatggcaatagaaagaccactaataaataccgttgcacatgcctaaaaggcagatcatatatatactcttaaaaaccttcattatggaaggctaccaaccaacgattgattacacgctgcaaaaaccgaaaggtgtatccttgcatcgtatcctactctcatctgagcagttcactccaccaacattggaaagatgagtgcaagctgcggtatatagaagggaaaaaatccagattattctataccatatagcgttaaggttttatttggtacaattctcgttctcagatcatgctgaaattagaatttgtaagttaaattatagtggtttaaaattttatattgttctatgaaacaaaaacaaagcaatacattcaaatattatcactgtaatcgcatatccaaattcgtggatttctagagttaaaaacgcctagctcatacaaatcttcgatatgaagctgctagccctaaattaatcgttgaggcatgcacctggcactttggcagccgagttggactccactaaaaattagagaagaaatcttcccaatggctgccgaacaagtaccacaatctttgtgatttagctttcccccgtgcacatttggtacacgagcaccatcaatcaatcgagccagccgagtcggtttctctttctcccccgtgccaagctaccaaagcggcttcacgcaagaaaggaataacctgatgtggtgtggctccgatcacggcgccggcgccgccccagtcaccggtggttgttaaacctgtttttttaagcactaccacacctactaaattttttttactaaatttatactaacaatcatctcaaccgtttaatttagatagataaaagttataaaaactctaaagacactcatagcatgccaatgtcagtattagtaagaactaagctctgtcttaaattataagtcttatattttttaacacggtcttcaataccatataacagatataaaattagtataacatgaaagtacttcaaaatatgatatagtgatataacatgcataagtaaacttagtatagacatagtttatatggttattagccaaaagttattaagtttgatattttttagaaatgggacgccctataatttagaaatgggacgccctataatttggaatgcagacttttctcctttttcctttttttttctttttttgccgagtcatcagccagccagcctccccctccgcgtgagacccccaacctcagcgacgcgaccggcggtctcacgcgaaagcggactcgccaccacccgatccgatcccccgcgcgcaccgcgagagccgctcgtgcgtggcgttcgtcggttggttgggttcctttctttttgttggttttttcgcggtgttttcactgcgtttttcgccccgtggcgcacgtctttgctgcaacggcgaagggcgtgtgttttgtttttgtttttgtttagttttgccgcgttcgtcagaggagaggtttaggtgcgaccaaccagacctgaggctgcggctgcgcgctacgatacacgacggacgcggtctttctttgaagccctgcccagaggggagtacagagactctagtagcagtcgctctcgtcgtcgtcgtctcttccgtttttctcccgtcctaccttcatccacacctcggatcggtggatcgaccgatcgatcgacgggtggtggcacgttgttttcttctccatccatccatccatccactcggtggctatggcgtagggaggaaaatcacgaaaaagaggatcactcggacggattcttttctctctctctctcttttcttcttcttgttctacttctttgatcttcttcttctctgctgctctgccgtccatggtggtatggtggtgatgtggtggcgtgcaaggtgaggtaaagggggtgtggtggtggtcggctcggctgtttatccatccatccatggatgccggtgagggtggcggcgcgcccgccgccgccgccgccgtgtcgaatgggtttgttcacgccgtcgtgcggtggtgcttctctccgctcttcttctggctgttcaccgtcgctctcgtcgccgccatccacctcgcctccacctacatctctccctccaggtatgaatcgatgataagcgatttcaccagaatcatcgatgataattttgcgggaattctgaatttcttgatgtttttgttttaaattttgtcagagacgaagaggacaaggagaagaaggcgcggcgcggcggcgatttcgccggagccggggaggagaggaaggaggagaaggtgggaaggaacgacgacaagattctggagatgatgcggagcttcagcttcatgcatgcgagcgaggaggatttcatggaggggatggctacgtacgaccacgtcgtcgccaggatggcgccggagccgctgccgctgacgccgccggccgcgccgccgccgtcgacgttcagcttcaggttccagcaccagttgcccgagattctccgggagacggccgtggtctcgggtgaaatacctgtgcaagtattggaagaacacgagccggagaagaagccggcgattgcgatggaatcgaagcaagaacgnnnnnnnnnnnnnnnnnnnnnnnnnnnnnnnnnnnnnnnnnnaagggacaatcaatccagc

SEQ ID NO: 15753 - DNA, 13071 bp, Oryza sativa
  unsure (1)..(13071): unsure at all n locations
cgaagcaagaacccgagcgcgatgcagagaagaaagaggtggtcatggagnagaaggaagaagaggagcacagtananaggtcgtgaagncgncgncgncggccccgatgatcgtgtcgaccacgcacaactaccggttcttgacggagcgtgacttccgagggttcgtcaaggagccggaggccatcacggtgcgcgtccaggaatccttcgtgccatcgccggagctggagcggtggcggtggcggcaaccgcgcaaccggaggagcggcgagtggtcgacggggcgccacggcgcggcttcctcacgaccaacgacttccgcccggcgaacgagccggatagcgcgcgccagagcgtggcgtcgcagctggggcggaagccggcggcgagctccccgtccgccgcgtcgaggggcagcgccgccgccgccgtgagcgggaggacgagcttcgcgtcggagttctccggcttcggcggcgactccgactcggagtcaaccgccagcgacgggtactcggtgaaggacctcgtcgtcgactccgacagcgactggttcctctcggagaaggacttcccggcggcggcggtggccgggcacgacgccggcagcctcaggggctattacaaggccaaggtgctcaaggccctggaagccctcgacgcgtcggcctccaacctggaacgttcgttccaggactcggcgacgacggtgtcgccgggctcggtcgtcggccaggcctcgccggacatcatcggcgccgccgacgaccccgccaagtaccccgaggacatgtggtcccggagcccctcgccggacgtcgagtacaacgaagacgagcacaagggaaacgaggcgacgaacatggcggaggaggtgagcttcgacatgagcgacgacgagcggccgcccgcctccggcggcaagaagacgacggcgatggcagcatcatcatcatcatcatcaccggtgcacgacgccgaatctgaagatgagaacagcttggatcattcggagaaggaaaccatcacgatacatgatcattcgtacgaatctgtctccgatgtcaagaggaggagcccagaagcaatctctgacgcagaattggatgatgcctcgtctcgccatgctgctgttcttgatgccaaggtaagaagcccggacgttcattcatctgaacccatctttgacaattacgaagaacatgaggtctcaaatgatcaatcacaagcggcagtttctgatgagaagagaagcacaccgcattcggagagagaatttgctggtacagacgatcgctcacacgaactcatttctgatgtttggaaagatattgtcggtgcaaatgatcagtcattagcatcagctcacgatgaagaaagaagtcctgatcaatcggttgcgattatttctgatgatcacaaagcaattgtcagtgctacgaatgattcctcaaatggagaagtttctgatcataagagcaccccagagactgcagagcaggaattcagtggaaatgatgatccatatgaactagttgccgatgcaaggatcatttcagagcgtgcagaagaagatgatatcccaaatgagcgtccagggaacgccactcggcatgtcaccttctccgtcgccgagaaggggaaggtgttggacgtggtggaggaggatcaagaggacaagtggaaggatttgacggaagaggaggaggacgagctggagtcactgtgggagcaccaggatctgatcgagcagctgaagctggagctgaagaaggtgcggtcgatcgggctaccgacgatcttggaggagtcggagacgccgaaggcaccgatggaggatctcaagccatggaggatcgacgccaagttccttcgcgaggacccaatggacgagctgaataagttcttcaagagttatagggagagaatgaggaagtttgacatattgtgctatcagaagatgtatgcaataggtatgcacatttttaccattaccagtttacccttatttatctcagattctagtactaatatttagcactagagtacagttgctacttttgtaactatcaagcatagcatccactagctttttaaagctagttaaggacaagatgcagctttatgatgctttccctagcaaattttttgttcaactcaatgtcctaaaagatatatttttttggttgcttgaaattctgttgtgctaatatggtaccgcaattggatttgccgcagattttcttcagttcagagggcctcaacaatcggcaaattctctaaaatccttatcaccaacggtgacatccatcctgtctcacaatttccggtcgtcacgtcgaaaatcacccgaggacccgtcagaaaggtttctcaaggagctccggtatgacttggagacagtttacgtcggccaaatgtgcctatcatgggagttccttcggtggcagtatgagcaggcccatgacctgccggaatccgatccttaccacagccatcagtacaannnnnnnnnnnnnnnnnnnnnnnnnnntcaggtagttgtgcagaggtttgtggaggatgagtccttcaagggccctaggttgccaaactacatcaataaccgatgtgttcttcgaaatctcttgcaagtaccagtaataaaaggttataatcagatttcagaaccaaataatcagatagttcatccattgtatttctttatatcatgtgctagatgatttatttgaatgtgaatgttggattgcagaggacagcttgaaggacaggatggaggatcagcgtaaggggaactatgtcataacgagcgaggagctggaggagatcatggaggaatgcatgcgcgtcttttgggagttcatcaggtccgacagagtcgagacgacgtcggtgctcaagggcttgtcgagcactcatgttgagctccaggaccctttagaccatgatcttatgatgcacatcgactccacgttacagaaggtaaatcaccaaattttcgccagtaccgacaaaattgtggatttgctacagtaagtactagtagtgaaaatacttgctgcagtacatgacactgataagtgattaactctgaaatggatgcagaaagagaagaggctgaaggatctcctgaggaccggcaactgcatagtgaagaagttcaagaagcccaaggaggacaccttgaaccagagcctcttcttctcgcaggtcgacatgcggctcgtggcacgggtcctgcggatgccgaggatcaccagcgagcagctgcagtggtgcaaggcgaagctggacaagatcgcacttgtagataggaggatccacagggaggcttcatttttgttgttcccctgttgagaatacatatataaatacacatgcttcttttgttcatttttcccccctccataaatcatctccaccatgtaatccacggcttgtagatttttcttaaccttttagtaatccaggtctctttacacatgtccagtaaattacaaattgtaacatggtaaaacagctcataaaccacagagtccacacggtacagtacttacagtaccctagctagaaaatcagagtgtaataaatcagcatttcctctcaagaggaaacatctacctcagaatgcacagatttctactacatctgaagatgaactgtgttcatgtaactttgcctctgtctgtcaccacatggatgcaactgctgaagttgtagtactacggtatgcgaataaagaagcaataagggctttgcccgagcaaagatgagctgaatgcatcatcctcagttcttgctggattgtttgtgtgtgtatgtaccagatggtccatccactgcactgagatccacagttattgatcacttgtgtcctcttggtgaagatgaacagtgtgccctgtgctcctcttttttctgattgccacatgaggcaaactaatggcggccataaccggtcctaacaaccaaagtactgactgcaaacgctgcattctgctgctgcgtactataccacagctgagagagagagagagagacaaatcataactcgcaaagcgataagaaggaaactgctgctggggacctgggtgtttgctggccgccgccattatcagcaggaaatgcgagagtgaggctcagcatcgcagcagacaaaggtggatgcagatggaacaagatgcaaacaggctgtgcggggtatgcgagtttagagctcaacagcgaaagcttggatgtattatcgcttacaccatatgtctcaaaatatagcaatctagtatgaaatatgacacatcctactattgccaatatgtgtacatgtctcgtatccggattcgtaggactgggatgatctagtacaagattactacattttaggatggatgtagtatcattttatcaactttttgtgagcggtgagttgagtaagatgatgataacaaaccgtgtcaatcttgtttccggagaaaatcgattcgagaaatccaaaaactggttggatggcaaacaacttgtcaccgatcagtccaacttaacgatgttgacaacgaaatttctatccaggttactactatactatacgtctataccatgcccgattttacacggaaatatcacttaactaaaagcgatcacgatattcacataaagaagaagccaaatttcccgtccaactttgcattggacaaaattattcagatcaggtttcagtgcaagtgttcaactggacgtgacatttgccatcttttttcaaaaaaaataaattaatttgacttcttgttcagcagcctagatgaaatttgcgacacttgacatttgcagtgggatttgaagtgacacgacagcagccagacggcccacgtagatcctgggccatcccgatccggcccattaccgcatcaagcgaatcttagccgtccgtgctaggtcaagcctcccccggaggcagccatttatacccccatccgcgccgccacgcgctctctaccatttcctcctcctcctcctcctcctcctctagggtttatccatcggcgactacgcggcggcggcggcggcggcgacggcgagatggtgcagcgcctgacgtaccgcaaaaggcacagctatgccacgaagtctaatcagacgcgggtcgtcaagactccaggtctggatcttctctcttcttggggcactttttcttttggggttgggttcttgatctgttgaggtggaagatttttcgcctggttgagcgagcttttgtggcgttgtggttgcaggtggcaagctcgtgtaccagtacaccaagaagagggcgagcgggcccaagtgccccgtgaccgggaagaagatccagggagtgagtgcctgctttatcttgtctacaatgcatctttttttgtttgtttatttgttttggtaggatgatttcttgagtggtttggtgcagtggcttggtagaaatttgggataggccgatgagtatttctgttaaatgtagatgaattagtagcatttgttgctcgatcttagcgtatcaccgtgttggagtgctgatttatgatgcttaactatttatttagcctaggacctgataatgatcggacgttcttgtgtattgtgcatttagtctttttggcacctagaaatgattccttctggtggatttgattacctggcgattggtcaaccatttctgaaattttctggagaaatctacgcactgcatgattttcagcttggcatataaatgtagaacagctgacctgtgttttgtaaactgattgaattgcattatcaccattgttgtttactcatgtttcttttgctttgtttctgtgctcttaaatattgaacacacacacacacacacccctaatgcagtctaattattttttgctgatttgctttctgccacaagtatagtttgtaactatatcaattatatttctgtaatttctgtggggataacagtttttatgatagaacattaagatattattctactaatcagagtttgaacattgaactaagggtggtatatcaattttatcccttgtgaactaattccaataaaatgtgcaatgaaatcatcctatctaaatgcgtatgttcagctttaggctgtggcaatcactcataggcctcattgctgggtctatgaacagctttctcattcatactcttcgtcatggtttgtaacatgtactgtgctggaaaacatatatagttcctacacaaatctaatcactgaactttgtgtactatgtatgaaactgttggacttttgattgttgaatgtttgtcacgattagcattagataacacttgtgttgtgccatttttatcgtattattttactgtatgaggtgcattattttgactcaatactgtcgcttccattttcagattccccatctcaggcctgctgagtacaagagatccaggttgtctaggaaccgcagaactgtgaaccgtccctatggtggagtgctctctggaactgcagttagggaaaggtcagcataacatgctccaacatatccacatttgattataacatgtatcttctgtcacctcacatgattcatattgcctcgcaggatcattcgtgctttcttggttgaagagcagaagattgtgaagaaagtcttgaaaatacagaaaaccaaggacaagtcagcctcaaagtagacaactcttggaagtggaagcaaggcgatgtgctataaacaaggaaaacatttttgttgatggtgatgatcaatggtctagcctcttctagctgaatgttttagtataactgtctgagtttggagtacttgaaatccgtctaccattgtgatgcacttgatgtcaaatgttgctgagacatatttgatccgctcttttgttcacttctctgaattgcgaatgaattttacttacttgagctggtgttttgtttctactctgtctgtctgattgtttgtgcttctgtttcccctgaggacaatgaacgtatggtacgatatgatccatgcatttggataggcaaatctgcagtcgtaagccctcatattacgtttatcagccttctgtccttggtcagacttaagacgtatacagtactatatggtgtattttatagttgattaaactgatgtattgttgttgtcacagaagcgtcgattatttgattattttacgacttgggccgagtttagttacaaactttttctttaaacttctaattttttcatcgcattaaaatttttctacacacacaaacttttaactttttcgtcacatcgttccaatttcaatcaaacttctaatttttgcgtgaactaaacacacgtcaaaattaagtttgactaaaattgaaagtttgaagaaaaagttgaaagtttatgtgtaggaaagttttgatgtgatggaaaagttgaagtttgaagaaaaagttgggaactaaaccagccttgaaagtgaacatctacactaaattaatcaaaatttaaccttgtatttccaaaaaaaaatatttcattcactataataattcaaccctgtaaaaaaatatttcattcactatattaacaaactataataattcaaccctgtaaaaaaaatatttcattcactatattcaaaaaaaatatttatgtcaagaatgggattcgaacccatgccctttcggaccagtacctgaaactggcgccttagaccaactcggccatcttgactttgcatttatggcgtcatttaaatcttatgtaattcgttaaacttgaatccttaatccgacggacctcccccatgatttacggagtagtgctaccttcgtttccgaaccgggagttgattcattcgccagccatggcggatcgccgcgctctccagtaggttaccctcctccctctccgatccctttttctccccccctcgcgccatctacatgccgcctcgccttcttcggtccttcacccctatcgccgccggccacctttgngcgctctccgngttcgccccgcgcgcttgggagggcgcgccccacctgttcggcggaaatgcggnncggggcacccgaccttctcgcgcgccntcccgccgagctcgcgttattcgcccgcgcgcgcgccgcggggcgcgccgcgccgagccagttcgcctaccggaacgcgctcgccgcgtgcgcccgcgcccccgcccccgcgcttgccgagcaggtctactgcgccgcatggaaggacgggctctccgggaacgcgtacgtctgcaccggcatggtcgacctgctcgccaagagcgcccgcctcgggacgcgctcagggtgttcgcggacggggacccgagcagcgccgtgtgctggaacgcggccggctccggggcggtgcggaacggcgagggcgggctcgccgtcgagatgttccgtgatatggtgtggggctcgtgcgagcccaactcgttcacttactccggggctctcagcgcgtgcgcggcgggtgaagagctgagcgttgggcgggcggtgcatggtctggtgcttcggcgtgatcctgagtacgatgtgttcgttggaacgtcgcttgttaacatgtatgcgaaatgtggtgatatgggtgctgccatgagggagttctggagaatgccagtccggaatgtggtttcgtggaccaccgcgatagccggtttcgttcaggatgatgagccagtcagtgcaatgctgctacttagggaaatggtgcggaatggcgtggcgatcaacaaatacacagccacaagtatcttgcttgcttgcgctcagatgtctatggtaagagaggctagccagatacatggtatggttttgaagacagagatgtacttggattgcgttgtcaaggaggcattgatttcgacgtacactaactttgggtttattgagttgtcggagaaagtgtttgaagaagctggcacagtaagcaatagaagtatttggtcagccttcatatctggggtcagtaaccatagccttctgagatcagttcagttgttaaggaggatgtttcatcaaggtctaagaccgaatgacaaatgctatgcttctgttttcagctctgtaaattcaattgaatttggtggacaacttcattcatcagccataaaagaggggttcattcatggtattcttgttggcagtgcactctccaccatgtactctagatgtgataatgttcaggatagctacaaggtttttgaagagatgcaggaacgagatggagtctcatggacagcaatggttgctggttttgctacacatggtcattcagttgaggcattcctaacattcaggaatatgattcttgatggatttaagccagatcatgtgtcgttaactgccattctttcagcttgtaatagaccagagtgtttactcaaagggaaggaagttcatggtcacacacttcgtgtctatggagaaaccacattcataaacgattgttttatttccatgtattcaaaatgtcaaggggtacaaacagctagaagaatttttgatgcaactccacgcaaagatcaggtcatgtggtcctcaatgatatctggatatgctacaaatggttgcggtgaggaagcaatctcattatttcagcttatggtggcagcaagcattcgaatagatagttatatatgctcgtctattcttagcctatgtgctgatatagcaagaccattctattgtaaaccattacatggatatgcaattaaagcaggcatattgtctgatcagtcagtaagcagttcacttgtgaaggtgtactccagaagtggcaatatggatgattctcgtaaagtttttgatgaaataagtgtcccagacttagttgcatggaccactataattgatgggtatgctcagcatggaagtagtcagaatgcattggcaatgtttgatttgatggttcagcttggggtaagaccagatactgttgtattagtgagtgttttgtctgcatgcagccgtaatggtttagttgagcaaggttttaactattttaattcaatgagaactgcatatggggttgagccagagttacagcactactgttgcatggttgatttacttggtcgatctgggaggcttgcagaggcaaaatattttgttgatagcatgcctatgaaaccagacttgatggtatggagcaccctacttgctgcttgcagagttcatgatgacactgtacttggacggtttgtagaaaataagatccgtgaaggaaattatgattcaggttcctttgcaactctgtcgaacattcttgcgaattctggagattgggaggaagtagctagaatcagaaaaacaatgaagggtgtaaataaagaacctggatggagtatggtgtaaaaaccgaaatgcttgaggagatcagttataaacatatatttcatgagcagagatcggctataaagagagaagcacctttgccaaatatttctattttatgaccaagacattgcagagtatgttcatgattaaaacttctacaaaaattcttttttgaatgtccctaagctattctttattagcacatgtgctaaattttgattgagttggagtgataatattggggaaattggaaatgaacacccgttggttttatgtggtcctgctcatggaaaggacgttacagttatcaaaagttcccactgttgggagaactgggtttgtgattcctcttgctgtactttatcaactattcactttatgagaattttcatataatcatactcggcatatagagcacacccctaattctcagagtaagcataagatctttatagtacagtggaactcaatttatataactaagctattctttcctcagttaatcttcctttaatatgagtaactttcaggtataaatctgacttgatatatatagcatggtagttcttttgctaacaactgaaggcttctcttggtcttagtgtctatatgactatgtaacattttcctataaaatgctattgcacatgactgtaggagttgggagttaaggggaattcacatggcatattgatattgcttgtccagttatctgaaggatcacccaataaatcaaatggaaactttattttctgccggattccacattcactgcctgtactgtattcagtaccagttcttgtatatggatcctcatcactattttcaatgcctccatttgtgcctataacccaatcaacttcatatccattgcatggttcagtctgtccaaaccgtatgtttggcgaggcttcatatatgctattgattattccaggggttatgctgagaagcagcgatgtggcacctgacatatgctgcagggtttgtgttttgaatggtaaggtgactggacaattatggttgtctttgtctgattgatgagttaaagatggactgcacttgaagtttatgactttactagaagagccatcttgtctattgttgggcttctgctgcctcccctgcaggcactgctgactgttcaactgagttatcggtattgcaacttcttctgagcaagaggaactctctgaagcaaattgcgagcttgttgttgcagttgattgaggaccccaggggtgagataacgctctttgtgccatagagttaggctttttaaatatcttacaaatagcccagatatcctgtttggtgcagaaaaatattagaatgatattatatagttattttattttatttttttgctataactatatagtaattccagtaaaatactcactttggctggttttttatctattggtattttagaaagtgaaggctccgtgagtgaaggaagtctgaactcatgcatcatccaatcagtcttgaacccttttgctgctctccctttgtaaaagacaagagacttcttcaggcttatgcatttggttccctcggaagagtagatgggcctctaatacaagaagttaaaagaggaagagaggatgaactgtatccgagcttcatgaaacttccctaaatcgtcatgctttatgccgatacatgagaaagggagtttaatatatgctttaaaatgaaattacaactgcttgaacatgacaatgcgacccacaggtatgcatttacctccttgtattgagtagttctttattccttctctttctgaacgcacttgacttgtttgacaagagactttagtccctttcaatttgcacctagataaatgatctaggagtctagaacaccatgagcgaacattcgataatactcacgcatattatttttccactgtcatctcagtatccaaatgaaatactagtaatttatgttagtatatagtgcaagttaagcactcatcaacaattgtactaggcaccaatatttacaacctcaagattcttaaattctagatccagtggcaatgcactgatataagatggggaaaatcagcgggggcctcccctgctgtgttcctttcaaaaaaaaaaagatggggaaaattgttgacggtgtaaaaaagtactccttccgttttttaatagatgacgccnnccnnntnnnnntacatgcatgtcgactttgaaatatttattgactctcattcatcggaatttaccacaaggcctcggtgggttctggcattccatccggttaatttgacgaaccctgtacatcccccctttcacttatcggatttaccttccaaatgacctagctgcgccctacaaaccgccatcttaaatgaacaaaagctcggtccaatgtttatagtctttattagaactccctcttatgcgactcggggaattaatctcacgacgtccaagtggtcttttaggtacacatcttccggcctcccatgcgctgtacgacaccttccacttcacaatgggcacccgcccaatttatttgtcaaccccttggttacggttaaaccttaccctatccccaaggaacgccccctaatctttttttcctatggtaaaacatgtaatttgcaagcgcttttcaaaagcttcccctttttttttataccttctatgaacatccactgtaaactttgatacctatctatggttcgacaaaacattgtgtttgtttcg

SEQ ID NO: 15754 - DNA, 21129 bp, Oryza sativa
  unsure (1)..(21129): unsure at all n locations
tttggtatggtcaggacataatatctttcccttgtacttccaataaatttgattttgggcaaagagtacatcgtcattccttttcagaaaatattttctccactgtgaaaaatttcaaccaatctttagtgcaattggattcccccctatacttaagtgcgtgccaatagcttcatttccatccggcacctcccttccagctttaagtcataatgaataattttgtttaaaacctcctgcttttcttaataaaaattagcattttttacctacaactttttgttgaattccaggacattaaagacccatccaagtttcaaattgcctggtttttgtggatggagtaggtttcttggcgccaaaaattttatcgcttaagtgggggtcatcatcactttttttaaatatcaacctccaaaaacaactttcagccctttcacaaacaancacaaaaaacttttccacaagccaanccnncnnacnncccannannnncaacggcgtcatctattaaaaaacggatgtagtataagacagggaaaagtgtcaagggtgtaataaatgttttgtttgcattactgaagtggataataactatggaccatgatttacattcacatgtgtataatacagacattcaattagctaatatgtttcatactttggcatcacttctttatccatacacactaacagactttacactcccccaaatcttacaggcatgactgcatctaatgactgttacaacgatgtgaatggacccagaaagcaaacgtttagcatctcagtaatataatggagtcatcaacatcatttgtttgattgtttctcattgaatttaccagagaagtcagtaaggcagacagcagatcaatcatatcgaaaggaaaggacaatcagcgaatcagtatcatctgttgacacagatgatgtatgaacagccactgatagggaaaaaaaatcattgagccgacctgaaagctactcgcaacgattcaggaaagtacaaatgcatttgttatggcaattattgttctgttagtaacaatagatctatagcaatttgcatttgtgtagccgccatttagtctgtgaggtacaatagaaatttgagaactacaataccttctagagacaaagaaatatagcaatacggcaatgaagagagaagtttcagaccatattatctgaagcgtgtttccattagatttcataggtagaaacaaatgacacaagtcttgtaaactccattttcactagctctagaagtttccaaactactatctgaagaacttacagatagagctgtggatgttttttttatatttctacagaattgaggaccaaattcaacttaattggacagatacaagaaaggcaaagtcagatagaaagctgtttgtgcttccttttgtagattaaagttagatcattgcagatgagtacaaacacaatatatttcgctcgtaatttacttctgggagttacgggaaacatgaaattacagagaacagtaaaataaaggagaacccattgttcttttcaagtatctttgatcaagttactaaagcatatgcacaaagccgtaggctgatcagtcaaagccttcaagatgctcccaaaagctccttgatatcatacccttgcagctgaagcaattgaaagttatacatgtcagttacatctcatagttactactgcatgaaattaatatgccagtacatgccatctaaattctgaaataaccaagtaacataaatagacaatcatcagataactaccctattcatatgcaattctctgcaagttatacaactcaaccctatcttgatcaagaatgaatatgctgacaaattggagtataagacatacctgaagaaaggttaacagtaatattactcccgagttccaaaatgcatgtattgtgataggagttagaagattatgggtttgagcatatgaaaaacccaacgcaacacctgcataccaatcagaaatgttatggaaatggaataataatctcacaatgtaataaatacttcgatagtttccaaaagaaaatcactggtcataaattgatcatagtatcacactgagggtttgcatctatcatctttctaacaagaggtcacaaatgcaagacaccacgaggcagctacactttagtgtgatcaactttgttgataaccaaatgcattcatgcacttcgccaaaacacggaattcacagggtttttatatcttatttctaaattgacatataaaattaccaagtataaacaactgtgggaattgtccaggtgtcagatgagcaaaggcaaatagagcagcactgacaagtatgcaaactggagtaggaaacctgtatacaaagcaaactgttaaaaacaagcaaaactgcaaactgtacataccaatttgctatatgcaagcatgtgaaaggaagctactaaaaagagctaaatagtatatgtttgtttaccacttagtcaaggacaccattaaaaatcctcgaaacacagtctcctccagaattggtgctagaactccagtaatgcccaccagaaaagcagtgctaataatatattaaaaagttgaagacaaagtcaggttatgactgccaggtataaaggcataaacccactgaaaactggatggatgatacctggcacttgatgagccgattaatggcaataaaagaactaacgagtcagtctgaaaaaaaaagtccagagaaatagatcagcaatcaggactcaagaaacagcacactgaaaaaaggtaatcagtataacaggaggtaagtacacaaaacatgttgagattcaatttggaaaagcgtaagcccctatcaatgtaaagtgaggccttaccacataagcttgtcagtcaaagcattgaataaaccttgtgtatgaagcttcactttatcaaagggtgcattccatcttaattatgccgcaaactgttcctaattatgctgtctcatctcaaaccaaagagaataggcatatttgctaattcctatgctactcatggaaaacctatctttctggcttccctaccatctgaatcttgcacaagtgaccatatgatagccttgagttgtcattgtttaatcacaatcagcttaatccagtccatacatgagaagattgtgattagataagacctagggtcatgcaaggcaagccaaaagggttgggtaatcaaagacaatggtctaatacaaattgcatgaattgctccatttggcatattgttataggttattgtttaatgaatattaagcggtccaagatgtgttttttttcttgctgaacaaattgaattagaggttaatgatgaatgggattaaaacaatgtgagttaaaaactaaagattgagaggtaataattaattaaatgggaataaaattgtatggcctgagaaaaatctatatagtacagtatgtaaaaggcctgacctctctttctggaggttcaccattcagataagtcatagcaaccccaactaaagcaatagaaattatagcgccaaagagaccaactccagcccacagaagccagccattttgaagcttgaatggttctttaatatctgcaaattcagcaaaagttgctagttagatatgcttatttcttattcagaaaaagcagaagttgtaaaacaaaattatccatcatgacttaagcatgaaaggcagtgccgaatgaaaatgaggctatgccacgcacttagttatagggtgaatccaattgcactaaagaattgtagaaaattttccacagtagagaaaatattttctgaaaaagaatgcacgatgtactcttcgcacaagatcaaatctattgtaagtaacatggaaagaatatcatgtcctgaccataacgaaatatatcatctggcagtggtcggaaggtattggtgatgccatatacaacacccagcacaactgctgtcacgctactgcttaagacagtgaaaagaaaatgataaatactttggcaactgtcaaagtatccattgtttgaagaatgcaaaaaaaaaaaaaaacagcaagtgcttggattcgtacagttgtccaaggaaaagtatttctgccttctgatctaccgttgcctcgacagctctaaaccccacatacgtcaaaaccgattgctcaaccaatcctgtcagaacaaagctgtctaaagaacattcagaaaaagctttcttcaatagagctgtcgatgattgaatacactaaaatactgtaaagagcaataaatttgagcattatgtatctgccaattctaagttatgaacatatggaattttcttttcataattagctccaaatccaatactatgtgcagcattgcaatagcagatagacatcactaaaacactaaccagcatagggtacaaaagtttaggagtaccttactccacagcccaccatggtgagcaccaccgtctgccactcccacggcacatcccatcggcgaaggattggccattcgtctgaattctgctcacatccaaattatgtcacaaaatcttcagcaagagaaaccatcgcaaaagagaggaatacttacatccaactaaactagacatgttttccatcataataagatactcctatcaaatgcacatttgccattctaccgatgcatccgtaaaaaaaaaagaaaaaaaagaagaaagaaagaaagaaagaaagatcttagaggtgtgttcttccaagaagctactagtatttaaattcctcaaaatctgaagcggcggcggcggcgtagagtcacctcactggaaggcggaggcggcttattgccggagttgaaggagaggcaggcgtagcccccgcgcctcctccaccggccgatctccggcgaccggagccaccgccgctgagctcttaccgccgccaggcagccagctcttggcgatggaaatggcctccgttgcctggacaggagtacggctctgcacgggagcggccggagcaggtgaagagagatcgccggcgacaacgccgccgccgccgccgacgacgaggaggccgccatgagaaggatgcgcttctttgctctcagctcgagtgctcgctggctcaccgaagaagtcgcacgtgtccttcgggataaggtgagggaccaatttgtaaaactgtaaaagtacaaggactaaaataaaaatcgaagtgataagccttctccggaattgtgtataggttcagggtggaatttgcaaaagtgaaccacaccgcttcttctccatagtagagagggctcttgcggcggcggcgatggcggcgacggcgagcacgtccggcgagtggctgaagggcgcgctgcaggagctgcgggagcggatgggtggcgcgctggagctcgacgcggacctcatctcgggcctcgtctccttctgcgagctcgcgcctccgcccgacgccgctgactacctcgcggtccgtacccatactatccatcatcccccctacgatgatgcgcagctatgcaggggttactctatttaggttctgatcggagatggttgtgcgattgttagtttgtttggtgtgtcgcgggtggcctgatctgtgcgtgcgcctttgtcgggttagggtttgtgagatttgatttagcgatttctagggttaattttgaaagtctgatcgtcggtgtgtcgcgatttttggtgcgaagtttgatgcgttgtgctgcttccctctttggttttgggatttctgcgagttattattgcaaagggaggataacatgaatacttaagcggggttagaaaaacaatgtatggctcatggatttgttagagaatagagaagggggatttgcaattatgatactattagaatatgatgatactattatgaattataccgtgatgaatgaaactctataacctgatgcgtcactttaagtttaagcacgatgagtgcattagaacagtcttttacctaagaggtgtatctgcaatctcggagcagcatggtgcttgaattgttgagttagctgtgtttctgttcagttgttagtttgtatccatgtctatttatgcggctgcaacttttcatcaaagacataattgcagaacttgtgtgcaatgatacctttttttttcctagcaaacatgtcactttgaattgaaatttgaaactctaggcttgatcacgaatttacatacccctgatgtgcatctgcaatgaagttgaaaggactatgaccaggaatttacatatccctgatacacatctgcaataaagttgaaaggactatcttgtgtgttcagtccaaaaataagatgttcctatctattcctcctagctttctgttctcaactggacatttggtgttcgcgaggatttttagttctattttctttatttgtttcatattgctcatcttcgagtgacagtgcttgccattaggtaaatattatgcatgaatgcatctgaaattactgttgcttagtcctttgtcctttgtctttattcttcatcattgatcatggtcagtgtaatggtgcagaatattattggagtagaagctgctcaggaccttattcaggagtacttgcagaggaggggttacattgatccattgaagggcaatgaaaacctacaatcatcaaatcttcagccttatgtgaagccttctgctgaagctgggcctacccaaaccaagaagcagacacgcacacaaaaagatgcagcagcatcttcttctggccagagttccaagaatcaaccagagactactgaaccccgagttgcctccaagagaggttcaaaaaagaaagcagtaaaggccatctcccttgctgaggcagcgaagggttctattgtcttcaagcaggggaaaccttgttcatgccaagcacgccagcacaaccttgtcagcaactgcttatcatgtggcaaaattgtgtgtgaacaagagggtgagggaccatgcagtttctgtggtgcacttgttctaatggaaggaagcacatatgctggtttaagtgatgttgaaattcctctttcggaagcagaagctgaagctgaagcatatgcaaagaggcttgttgactatgacagaaactctgcagcaaggactaaagtttatgatgatcaaagtgactactttgaaatggaaggaaatagttggctttcttcaaaggtaaattttatatttgcattcctatcctaatgactcatttaaacacctttttactgattcattgtgctaaacagccttatagaatgttcctgttgtttatttatatgtgcacacttcacccaatcctgcctgcaaattgttttttcaatcagaattgctggttgcctttttggaggacactaatgaacatatactacaaaccttggagaaaacagcggcactcttaattacatcttacgcttgaaattgcttgcacaattggcatttgatatatcatcatatttatatgataagaacatataacttgacgggatcagacagcaatttactgtgcaactatttgagatactagcaaatttgtccaaccaaaccatttggaacaatgttaagtaagttctcaatctttcttgcttcaggaaaagtcagacctaaagaagcagcacggggaagctcaggaagcagctgaaaaggataaagggaaagtggtcgtcacatttgatttggtgggccgcaaggtaatacaatgtcgttcctgtcgcacagcatctaatttgcttaaagctctaggcaaaacatttggaagaggacgtaattttgcaactgtttccgacaggtaattttgaacaaggatggagccaccgtgttggaatccgagcaccggatcttgggaccacctgaagagaaggatcagatccaccgcatacaagccaaccccacaatcagagagcagcccgtgttcatcgaaacagggccagtgaagccaaaaactgacagagctcgacagagcaagagactcaccaagaatggcctgtgcctggaggtaactgggaggctgcagcacgatgacaaggacccccagagcttcctgggtggcaagatgaagaagggtgatcatctggcgtacagttctttcggccaaccccgtgaaggggacgacttcgactgctcccaagattttgattgagcctaatttgcttgtggatggtgatggtcgatgggtgccttccattgtaggtatgtcatccccgattttggttcatactggttgttgagttctcagcttttacccagaggaggcaaaatacagaccaggctgtagaaatgctatcatacacatgaacacatccatatatacccatctccttttttgtaaggataccttggaacctattgaaaatgtgagaatggcacatttggttatctcttgttgcccttacagttccttctatcttttcttttgggaataattgctgggtagttgctgttaacccgtcagaaaaatcatagtactacataggaagaacagagagatggaaacaaagtcgagctagcaatttggcctttctcatctggaaagtagctatcaaactgttgttttcagcccattcgatctttgaaatgggtcttcaagacagtggttgatcaggcatagcccatccatgaaaggaaaaggtccctttgtactccctcaatcatcagctgaatccaattattatccttcaaccacaaaactggtatatcaactctcacaagatcgggttgagagacaaatccgagattgaagatcagattcgagcaatggtagaaaggagcgaaaatggacattttctttcatgaagcaaatcgcatacaattgttgcgatcaggcccaaaacattaggccatgctctttgatgagccaaaacgaggattggccagaaatttggcaaaccaaatttggccatgtgccagcaacacacaccggatattatatagcaccttcagtataactgctgcccattttgttacaagtcctactccttccgtcctgaaaggatatcttcgtttgggaataaattaaattaatctagtataggacatgacatatactaacactacaaatctgcaataagttaatatggtacaagataagacatcctaatacatcaggtacattcagattcatattactaagatatatcgcagattcataatactaagatatatcgcatcctgtatcatattaacttattttgagacagagataataccatttttctcaacaaagttttgcactagcatcagatgacatgagcaagtagacaacgagatgggcagagaagaaactgcacttgtagagtgcccgttccatcttggaacaattacagaacacttaatcaaagtagcgttgttgctttatatacacaccacgttactcccgggccgacaagcaaaacgcacaagcgaaatccggagcgcaaactgggagagagacaccaaaccaaatgcgcctttacactctctactactagtacactggcacacacacgcgaacaaatgtatctgtggtttctgcacttgacagtagcagcagccgtcgatgaattctagccttgggcgattcgagcactgcccggctgcagccgaccaagccactccttcaaggctgtggctcgtgctgcggtgtggtcggcgaatccggtgcaatggtgaaatgcactccggttccttgcccagactgaagaatgaatgccacctcagttgctgctaaggcagccgcctcctgaacaaacatacattgaaacaaacacttgaaaacaagataccccgtgaattaactacaatccagaagctaacaaatattattgaaactaatgatgctcaaatatccattgcattatgcaaaaactatgttaatgaaagcagttcaaaattttccgtcctaagatattcgaatatcccccaggatcagtagcctaactagttctatgatctcacatatggagaggaagagagcagataaaaactaaaaattcaaacagccaagtagatcaactcgaatgcaaatatctgaagaacaaggcaataacaaataaaattatcacacattccaagttctaacaaatttaaaatagtagaaaataatgtaaatcacctgtatgataacatactgacctgtcgctgtctgcggcgctgcaagatactcactgcccaagccattatatagaatggtagcagaaatccagcagcacgcaatagaaaaagctgtcaagtaatagagcatcaataccaacttctaatgatgatgtacaacaaaacaatgataaccagatagttaaagagcattctttcactcactgaaaacattgcagaagtatcatcgtcatcttcatcagttagagtcagcgcatgtctcaataataacagagccattaactgaacataagcaaaggtaaataaacaagaccttccattacatgtgcaatcaatataaatacatctgttgtctcaaaaaatatataaatacatttgtggcgcagaaattaggaactcacaactagagcagcagagcgacaaaaagcagcagtgctggcatttgtggcagagtaatcatcgtattcagcttccataatgtggttctgtgcaactgcaaggatcctaggatcacgcaagtcaaatgcagtaccagtaatggtccagccaccactgtgcattccaaaagaaataggttgcaattagcctggaatactacaaatgacaccacgatataatatcaacaagaacccatgtcttcaatatagaaaagcatgatgccctacctgatgtcaatggtagtttcatcaggatgaggcctagtaggtgcagtgtaaccgtgttcatatggctgcagtaatgtcattccaacaggtcaaattcaggattgctcctgtggaggaaggaaagatgaatcatttgaacataaattcacctcatgacaaatttcacacgttacatctcctttctcattgcaccatcgttgcacacaagcccgatgagcatactgtatcacaaaactaaaaatgtatgagcaatatccacatgcggtatctagggatcataaattcggaaacttatagttacataaaaaaaatcaggagcgccacagcaagaacttcagttgcagttgtggatatagccaggataaaaacaggtgtggatacaggtggaacagaataggtattgcttccaccttttacacattatataatacacaatgcaaatatttgccaacatactgggatatggttaaaaaagaaccattagtagcatcaggaaacttgtgagctgtttctcatcataaatgagattttagaagacatgctgagatgccgcaactaaatcatgttattaaggtgagacttttttcctagtagactatgacttgttgcctacataaccagaagaatctggcttgagacactgcacatttcatgaaaagcatgtcaaatatttgatacatgctaaaaatgtgaaacagttcatagattgctgcaaatttgagtctccatcttgtcagcatatatcaacattcagttttcatcccctaaaaaagattcagttttcaaaaacaacccatctaggttaaacattcacaattgcatattatccatgaatctatcttcaattttccatgcacgcggtctgtggatagaaaagaaaataagatcctaagcatggcactgaatttacaaagcctgtcaagaaatttggtgccaaaagatatttatactatgaaagataaacagtataatgtacagttccggtgcagaaattaggaaaaaaaatcttaatgggtatttatatgatgattggtgaaacaatacatattaactgaaaaaccaaataattgaagcattccgaaatgggtggtttatatgtatctcctgttggatatttaattattttcttcaagaggaagaagtcaaattgcatttgactactagttggtcaagttggttgcttgttgctgcttgaagtttctagcacaaatgagtgataataggttcaacaatacacaagtgattgtatgctttgttgtgttggcatggaaggatacagagcaaattttactagctagcaccctgtattagtagtttcattgctgcttgagcttggtaagcagacaagcagcatgtctgtcttggtagcaagccagttttgagctattagatgaggtgtaacatgagctgtaagtagcagcccgattactgtagaaaccgacctgtgtaaatggtgtcttggcttgtgcaatatatgaagaatactatagttcatgcacctattcttttatcctagtattagggccaacatctcctagagacctagaccgagtcaaatcaagggcatactaacacccaatctgccaatctgggaaacaaaaaggcaagaacgacaacaataatatccagccaaccacactttgctgtgaacacgaaaatacaacaaacagaacctaacgagacgagttaatcttgcctaatttcatatgttgccctttaaacagagatacttgaataaacacttgcaactaaaactggagttcatgggataatgtttgaacctttagactgccagtacaggcacatgggctctccagattttttatactgtcttcctcctgacaaatgcgacattccaccaactgcagaagaggttcttcttcaggggccatgctttctccaactgccaaaaaggtatgcactgtagtgggtgcctgcgcagcggcttcccctgatgaattcttggctgccccagtggtctcaaagcattcaggcgccattagatcatcaacatttaccattagatgatccttcattgtttcaaataaaaaaaactactccaacaaaagaattctttacaaatcctatgagatccgctcaaagttcataatcttagttgctagatcaggtgtagccccctgctgaaaaagtgaaaagaaaacaaaagggttcaacaaatgacatgattaattagaaaaacctacacagaacgaatacaagaacatgaaacctacagtaggacagttgcgaagcagctcacagaaatttcttattttcacaaaatgaggcaccaaagtccttggtacgagataaatggggcactaatgatttgagctccacctttctgcatgcaagttcctcaatcagcaaatgttgcagcagaaacaggaattattcatagttcatatgtcataactctcagttgaatagtaaaaagatatataaacgatgtttccataacatcaaaagcaatgcaatgctaaatcagtacagataagataagtccaagaccacacataatggtattgctcagcttatgcaaatggtaacacatgtcccagcattttaatgcgatgagtcacaagtgtgcttacaaaaagaacactaaactataatccttataattccctaaagatttgataacaaaagaataacaagaacgagagtccaccctacatttcgtgcctttgttattgtctctattgtggtataattgctcgggaatggaaaccagtgttctgcagctcagaacattatgcaaatgcaggattataaatgcaatttacaataattacatctcagaaatcatctcaatcctaaatttatatggaccgaaaccgaagataactcagtataaggttacatgaaaagcatatccatgacaaattaatatgaggtttccaagaaaaagggtacccttcttgcctcaggattgatgaaatggaggtttccttccgccaccaccctcaattttatcaaaccagaggaaggaggcaaaaattaaaataaattgttgccatcgtacatcgcgctaccaagaaattacaaatagaaaaatagtcccaaatttcatggtaaacctcgagccaaccttcctaccaatcttgctccacgataaatgcacatgggcgtgcccacccaaatccaaaataccaaatccctcaccgcgaagcaccgaaaagcataataaaccgacgaaattaccctctcccaggggcggatccggacatgggggttcaatccagttgaatccccatacttttgggggtggaaatcaaacttttacttgtaagtactaaggttaatgctctgaaattaagaggaaaagcttcttccagatctagaagaggaagctgtagggttaacgcacgcaaagcaaattcgagacgaaagcgggtgggggagagagagagaggatttggatgctcaccaggatgcaggaacccctcccctgctccggtcgcgagattgaggatcggcgccctgctctgccctcctcgcgagatggagatcagcgctggcgcatggagcggagacgagacgggagtttttcttctttttttttttcttggcacgcgacgggagtttttcttttctttccttttttttatttacgcataagggacagcgacgaaagatttcctttttatattttaaaaaaaagtctgtgtattgcaacgggtgaatgctattttaatcttattattgttgtacggtttagctaagatgaaattcactttgggaatttgcttagattttttttagaaaatcatgaacatcaattagtagtccaactttcatatcaagtaagcatgcggattttttaaagggatttcttatatgactccttttatattttcaaaagcaaacgaatttaaaatccgactcaaacacgaatgatgtaccaaaatattaacaaaaacatcttcaaattttataatagtagagatactaatgtaatactatctcatccgaattaatatctaaagtgtttgttttttggatgtaggaagtaaataaattataggtttgtctaaactattgcttattgcttatgtttggtaggcttggctacggtgcaactgtagccagccgctacagtccctgtgtgtttgttacaaacttatagtgcccgctaaaaatgttacgtacagcgtgacggtggtcaagcctactaaacagcacattattatgtactccctttatctaaaaatatagcaacctataattgattcatagtaataaaatatgtctcatcgggtactaggttactacattttataacggaggtagtaggtgttattttgaacaaccttatttcaaacttttcatttaaaaccaactgttctttataatttggactaggggcccacctttcggtggaattcggttggggatgggtgcagacaacaaactcctccgccacggatgccagcgacacccactggctaccactcttcacatccacgcaccaccaccgccgctccttctccatgagccatcgtcattcctcctctgcacccaatcgcacacattagccaccgacatgtcttctcttgcctcccatcgtaatgcacgcggctattatagtcattgttgagatcggtagcaccgggctagtgaggatttagagaggcaggaactgacctagtggagagtggggacgctgattcatgatcctctttattggattcaatggttcccccagttgctggagagaagaaagaaagatgagagatagctagtgtgtggagcgatgacagtcattggacttaggtggatggattagatgagggtggtctaagttgaaataaaatgtaaagttagctggtgttaagtaaaaagaatggttgaagaatggtctaatttgaaaacttgtaagaatacctagcccaaatagcaatttacacttttttttcagcacaactaaagggcatgttcaatttgatgcatttttaaccataccattttttagtaaagttgtcaaaaaaaatgtctacatttagtttgttgtcaaatttggttaatacataagaaatcatgtcaaaattttagcaatattggcatcttgccaaagttttggtaatattggcatcttgctaaaattttggcattgcaaaacttggtaaggtttattttggctacaatctgaacaggcccaaaattgggttgtccatgagccgacgggcccatgctttgctataccaactatagttttatcgtgtctagatggcatggttgggctagcctatttaaacagaatccaccaaatcccacctccgaaaatcaacgtcggcataccgcttcttgcatagaatgccatcatcctcaaccctaaggaacccaatcgcgcgaccacaaatccaacatccctacaacaatccaatacccaaatcgcaccacgcgctgcaagaaatcggtggaaacgaaatatggtggggagggggggagaagagaggaaatgaaggggaggataatttttacccaaggtacaactttagtgcgactccggagcatagtaaaaaaagagatcggcccgacggttgaaccgggaaaaaccagaaccagtccctagcatggttcaatttgtagaaaagatcgtctatgcatatgaaccagcgaaaaccggttagaccggatggttttatggtgaaccgtcttaaaaaccaaagcgagtcatatcgtaaactgtactagctacatagaaaaaaaattaaattcttggttgggcaattaagagtcaaccccaaaccttttgagaaaggatctgcatgcctatagagtatctccaacatgttatctaaatttgactctttacatgttcatttggccaacttgccaaaaatttggagagccaaatttatctttcaattcaacatgctctccatcatagcaatgggacccacttgtcagtgtctatctccttctcccttcttttctctgcacaatgctcccctcctcattcctcccacctaccaccgccgatagaggcggcgaacattgaaaccgctattccctcatcgattcctacgtgtcgatagcaggcgagcggatctgacggcggcagaggtgtcggtgaaaaacagtggtgacgaaaatgggcagtgacgacgaaaattggcgatggcgatggcaacattggaagggctagagatggggacgggggcacagggaggagctgcgtcaaggaggaggggcggcagaacaaccgtcgagccgccatcgttgtgccctgttcgtcgattcaaatcccatcgtgggggaaggattaggatgagaggcggcgacgcttgtcagctctgtccggtggggttgctattgaggaaaaggaggtggggtcgctgccgctaccattgcacccctctccaccgatcgacggacgcggtggacagagaggagaggcggctccgatgactgcataattgtggcggtggtggcggcggtggggggagaaggatctgaatatgtgacccacctttggcaagccaagaaggcttgctagatttagccagtcggggggttgatttggcaagcaggacgacaaaatctgttggagggtgttttttctcttcacttactaaattttagcttggagagtcaaatggccactctcttggagatgctgctcccacctaaccaactatgcaagaggatcttgtaggtgaggatagaaaaaactactttgagagtggattacaacttaaaaaataattaacaataaatcggcggttcgactggtggaccgatgaaccgacatgctcaccaggtgagtccctggtccatgtttttccaccaagttctggaggcctcatccacaatcttgctcatgggcgtcactaggcccggcgacatccggatgatagtagggtacactagccagtggaggtcacctggcggtgtacctgtctctagcagatatttaaaaattaaataaataaaacgccattttggagtgttacagttcaaacgcaatttaggcccggacagttcaatgtggcattactcctatggtagaacaacatcatggttttcactaagcaagtaaaatgcccgttctttcttttctttctaactcacaaaggaacttggcttttatttaagcctccttgaagcaaaggtcttctgaaggattttcataagaattgaactaaccccatgaaaatcctgtaaaattcatgagttccaaaggagccttctcatgacgaaatacaggatagacaaataaaaaatgaagagtgaccaataaaacatagtcatcttcattttacaagggcaatgcttggttggatagaatagagcaaaactatatgacaggctctagaccgtttcacacaaccaaacgcatcatcaaggaaaagaatgcacgaaatttgaaagctagtcagcatcatcagtaaataagattgggtcaataggttcacattttctcatgttgagattcaattcatggagaatcctacaagccccatgaaattcagggcaagaatcatccccgaagatgaaccgatgcacccgtcctcccacctcaacacaactctctcccgcaaccttcttcatccctccttccctcatcaccctccttgccttcgctgcctcgtcccatgatccaatttcgcagtagatgtttgaaaccatgacgtagttcccgcttctccggggctctagctccagcagtttgccctgcaccttgtcaatgatctcaatacagtccttggagctatgcagctggcaggctgccaataatgtcctccacacaactgggtcagcctcgactggcattcctacaacaaagtcataagcttcctggagaagaccgttgcggcctaggacatcaaccatggcgctgtagtgcgtcatcatcggcacaataccataaacatgctgcatttcgtggaagaaccggcgcccctcatcaaccaggccagcatggctacatgcacaaagcagaccaagaaatgtgacataattgggtatgatctttgagagtttcatcctgtcaaacagctccagcgcttcctgagccaaaccattctgcgcaaaccctacgatcatggcagtccatgtccagacattcctcgcgggcatcctctcgaacaagcgcagggcataactcaccgtggcacacttggagtacatgttcactgccgccgtcccaagctgaagcgtcatgtccagcctccgggaaacaacctgtccatgcgcccacttgccgagcgccaggttgcccagctcggccgcggcggacagcatgaccacgaacgtggtcgggtccggcacggaaccagcctctagcatctccgcgaacagctcgacgcacagctcgtggcggccgttgcccgcgcaggcggtgagcgcggtgttccaggacacgacggtccggcgcggcatttcgtcgaacacctgcacggcgcgctccagttgcccacaggccgagtacgcggccatgagcgcgttcgggacgtacaccaccgcggaggcgaggccgtccttgacggcctccgagtgcacggatccgacaacggggagggatcccggggcgaggcgcgcgagcgccttgaggacgtgcgggagcgtgtgcgcgtcggggcggagacccccgcggcggaggcgaaggaagagggcggcggcggtggaggggtccggcgaggaggcgagcgggggaaggaggaggttgaagaggtcgagggatggggaggggagggagaggaggagacggtgggcgaggtggaggtggggattgggcagcgaaatgaggcggcggaggaggacggggccgagggaggggaagcggccggaggtgaggagatgggcgtggatctgccggagatgggggacggtggtggcgccgccgccgccggcgatgagggcgtggaggtggagagcggccattccatggaggttgcgcggcggcgcgcgacggccgacggcgatttggtcgtgggggaaagcacacgctgcggttgctgttgggcctaacgggcccggcccgctcgatacttgcatctgcatcttttggaaaaagtacagcgaaggtccctcaacttgtcatcaagttacaaaatcgtccttgaactgcaaaaccggatatgacgtatcccccaacttataaaaccagtgtaaaataggtcccttggcagtttaacttcggttttatccgatgtggtagctgaatcagcgtgggacccacgtgtcagcctcttcttcccctcccctctccacctctcttcctctctccttccctctccacgggcagcgcccggcgaagaggagctaggcgcgggcgcgcggcaggccagtgcggcgggcgcgagcaacggccgacgggagaggagttgggccacggggtagcgggtgctcatcaggcggaggacgtcgatcgatggggatggccgcgccatggcctccttggctatggcggtccccatgaggccacaaacgacgatgactagaagggtagaacctgggaggaggtcgagcgcgggtctcctcaagcgatggcggcaggggctcctctctctctctcttcctctcgttcccttcaagcccatgacttcctcggcaagctcctccagccaccagccctcgacgggcacggcagcggtctcaatgggtggactcggcggagggtgtggtgtggacactgctcactctcctccagcggacggggattgtggcggcgagcggggtggaattgaaggcccttcaaagcttgtttggtaactcgagggaaggggattgagagtttacacgagagaattgataatgagattaagatgggaatttgatttttaatcccaatatcttgtttggtagaggttatggaaattgatagggagtttagttggagattagatcattaataaaaatggatgactgagatttgcttagattaagtaaaggaggaattccctcccaattacctgctcctacccacgtattgaaaaggagggagttccttcctcaattccccatccccatccccatcccaccaaaattcccatgtctcccaaccaaacaaaacacttaatagcctcatccctctaaactcccaatccctcctaaaaactccctccaaccaaactataggcgatgtgtttggtgggtcaactaggcggaggagacgatggggaagagaggaagggatggccaccaccttcccgcgcgctgatccgccgcccgccggtcgcgcccagctgctccccccgccgcctgcgcctgcccacgcgctgctctgccgcgcccagctgctcccccaccggccaccacccatgcagctgctcacccgccgccgctcgtggagaagagaggtgagaggaagagaggtagagatgggaggggaagaacaggctgacgtgtggggcccacgtgggttccacgct

SEQ ID NO: 15755 - DNA, 747 bp, Oryza sativa
  unsure (1)..(747): unsure at all n locations
gcgggtncnnattgagttcgcccgcgtncgnnnnnnnnnnnnnnnnnnnnnnnnnnnnnnnntataaaattaccaagtataaacaactgtgggaattgttcaggtgtcagatgagcaaaggcaaatagagcagcactgacaagtgtgcaaacgcgggtcccataaatcggtgcgcacgctgaagtcatcgaatcaaagtgggttcgctatcttgggactgcagtagtcaaacacacaatggagctgctctaagggctttcgcagtatgcctaggtggtgtttgtcccgatttctcacgtcggagattctagtctgcctctccgttaccaaatgaagatccacggatcccttgaggcacgttcctcgttaggtttgtcgcaacaagacagggcatggctcgcacgttgcattagaagagggcgttgccctatgctgatgaggacatactccactattacccgctggcaaagacgcaaaaatcgggcggcgaccgtttgagcctctgaataatcccaccttgctttgtttagcttgggaggaggaagccaccttaaaagggagagccaccctttcccctatcggactagtcttttagggagattggacctttttccgagtgggtgtgcctatgaactgttggggtccgggcaaccttaagttattgggcctcggcaaaccccacctgggccggattgttatcctttggtatcagagcttggccctttgttaaggnggtgggaantgatg

SEQ ID NO: 15756 - DNA, 698 bp, Oryza sativa
  unsure (1)..(698): unsure at all n locations
gcgggaatttgatttgtatttgtanaacnnnnnnnnnnnnnnnnnnnnnnnnnnnnnnnnnnnnnnnnnnnnnnnnnnnnnnnnnnnnnncggtcatcaagatcgataagcactccgcgcttaaattcatcaggggcatcactgctcggtttggggtgcctaaccgtatcattacggataacggcacccagttcactagtgagctcttcggtgactactgcgaagacatgggcatcaagctctgcttcgcctcccccgcccaccccagaagcaatggccaagtggagcgcgccaacgcggaaatcctcaagggcctcaaaaccaagaccttcaacatcctcaagaagcacggcgactcgtggatcgaggagctgccagcggtgctctgggcgaaccgaaccacgccaagccgagccaccggggaaacgcctttcttcctcgtctacggcgcggaggcggtcctcccatctgagctcaccctgaggtcccctcgggtcaccccatttcgcaatgcggccaacaacgtctttgtttctcacaacttcaccaagaggaaaagaggagacaactgtgactctgtgggcttgaaaatagtggcgtagcttccttgatgtcatgatgactgcgtaaagcagcttttggatctgtgggtatcttgtctttgcgtcgtggagagcttcgctgacgtaataaactga

SEQ ID NO: 15757 - DNA, 1374 bp, Oryza sativa
  unsure (1)..(1374): unsure at all n locations
agcggnnatgtanttcnnatgatataacactcaagctatgcactgagagatcccctcataatttccccaaagcgtaaccatgtgtgaataaattttgagctagtagggttgcagccacgagtaagtcttcccttgttattgtgtagccagaatgccgcaaaacttccatgcctaagcgaactgttgagagtacgtttcgatttctgactgtgttagcctggaagtgcttgtcccaaccttgtttctgagcatgaacgcccgcaagccaacatgttagttgaagcatcagggcgattagcagcatgatatcaaaacgctctgagctgctcgttcggctatggcgtaggcctagtccgtaggcaggacttttcaagtctcggaaggtttcttcaatctgcattcgcttcgaatagatattaacaagttgtttgggtgttcgaatttcaacaggtaagttagttgctagaacccatggctcctttgccgacgctgagtagattttatgtgacgggtggtgacaatgagtccgtgtcgagcgctgattttttcggcctttacagcgagatttatacaatagaatttggcatgagattggattgcttttagtcagactcttatagcctaaagtctttgagtgactagatgacatatcatgtaagttgctgataggtttccagttttccgctcctaggtctgcatattgtacttttcctcttactcgacttaaccagtaccaacccagcttctcaacggatttataccatggcactttaaagccagcatcactgacaatgagcggtgtggtgttactcggtagaatgctcgcaaggtcggctagaaattggtcatgagctttctttgaacattgctctgaaagcgggaacgctttctcataaagagtaccagaacgaccgtgtagtgcgactgaagctcgcaataccataagtcgtttttgctcacgaatatcagaccagtcaacaagtacaatgggcatcgtattgcccgaacagataaagctagcatgccaacggtatacagcgagtcgctctttgtggaggtgacgattacctaacaatcggtcgattcgtttgatgttatgttttgttctcgctttggttggcaggttacggccaagttcggtaagagtgagagttttacagtcaagtaatgcgtggcaagccaacgttaagctgttgagtcgttttaagtgtaattcggggcagaattggtaaaaagagtcgtgtaaaatatcgagttcgcacatcttgttgtctgattattgatttttcgcgaacccatttgatcatatgacaagatgtgtatccaccttaacttaatgatttttaccaaaatcattaggggattcatcagaga

SEQ ID NO: 15758 - DNA, 803 bp, Oryza sativa
  unsure (1)..(803): unsure at all n locations
ttagcccgtgaggattgacnttctnnnnnnnnnnnnnnnnnnnnnnnnnnnnnnnnnnnnnnnnnnnnnnnnnnnnnnnnncctccttttcccctttccttcctttttcccctctcgccggcgtcacctcctgtcgccgctttggacgctagccggagcgccagctcgccggcttgaccgcccatgtcggttcccctctctcaaaccgacattgccgcccatttaaacccgtcttccccctcccttcctttcctctcccattcgcctcctcaccgttgccgccgctcccgtgctctgcctcgcctctgccgtccatcgccaagcgccgggtgagccggtgcgttcgtggacgcggaaggggactccgggcgcgccctcttcttcctcttcctcagcccgaggccggagagatcactcccgcgccgtcggcctctcgtcactgcgccccgtcccgcacggtagtgtctctctccgttcttcctcctcgctccatctcctccccctagctttcggtagtagctcgagtagactccccgtagctagccggcgccgccccgaccgttgccgtcgttcgccatgtgctcgccgccgtcgccgcccgagctccgtagcacccgctcgtcgccagcctcgctcggcgtagctccgtccaatccgacgctagcatcggattcccgtggtcgcgtagatgctctcaccgccgggaatcgacctctcgtgacctcgtcgccgtttccctcttctcccgccgctggttgccgacgccgcaatccgccgccgtcgagctaccttcggcgaatcgt

SEQ ID NO: 15759 - DNA, 983 bp, Oryza sativa
caaagggtgggggatagggaaagtgtccgactcaaacggcctgactaaagtcgttaactgagaacgccctcttcaccatgacatccagagtaagaggcatttgtcaaagatagatttctttaatcacaaaatactccttacagttttttcccaaatatttcgctacattacatcttttcctaagatatttgttatagggtacgagtactaccaagaaggccaacgtcagtccatagactggaagatcttcttggccagcggcgacattgaccttgccagatagtctatctccgccggagtcctccgagaacgagcaaaaccctcacgaagatattcgaggtccaagtgtgggcgatgatcttgtaggcaagccaacacgtgccccccggcatatcggctcgatcgacgacactcctgcttcaaggcctcgtcgatacgcttgccgattccatcgagttgggcataggccctattaagccacgagatgtacccggccaccgactcctcgggatctccgcggactactcgaagctccctgcatactctggccatggatgtgcagcaactcttcaagtacgagttaaaccatacctcacggcctcggagcgtttccacagcctgctctttcttcacggccagcatggttctctcgagctccgccacttcaaacttcgtcttccagtattgagttttacacattatctaggaaatacaagaagtcctactcttcaaaaagggggagaacagactccccagatcaccgacttcttcatcacctcttacgcgtgttgctggccggcccctagtccaagatctcgcgcagatgagtttcaggacgcacagccttacacacacgaggacatgacacgccccggtgtagaattcgtttgacgtcttcttcgcaattcttcccgcatgctttggaggggattttccccatcgctgtcggcaggttccgcgagagaagaggtcagcgaaaactc

SEQ ID NO: 15760 - DNA, 736 bp, Oryza sativa
  unsure (1)..(736): unsure at all n locations
cgctgtcaggatgaacacatcttgctnnnnnnnnnnnnnnnnnnnnnnnnnnnnnnnnnnnnnnnnnnnnnnnnnnnnnnctgcaggatggggaggccgccgtgctgcgacaaggtcggggtgaagaaggggccatggacgccggaggaggacctgatgctggtctcctacatccaggagcacggcgccggcaactggcgcgccgtgccgacgaacaccggtgcgtgttcttgcgttcttgatcgatcgatcggcgagagatccgagatttttgttttcatctgtgcgcgtcgcgtgtgcaggtataaggattatagtttagtgttctttttgtaagcacacttgtgactcatcgcattaaaatgctgggacatgtgttaccatttgcataagctgagcaataccattatgtgtggacttggacttatcttatctgtactgatttagcattgcattgcttttgatgttatggaaacatcgtttatatatctttttactattcaactgagagttatgacatatgaactatgaataattcctgtttctgctgcaacatttgctgattgaggaacttgcatgcagaaaggtggagcttaaatcattagtgccccatttatctcgtaccaaggactttggtgcctcattttgtgaaaataagaaatttctgtgagctgcttcgaaactgtcctactgtaggtttcatggtcttgaattcgtctgcgtanggttttctaat

SEQ ID NO: 15761 - DNA, 740 bp, Oryza sativa
  unsure (1)..(740): unsure at all n locations
cgtgtcnttangatgactaacctatagcnnnnnnnnnnnnnnnnnnnnnnnnnnnnnnnnnnnnnnnnnnnnnnnnnnnnnnnttcttttgtcggatggatttaggatcaatcaaataattacagtgaatcatttgtattattatgaacatattttatttgtcacaataaattatgaaaggttaataattatccagccccgatcttgacggtcttgtcggggttggcactggagagtggaacaatcttgatggcaccgtctggtttcggcgtcttgtttgtcttggtcactttcttgggtggctcagtcgtggcgggtgggctgggcgtttgctcgaccatgtcgaggctccgcttgtcgcattgcaccgccagctttgcgttcccctgaatagtgattgttcccttcggtcccggcatcttaagcacttgatatgcgtagtgagatgcggccatgaacttcgcaagtgcagttctcccgatgatggcgttgtaagctgtatcgaattcagcaacatcaaaggtgatctgttctgttaggaagttgttggcttggccgaaagtcacgggcaacgtaatcttgcccaaaggtctggacgatgattggggagtaattccatggaagggttgatcagttggtgtcaacttgttttgcgaaattcccatcgcgtccaaagtgctggcaaaaaagaagattgattgagctgccaccatcaatgagaactcgcgctaccttgatgt

SEQ ID NO: 15762 - DNA, 900 bp, Oryza sativa
  unsure (1)..(900): unsure at all n locations
cctcatcttgtctatatctattttatgtttctttgtttagattcagatttttcttattatttttaccnacccccccccccagatgcncnntttgatgattgtagctcctccgnnnccagcnncnnnagacncgaggaaaacggcaccccaatcttaaacgnngaaaattatggtaagtgtgttgtgtctgacaactaaaacatgtcaatagcgtggacattagctttctgttctcaactggacatttggtgttcgcgaggatttttagttctattttctttatttgtttcatattgctcatcttcgagtgacagtgcttgccattaggtaaatattatgcatgaatgcatctgaaattactgttgcttagtcctttgtcctttgtctttattcttcatcattgatcatggtcagtgtaatggtgcagaatattattggagtagaagctgctcaagaccttattcaggagtacttgcagaggaggggttacattgatccattgaagggcaatgaaaacctacaatcatcaaatcttcagccttatgtgaagccttctgctgaagctgggcctacccaaaccaagaagcagacacgcacacaaaaagatgcagcagcatcttcttctggccagagttccaaggatcaaccagagactactgaaccccgagttgcttcaagagaggttcaaaaaagaaagcagtaaaggccatctcccttgctgagcagcgaaggttctattgtcttcaagcaagggaaaccttgttcatgccaagcacgccaacacaaccttgttagcaactggttattatgtggcaaaaatgtgtgtgaacaagaggntgaaggaccatgcaatttttgtgtgcacttgttctatggaagcagcacatattgctgtttaaa

SEQ ID NO: 15763 - DNA, 3590 bp, Oryza sativa
  unsure (1)..(3590): unsure at all n locations
accttctctgtgcgcgagttcctccgcgaccagtcaggctgtgcgtgggaccgccgaacctgggtcctccaaaactggagtgcgtcgctccaggtccatcctccaccctagcgccgcgccgcgtgctccctccgcacggtgagccgagcagctgacaagcgggtcccacccgggaccgcgcgtggtgagcccggtccaccggactctctctctccttccaccgcgcgcgcgcgtcttgggccgccttgggccaccttcttgggccggccggcccgttaagatcagccgagccgccctttctctcgggccgcgccctatccgcccgagggaagtctatattccctccctctccctttttcttttcttttcttttccaaaaaggatttaattaaatccttttcctttagaccaaaaatccaataatcttagaaattcaatatcttccccaccgtaaatccgtttgactccgttcaacttccaaaattccccaaatctcgagatctatctaatggcacgcttagaggtcattaatagggctttattttcgccgtttgttgagttgtcccgtttcgcgtgtagtttcggagcccgaagacccgcagtgcgaggatttcgaggatcaagctctggatctcgagcaaggcaagccacctttgaacatcttgagcctatacttgaaatttaattatattgcttgcaaaatattatgcattgataggatcacacttaatctgttgttccgtctgcaaggcagattggcggacctgcctaatttgttgcatttgatccttcctttgttaattgttataccatgtccccttgtaaccacccagttgcgcctcgatattcgtgcactctgtgcgagtatcgacggtcgccttcaaacttaaaatctgagaaacaacttgggtaaaacttgggttttacaaaagacttggaaaacccgacacctgggtcggtgcttgcgaactaaatgaatttctaaaaccgcggaccggggaacataccgggtgtacggttttcccgctcccgcacttaaggaccgattccttggaattacatccgaacataggacaagtgcgaccacatgggtggaatgggacacccctggctgagtaactagcttatcaggggagccatgatgccgagagacatgtggattcgccggggtggtgtcagagaggacccctgggcttcctggcacagtatggtctaggacctaacctgttgttggtctgggacccctctcgtcggcatatggtaagcctgtgtcggctttggaaatgccttgtcatgaaagcttggaggtctcccgacgtggctgatccccacgggctgggtgatccgggttagtaatatcgtgtgggtaaagtgtaccccctctgcagaggttaacaaactgttcgaacagccgtgcccacggtcatgggcggatgtgaggtgattcctagcgtagttttgtttgacaactgcttgtgaaattactgttgtgaaaaagggttcgatgtttggaaaatcagcagctgacgggatcagctagttcgtggtggccacttgaaaagttgttggcccgggtggccgtttgaaaaactgttggccgggtgccaaccttgttctaagatctaaagattgatacattgcacatactctgaccggacgggacgcactgtctcaaccgtgtcgtttgagaagcactcacctagatgtttttagaaaagagttcaaataaaatcaattacgaaaacaacagccttcccttgaagcctgcattaaacacttatttcccctggcttgctgagtactcccgtactcacccttgctctatataaataccccccagttgctgatgaagatgaagcggaccctgctgatgaggagttcttccaggagcaagccggttacgatgacttttagggtttcggcctagttcccaagtcgcgcctgtgttgtttggtccaagtcccggcttccgtttcccttttgtaatgcagttgtgagctcgggatctgtccacagcccaacatgactgtactcctactctataataaagagacctctgttgctgtgatattctatcctcctgtgataccagcactgtttcctgggactggtatcgattaacaggttaatttggagcgtcacgggctaattccagtcgggactagctcggggcgtgacatagagtatactcatgtctcttgttatatttttaatacaatgtaattattttaggtgtgtcgaccgagtttttctctcttttattaaaacaatgtattgtctttttcgtgctaaaaaattcctacaattttttaaatttgaaagtgtggacaaagagggcagctgggcctcacagttaaccacatttaagacgcacgcacagaaaagatcttcttcaacattgcatcatccaccctgtcgattgaatgctgaaaacaacaattccagcttgggcataattacaggatttcaaacttactttattaagtacattgttttgtaatggcaactaacccgatatgtacattggccgttgaaaaccacacatccacaaatctaataaaacgcaattaaacatcatcctgtcgtacattcagcgtgattataaaataatgcaaagaggctgatatttttaacctgatgatgatcagatcacattacgagcactgcatgaaccatcaaaaagatcatcttgaattagtcagggtatcagagaaagccaggttacggatggctatataggacaaattaacacggcgataattacatagtgcgacgcatgcttttgcacatgattctctaaagaagaagaagaaaaagaaatgctcagcgatgccatcggctaagctaataatatagttaatctaaccaatttttggctaacactatagtctaattattaatcattggtgatctggtgtgactcgaccagagcattttccggttgcatccgacgtagatccttcggctggtagctgatcgtaactagtaggtgtagtacatgttcgatcgatatctgtacttgttttttttcagaggaaagaaagtgagatccagctaactagtattatagtacttttaaaagtattttttatatatatgctatcagtttgttagcttttgcttgttgctaaattaaattattgtagcctgtaatggggaaaattattagcatttatttacaggttgtttatttgtgcagatcaattggtgttcttgtcctgcagacagatcaaatgattttttttatgagagaataattgattagtttaatttgctacggcagatcttcctcttaagaaaaattgacctcattatcatttctttaatataagtcccataatacaatctttgaagaatcaatattactaactatataaccaatcattagatattctcttatcattagtgtatagcagaaaaatgtacagattacctgctagctgaatagatggcaacgttatcagccgtatcaggcaaaaataattccatcatgggggtttgatgaattggtcaggaactttgaagggannnnnnnnnnnnnnnnnnnnnnnnnnnnnnnnnnaaacggaggtgcatntcatttcatcgcg

SEQ ID NO: 15764 - DNA, 1906 bp, Oryza sativa
  unsure (1)..(1906): unsure at all n locations
cgcgtggccaaagtgccngngacnctcntnnnnnagannnngggaattnggtacgccgtattaaaaattatgataattttagtaaattttaactttgtaatgtaattcaaatagtaggatggacgtgataaagcggtaaaggtaaaggggatcagattcagagagggtttagtgatccaagaaaggctctggatttgagcccggataaaagcagtatatccccagctacatatgggcatgatacgtacattccctttgggcatttgcatctgcatgtatatgcgccccatgcgaatgatgcgagatgcgtttctcgacgcatcttgcgcgtaggatgagatgaaacaagcgcagcgcggcgctctgtcgcttcagtagctagcttaggtgcagtaccacgtttccttcagataaaacacacgtcgcgtgcaattcagggtttacagtctcgtcgagccttcgaaatgcgagccctagaaagataattcctctttttttaattcattttggtattgacttcgaaaaagctataaccaattattatagagtttgcagaactaataattgcgaattacagaattatagctttgattaaataatcataaagaagagatcataaacaaaacaagaaaaattactaagaaaatcctagaagaataacatctttcgtacgcgaatctggatatttgtgtagtcttttttaagagatcatttcaatccggttcgggaggctcgaatttaaaaaattatagtgaaattcgtcgaagttgtgagccttggtgatattcagagtggtgttttgttatccctttcttctttacagagcatgtaccatcgtgggctttagtctcgtgcaagagataagggcttgcgctcttgggccggaaaacattgggccgtttgatgacgccgttcatgttccccgtaagacatttcttgatttctgatggctctctgcatctctgatcactgtaattgagcattagtgcacgatgttatctgaatttggttcaagtctctggacaatgtacttgagcatgatgttttctgaatttcatgcaagtttttcggataaaaaaactccaaatcctagcatatgtaatccacacgtactacatattgtaacatcctgtttgttcttgcttcgacaactttctgaattctgatacaacgaaactgaccactctagcttgcatatgaaacatctctaagaacaattagttaagaacctagaagagttaaaacacgtagtagtacatgtaatcgatcacctctcacactacaggagggatcgatcacagaatctgaccaattaaacacgacatctacaaaaacaatcacctagaattgtactccgtactacacaacaaaaattaattaacaatcataattaattcctaaaaataattaagcttcgaaaccctactactaccaatcgagcgattaactgacggcgattacagcgaagcgctcgatcggatcggagtccggtcagtacccgccggcgccgccgttccatccgcctcggccggcggcgcccatctggttgccgccgatcgccaccgacggccgctggttggcgttggtcaaatactgccggacggggtcatccgtcggcggcccggcgagcgccaccggcggcggcagcggcgccgtgatgacgtactgctgcatgaccagcacggacgccatcttggagaactcggaggagacgaggaggtcgccgatggggccgagctccggcgactccatccactcggcgagcgccgacgtcagcggcgagctcgcctcgccggggtggcggccgacgatgtacagctagtgcgcgttgaacaacatgctgcggatggcggtgaccgaaaactcgctgttggccaacacctgctcgacgtagaagatggcgtct

SEQ ID NO: 15765 - DNA, 5592 bp, Oryza sativa
  unsure (1)..(5592): unsure at all n locations
gtgtgattgatttgcnnnnnnnnnnnnnnnnnnnnnnnnnnnnnnnnnnnnnnnnnnnnnnnnnnnnnnnnnnnnnnnnnnnnnntgtaccccggcgggattaagcggacgatggtgaggcacacgcccgggttttcgaccatccgccacgcgtacgcgagcccctcccggtcgtcgggcccgccgaagaagaggagcgcgacgtggtgcacggccgccatcctcgccgcggcggcgctgaggccgcggtcgacgaggatgccgacggagcacggcgccgacgcgaggatgctctcgttgaagccccggagcgacgcgttgatgggctccatgccgccgtccaccgtctgctgcttgtggaacgggagcacgatgagcgagacgtgcttgtcctccgccagcacgcacacgtcctcgtgcatcgtctggtacggcgacaccgccgtgagcgcctgcaccgacacgccgccgaccatctcctcgtagctctcgaacgcgttgaagatgtggtcgctggcgccgcccgggttcgacgccgagtggtgcgcggcgagcatgttggaggcgcggccggtgagctcgacgaggtggagcgcgtagatgaagatcggcgagcgcttcgtcgggttggagagctcgagcagcgagatgatcgacggcacgttgcgggtggtgtgcacgcacgccagcatccggagctccgcgtcgtgcttcgaccgctgcaggttccgccgcttgtacccgaccagccgccgcgccggccggtacaccgtcgtcaccaccggcgtgaccagcgccgtcatggccaccgacaccagcaccatcacggcgaacgactcgtcgtcgagcacctccttgtccctcccgatgttgaggacgatcatctcgacgaggcccctggtgttcatgaggaaccccagggcgacgccgtcgcggaacgtcatggtgtaggagacggcgatgaggatggtgcccatgatcttggcgaagctggccatgacgaacacgagcacgaggaggcccacggtgatggggtcccggaccttggtcacgttcgtgcggaggccactgatggcgaagaagagcggcaggaggaggccggtgacgaagtcctcgagcttctcgattagcacgacgccgagcgggccgctcggcatgacgaggccgtacacgaacgcgccgaacacggagtggatgccgatggcgtcggtgcagacgccggcgaccatgacgccggtgaggatgagcgtgatgtgcacgtcgccgatggcctccccctcggggacgcggcggacgatccaccacatgagcgggcggacgacgtagaagcaggcgagcacgaaggccaccccggcgatgagcacccagagggaggagaaggccgaactgttgacctctgagatggcgatggcgagcgcgaggaggatccaggcgcacatgtcgttgacgatggcggcggacatggcgatccggccgaggtcggagttgagcagcttgacctcggcgaggatgcgcgccagcaccgggaacgcggtgacggagagcgcgacgccgaggaagagcaggaaggaggcctggtgcacgttcttggacacctggtgccggaagatgaacgacgtcgccgtgccgatgcagaacggcagcgccatgccggcgacggcgatgatgagcgccttcttccccgacctcctgatggtgttcacgtccatctcgaggccgaccaggaagaggaagtagaggagccccaggtgcgccaccgtctccagcgtcagcaagctccgctccgggaacactttcaccgcccacgtcgaaacctgccccatcaccgacggccccagtatcacgccagcctgcatcaccaccacgacgacgacggcggcgacacagttaaccaatcgaccaatgagaatagaacaatggcggcggcgaaggtggcgggcgacgtacgaggatctccgcgatgacgcgaggctggcggaagggcttgaggaggatgacgaggaggcgggtggtggcgacgatgatggcgacctggaggaggaagagggggagggagaagtcaagaggggaggcgccctgccagatgccgtaggcggtgaccatcatcggggagtagcagacgaccgcgccggcgccggtgccggccttgccacgcgacatctgggacgcggaggtggcgttcttgatgagcgggaccgcgccgcccgtgccccccgccgccgccgccgccccactcatgatcggggccatctcggcgcatcggcgcgtcgacgagagagagagagagagagagagtataagctggtggcgcgcggcggtggctgtgagcttctcgttttcgtccggctccccgtggcgcgtgcgatccgatccccacactgcctaattttgacgtgccctggccgtcgcagctaaaccagttgaagtgaaagctgcatgttcactatcacaaaagtgtataggccggcccacccgtattttgcggcccaaattttcgtgggctggtttgggtctcgatccaaatacaggtgggtgggcctaaatgggccgagttcactgtactgtttacccatgatagggaaaatatgtagtactccctctgttttatatattatactagtataaacatgcacgtacaatgtacgtttcataatatatatatatatatattaatatttgtaatattgtaccaaccaaatttatacatctcgtcgagacacaaacaaaacaaacaataggaaacattaatgataatgtggagaggtggtgccatcgtaccaactcactctcagttccatcatacgtgcatgtgcggccatgccaactgcctacattcctccacatataacttgcttctttatgcccatatccatcactacaactagttaacaacttataataataatgctgatatagtctcatctctgcatatcaaccaacatacaacagaagttgcacaaatttaggggaaagaaaaaatgttaaccaattttttatcggaaaggctatatggctatcgcatgtttttgttaggctgtatcattcgttttttggtcccttggattttgtttgagattcgtgctatctagacttttgttttcttttgtatgtgggcttttgattattgtaagttcgggcttccatacgtgggctaaatgggcttctttttttttttacatttttgtgggacccactttgtgttgccgacagagagagatttttttgtgagagtgtgttaatggtgggacccacatacactattcaaattttgaaatccgcaccggagagagagattgtctgaatcagactagagagagagagtgtgtgagagattcattttgctttttgcctttttcctcatcgtctcgtccggcgatttcggcggagatttcgtcggcgacttcgggaggcgacgacgggcgtaagctacgccgcggcgtggattcgtgcaggctacgtcgctgtcacgcccgaaaattcactagtaatttccgaacttatttgtgcataaaatcctcgtccaggaatcagccgaggtacacaaactgacaatttaatatacagattcatcaaattaactaaaacgataaatacttacttaagaggcacttagtcctcaccatgaagaaaactgcagcggaaaataaaatctagcgaagctccagctccactcccacaggcagctcagctggggtataagccaaacgtcttctcctcctagatcctttttcttcaactgaggttgattgattattgcaagaatgagcatatgacatactcaacaagccacacagcaaatatgcaagtgcacaaggataccaaaggatggcataatataggctcatttgcaaaagcagcatttagcaaaacatttaagagaaataaaacagtggagtaattaatcagaaattttaatcaacactgaacaacacacccatgctgcacaggcccaaccatcctgaacaaccatacccggctgtacagatctaactccaaaccaggagctaagcaaattattaccaggtataacatccataattattgtgagaggtgtgagactaatcacgaaaaacattgctcaacccgcccataaccgcgggcacggctattcgaatagttttactctggccagaggtgtaccactgtacccacaagacacagccccacaacatgtcaccatgtgcctcaataccaccacggtacctcggaaaggagttgtgacaataccccttgcacaacacaatccaccacagcgcacctttcctggatcataatcacccccttataaacaaggcatggactccccagcgacccccgtgggcttatcttcgccacttctcagtctggtgctccgcaatgaatcatgctatacaaaaagtaaagccgttgcccacgcttgcttgtggctggcacggttaatgtttcacaacagtagctcgcgaaccggtccttaattgtcatgagcacgactctcaaaaccatgtgctcacaacccaccattatcaagttttagttggcaagtaattaattaaccaatcacgattgaccatcgtgaactatcattaagccatcattaaataataatgagtcataagtaatcccaatagtgtgctaatgtttctaagcatggctaagcaatcatatctaatatctagctgaaccaatatatatagctcaactagtcaagttataataacccaaggtatcaaggaataaagtaatcaatgcaaacaggccataacaaaggaatagattcacaccacccagtgacattcgaaaataaatgcacagttgaaataaatagagaatttaaatataggatcaacatgctcaaaggattgtgtttaggatctgtgtgacttgccttgcaataatcggtcttcaattaatcttcttgaatactttcggcgcactcacgaaccttcgcaacgacggaaacgacaagctaacacgcaaaacgaagaaaaagactaataaaaaccaaataaacaatacataaaaagtaaacaaacatgtagatcataattttagatgaattatgagacttgaacggcctcattctgacttcatatgaatttattatgaattttacaagattaaatctaattaaagcccatttaaaaagaattaaataaatttaattcaatttatggataattttaatatgtagatctttattttatacaacttttgcaacttgaaccacattaaactgagttacaatgaattagttatgaattttcaaagattaaatcggattaaaacacttatatggattttaattgaattatgacgcaataatgaattatttttgaaaaggaaaagggaattattgcgtcatcaaaggcggtccgggtgcacgggacggtctaaggaaacgaacggccgagatcgattctatccaaaacgggcggccgagatcaacttgatctaccgcggttcacgggacaaggcgacgatgacatcagcggtgacgtcagcgatgatgtcatcaccggcgacggctcggccttgcgcgctcgtcggcgaacgacggcgcaacgacgcaaacggaggacaccaacgggtagaggacaaccacgggccggaact

SEQ ID NO: 15766 - DNA, 6322 bp, Oryza sativa
  unsure (1)..(6322): unsure at all n locations
acgcgtgactganaccttgatgcacttcnnnnnnnnnnnnnnnnnnnnnnnnnnnnnnnnnnnnnnnnnnnnnnnnnnnnagaaaagtcgatccgaatcgagctcaaatccgtcgatttccaaacgtaattgaccgaagtttctataagagaaaaggaagaggagatcgaggagattatttcccctcaaacgatttcaccggaaacggaaaggatcgaccggattggaaagcggcggcggctagggtttcggccggcagcggcgcgaggaggaagacgggcccgacaggtggggcccacctgtcagcgggagagagagagagaggagagcggtggcttggttgcgggccgacttgggccagggagggagagagaaagagagaggttttgggccggctttcggcccaaagccaaaaggaggatttaaaaacatttttctatttaaattattcatgaaatgatattccattgattaaaaatacttccttggctcaaataaatcccagaaaaatctaggaactatagaatcaagtaaagtatttaacaaaattttatctaacccaattttatattgagatttagcaaattagatcttctcttttaagatcatttctaattattccttttaaacaacaatttataatttaaggatttttaaacaagaaaagctcttaacaattataattagatcattattgatcaaataattactgaactgttctttgtatcatttaggaattgagctctgaaaaatccgagaaaatttcagagagttgacttaatcatggagaatttaataaaaattaaatccatccatgctttatatttaggaaattttatttcccacatttaacttcacttgtaaattaatgaacatttaatataaattctaataataatttattaaataatttataaatcctgaaacaaaaatcaggatgtgacagtcgcggcagtgattccactagagtttgcggtgtgggcttctccatcttgtcctcgagctcctcctcctccttttctccggtgagtatgttttgattcttctccagcttcatttgttagcttgctgctcgattcgttgttgttttgctccgctagttgtgctccttttgccgacggagagagagagagagttatagaaggagaggttgacgatttcgtcgtctcgttctcatcgtctccggcgacgcggcggcgatttagcgaggcgacaaggctgctcttcggcgagccgactcggtgtctgctgctgttgtggaggtgtcgcaccgtcgattgcgcaagattattccagtggctttcctttttgttttttttccttttttgttcatttccatctcctatttagcatgctacatgctgttgtggagctaaaaagtaatgatctgacccggaaggtcggtacatttccaattgagctgttgaaaagcatctcttaagtcgatttgagacgcaagtctctttttgacccaaacttaaaaagaaataaatcacttagtgatttcaaaaatgttttcaaacaaaagatttgcaaaacaaccttgcctctcttccaagcttgcattaaacacctaagtccccgtgacttgctgagtatgaaagcactcaccttgctctatataaatatatatagttcctccgccttgaagtaaagatgaagtgaagtgaagattagggtttcgtcctggttcccagctgtcgcctgtggtgttgggtgttagaccgttggttccgctgctgctgctgttgctggtgtttcctcgtctgtgtcttcggttgtattctcaggctgtcttgagctgcaacctaagttaaggtaaataagtcctctatttattttaaggatttgcaatgattcatatttgtcaccgtgggtaccagcactatgtcctgggactggtactgagatcgcggtttcgtaggaagtggttcgcgccgttattcctacgacacgctcctgtcaggtgccgttgtacggcggtgccggattagggtgtgacagcatagtgagcgcatagggcagatgtgttgttcgcgcggtgcctctgttagcgtggggaggatgtggtggcggggattgcgcgggcgatggacgatggatggattagatgcggtctgggtgatttcaccggatggatggatgagattagattagatgacggacggacggtagggattgatccgggtgatttggcatgtaggattggaggggtacaactcctcctttttatattagtatagataagtcgtttaactttggtcaaagtcaaactactttaagtttgactaagtttatagataaatataataatatttacaataccaaattagtttcatcaaatcaataattgattatattttcaaaataaatttgtttcgggttgaaaatgttactctttttttctacaaatttgataaaacttgaaacattttgactttaaccaaagtcaaaacgacttataacttgaaatggaggaagtacaaattatatatgtggtgaaaacctagaaactatcgttggattaaaaaatgaaggcccgatatttgtccagatcatcaaaaaaaaaaaaacaacccccaacatttttactcatgattgaatttgcgagtaaaatttttattgtttggtgacatgaataaatcttagacgttcatatttaaattcaaaggcagttttctagatttcgaatatatatatatatatatatatatatatatatatatatatatatgtgtgtgtgtgtgtgtatggtttgcactatatattttcccattgacattcgttgtagccgttggtaaaaaaaaaaaaaacagttttatagaccagtcaagggacccagtggagtcaggtctaagttgtcgatcggtccggcgcgacggcggctgacgcgagaagattttttgaaggaaggagaaaaaaaaacgaagagagggtgttgtacgcggacgactcaatcggttagctcgcttcgtcgtccaccgtctccctcggtcaccgtcgccgcgcacgactcccatccatggcgatcgagctctgcccatttaagcccggggcgcctctcttcgaggacttgcaaacgcttgctgcaaggattggatcctctggcttctgttgatttggggagcttttcatcgtctcgaccgaacgggcagccgtcgagatcgaggaaggaggagatcgaagggcaaagtgatttggcagcggtggacatggatgtgaggtttgggcccgaggagcaaatcgtgtggccggcttctgttcttgctgggatcctcatgtgcgcagcggtaagttgttccatcgatctcttccattgcttagctagatacgagagtgcattcccagtaagtcctactttgatttgtagaggaaacataagatacttagaggatttcaatattgtacaaaagaaattgaagaaattcctatgaaggcctttgaaatcaatcttttttaaaaaaaaaaatcctacgaaatggacaatattatagagatttagaaaaattaaaaagagctccaacttttttgaaaatttcctttgactatatttcttttatctcctactgcctaatcaaacaacctgttttgcaatcatgtgtgttttttctatttctccttttttttaatcgtgcgttacaaaatagccctaaaattttgctacaaatttgcatcttcacggtaaagctaaactgcctaaagtgtattttctctagtgagatgagcaatcccatcttgtatttacctttttagaggtcgaactactaaatcaggtttcggtttttcgttataaaaagaaaatttgtgaaatgttcctcagtactgatattaatttatgcatttctatcatccaacttttgagatccaaaaagggcaaagtatcaccatcaatctgcacttgacttccatagctcagtctttctgcttggaacgtcccaccttttcttcttcttctttttttaatgtaggaagaatagtattattcgactgtaaaaactcttgcaatgtatgcagaccagccattacaagtactgaacctaacttctgcagagagcaaagcaactaatagtgacagcttagttggactcgtagacgtttgttgaatgcaatctagccttgatactccctccgttcccaaaaacttgtcaccaaacactattcacaatcaaactttgactaatctttttcccctaattaatttataaaacaattcaaaatatattatattatcaaattaccttatgtgaaaaatataatcacacaattttccatcataagagaatctaacattttttaaaatattcgggaatggaaggagttgctacttgggtgatacatggtgttaaaaatatgaatgaattattacttttttttactgaatatgagtgaattatgaatcactactccttttcaattttgaagactacttatgtcagcatttagtaccacacagtcgaggaggtagccaacggaatcgtgccgtcaataatgcttaaggaccagattacctttataatttgtgaattcctccatcaccaatacggattagtatgtgaagagatataccagattacctttttcattttttttttacttgtcaaaaggctaggtaggtagcttgagaagtacatgcatggtaaatggtaacaagaaaacatagggaaaaaaagaggagggatcaattgttcctgagcctacatgatgaattcattctgcattatattttgtattatgccactgaggcactgactagcttctactccattcttataggtatatgatataactcgtgaagttagctcccggtgctacaagggttataatggactgaatgaattgcacaaacttgagtggaacaacaggtgattaattggagcttgcttgtttttctctttctttttctttgacaggtctttttcaataaatctttgacaggttcttattatcgactaattgcagtattatctaaaaatcaactaacagtagcgatgcatattcacttctcttcatgctagtaattacaactcgtttatccatgttttaggggattctctaccttccacgcattagttgctgctgtagtctctttttatctgctggtgatatctgacctcttcagtaaggacgtccatggtgccatcataattgatcgaaaatcatggatgtctgatgccatgtttggtgtaagtttgcagccctacgcatccaggaaaccatggagaaaagagagaaagatatctgtcccaaaatgtctgaaattttaattattggcaggtatccctgggctacttcttgacagatttgttgatgatcctctggcatttcccttctctaggaggaaaggaatatgtaagtgttaatgttctgagttgtccctttttcttttactacaatttgaggtgacacaagttaacaatctattctgattgtattgatatgttcagctcttgcatcatggattgtccatgtatgcaatctctcttgctctgttgagtggcaaaggacacgtgtacatcctcatggtcctcatcactgaagcaaccacacccttcgtgaacctcagatggtaatactcattcagttttcccaaattgctcattaatcatcttgcttgttcatgtctgagatcacaattattcatgcattctttctgaaaatgcaggtaccttgatcttgcaggccggaaggactccaagctttacctgtacaacggggtggcactgtttgctggatggctggtataatttctctttgtaaatgtttccatgcaccaaccaattcatcttttgttcatcaaaaaacacgcctgaattttcatctaaaggactgccaataagtaaacaacaaaaaaaacagaattgaattttcatataaaagactaagccgatagtaaataacaacaaaaacaaaacatgcctgaatttttttgagtgctcagacatggaatggaagctgcaattatttatttaagtgtgcgtccgacaagatttgaacttgagacttgtagctccaataccttattgagtttttttttttaaactaaccataccttattgagttgcatataacctacaattcaacccaaatattaaaacgatgaaaaaaaactaacaattcacttatacctcaagtgataccgatcttcttgttcttgtatgcaggttgctcgcgtcatactgttcgtatacttcttcgctcatgtgtaccttcacttcgaccaggtaatcataatcaaccaatcgtcttctctttaaggttcacctttgtgacaggctgttgntaaattagctcctgcctgttcgattaatttgcccgtgaggca

SEQ ID NO: 15767 - DNA, 723 bp, Oryza sativa
  unsure (1)..(723): unsure at all n locations
tcggcgcccttgtgatgatctagatctcgcgttctgnatgtaaggagttgggaggtctccggattccagattatngatttncaaccccanatancagtatactattagctatgccaaggcctggagggccaaacagaaaataatagagatgagatttggaacttacgaagcctcgtatgataatttgccacgcctgcttggtgttatcgaggaaagaaaccctgggagctcttacgaagtgaagaaattcccctcaattgaacatcctggcaagagtgtgctgcaaagggcgttcttagctctacatgcatgcaagatctccgtctcacaaaaaacaaacctaactggatgtgacatctccagattcattgtactagctagaatacatcacattcagtactaggtttgtattttgtgggacgaaaggagtactttttgtggcaaccagcagaggctgcttgcttgtttattatcaaccgcaatcaaattttaaattttaaaacttaattttagaatattagctgtagctcaaataaaatgtttccattaccttaaaataactatagtgtgtgcaaactccgtagtatccaatacgtaacttaaaatattgaatagggaggatatctagtcctctgtcttttccgaaatttttcataactatttatgtactttacaattggaaagagattagagcgcccctacntatcatttgagagtattaac

SEQ ID NO: 15768 - DNA, 2189 bp, Oryza sativa
  unsure (1)..(2189): unsure at all n locations
ctgccgtccnnnnnaganacnnccagtctncncnnagantngggaattggtaccccattaaaagttttacaaaaataatttttcattttgaaaattgacagaagtggtcgcctaccgccctctaggagggggatttttaaaaatcgccatcccagagggcggcgaaagtgatgtggcagacggccgttcgctctcgggcgacggccgtcaacgaaatttgcaggcggcccccttgccgccctccgctagggcgattttgtactgtgcggggggccgcctgcaaatgggcggcggggggcctggaattttgcaggcggcccccttgccgccctgggggagggcgattttatactgtgctttatatttttgtataaatatcaatagttatcaaatctttttatattgaaaactatacaagattaaaatctccaagactggtaaaatacaattttattattttttagggcctatttggaatgttaccgtacaaatattttgttagtgccaaaatataagcaagttttggcactaccaaatatttggtaaggtaaaattgcatttgatcatatttggtttgctgccaaaatgtaaaattgtagtgaagaatgttctacataatctcaaatctagattacgtattaccaatgaataggcttcaatcgaaatcaaacacaagtactattcaaattaccaaaatattggtagggcatgtttttgatagcaatccaaataggcccttagtcttacgcatacaaaaaatcaccaccataattaaacattgtaatgataagatagataagaagtgccatcgatacacggtacaaatttgtcgatcccgacgaatcaagcatgcggtaacctatcggctccttctaggtcggtcagaatgcattgcattctcgtggtccttcaatcgttgatactctacttgtgtttctgactctgttatcttctggccatgatatgatggagtgacattgtcgatccatcgagtaaatccacccatccttggattgccctgtaaaaatagtaatgttattcagtttgggtagtaattttgtgcaaatcatagcggattttgtaaatggttagacatacaacgaaatcgttgtctacattggggcagacaaaatatctccttcgaaatgtttgttcagcaaaggatgtagccacctgccagcgatctctgcacccacactttggacgctcggaccatttaggtaaccctaatggattgttcctccagtctaagcttgcaatttccacccgacgttcgtactccatccaagcatgaatgaactgtatggtcggttcaggttgcgttatcggcccgccacttgaagtaactctgactgtgtcaatccattgtacgaattgacatttccttacatcctcctatgtacattcattttgggatagttaagttaatgatagtactgaggagtgatgaaaagaatagttgtaattaccacgaaatcatcgtcgacaatgtttggacacacgaaacacctttgtcctcgagttcggtgccttacggaccttatgacctgacaacggtcaccacaacgacactccggacgctcacgccacgtggggagtcctaggggatttacgtgccattctaaagcctcagcagcaattcgacgttcatgctcatccttccgccttaggtagtccgatcttgtttcactacgtgggtaagcacgggttccgtcgttttgtgggttctccatgtctacccactcgatgaagttgcacattggacgatatgtctgcgtaagatgttacaattgtgtacgaagaagttagtttttttatccatttgaacttcgaatagatgaagcatacctgatcaaagttcgcgcattggaagaatctcctgcccccagtttgtatcatgagggaagacttgagtatgcatccatccccacaatcgcacaaaggacggtcacaccatggtggaaaccaaccagcaaagggatgcttcggccagttgagacgctcaagnaagggcgcttccattttgggttgtggggggctagggggaaagaagatatgaagagggtggcctttcggaatgggtcaatatatatagggtggttttcacggcaatataggtgaactcaatgagatacattattcattagaggggacaanaggatcaggggggggcgtgattcacttaggtg

SEQ ID NO: 15769 - DNA, 1259 bp, Oryza sativa
  unsure (1)..(1259): unsure at all n locations
agaatgtgacctgatatgcgcctnnnnnnnnnnnnnnnnnnnnnnnnnnnnnnnnnnnnnnnnnnccacgaagtagtctcggtcacggtgcgtgggatacgcgtccgtcacagcggcaacgtgcggctctggggcgtctggagtgaaggtcacacgcgcacgagtgcgaggaaggtaccagcgaaggtagtcacggtagttctcctccgtgtgtgggaagagctcgttgatcacctcctctgtagctaacacccagtcgtcaacgtactgctgtacacgtggagcccaaagtgcgcctgctagctgtccccgtcgagtcaacctgtgaagagaggtaaattatatggctcgatgaagtaattatcataaaaatttagaaatgaacaatccgaactcacgagtggtcggcagggaggacggtcggctgcacgttgcccggaaacacctgcctaagtccgaactgtctcatcacacgctgcgggcagtgaggctcaacgaaaatgtcgaacaccatcggcaggatggtgagccagtaagcctggtcgcgtgtgcacaacgacgaaagtcctagcggtgctctcgcagcgacggcctcttctgtgtacggctcccagatgacgtcgctcggctggagacggtcaaactcgaacacgaagtccgggtaacctcgtctcacctggacgtgagcgtaacgacgctgcaataaacatgatccgaattagacatgttatgtgaagaaaaaaaagaagacgactgataaacttataacgcagcgaagttgcactaaccccacgtcgacaccagtaagtccccatcgtgggaccgtcctctggccactgcgcgctgcgaccaaccccgtagggtgcgctgtccaccactggtcgacctatggcaaacctctcggctgcccaaagctgaagcaacatagggcagctagcgatgatcgctcccgcgtctgtcttcgtgcacgcctcacagaggacatggtacgtggctgctagaacgtgtgagcaaggaaggtgatgaagcttcggcttcatacaactgcaggtacatccaccatccgccttcaagacacattcctgcacggcttgcttgcgatagataccacgcctgctcctatcaacacacattatttcataccgatgcacttgtgtgccttgagcaacaactctatgtctccgtgcctttttgattttatcggggtacggaattcctcattctannnngcntngtgcaaccgacntgcatacagaccg

SEQ ID NO: 15770 - DNA, 8485 bp, Oryza sativa
  unsure (1)..(8485): unsure at all n locations
cgcctaatttcgttgataggtgagttcggtacgtatgatnaaccatagggtggtctctcttccctgccgaagttgtaacccctcagagacgactggtcgatcattttggttagtcttancataccctacaggattaatngncnccgaaaaaacagacaagtcattangcactaattaattgaatcgtaattattaaaagtttgaaaaatggatttatttgttttttatagcaacttatatatagaaaattttcgtacgaagcacactactttttaacagtttgagaagcgtgctaacgagtaccgaagaaaaaaaaatctttatcttgttagagtttagaaggagaccagcttttggactgaacggtttgcatcttgctcttgcgagcacgcagcaaccacgggcgcgttagtgcgttacgttggtacgctgcgtacgcacgtacgctaggagcaaacacggcgccggtattgccacagtgggggcagtggtgggctggtggccacttgttgctgctcgcggtcacggatcgcggcgaggctgggtctgttcgtggatatttagattttgagaagtggcgtgtgggaatttaaattgtgagaatatacaaaaaaaatcagttccatggactctgtaactatatcttctctgaacgaaaaaccgatttgtttaggagaaacttttgattctggagaagatgtaactgtctgaagctatcctaaacaaaccgatatctattttgggacgcggaatattttatcgattttctcgtggaatttcatatggaattcctacggttttttgagatgcatgtgttcattttcactcctatgaatctatgatcaactattaatcacttctgcttgctgaattattgcagtctgcggcaggataattaatggtttacgtcttcctgcactgtggttcagaatctagcttggtggcgatatcgtccccaagtcccatcactctaccaccaaaatgctgctacaattttgaagcattagaaattagttcaagatctacaagtttcagacttgaacttggcgtcagcaatttcttgtcacgcatgggcctagtttaggagagtaagcgggccgacatgataatgtttcatgggctgatctaaatgggcctacaggacccatagaagaacgggcctgaagaattgtttaggcagagaactgtcggtcgaaaatacagtaaaggcttcgcttttctagtcccaaataccctgttctgcgattgctagaattgtgaccttaatagcctataaattctattcgcgatagcactcgtaattccatctaataacaatttcgtaccgttagaaaacaatttcgtacccttaaaaaacatttcataccaaataggcagatccgctgatgctacaagttcaggaaaatggatggcgaatgcagattgcagataaacaatgtttggagggacgtctctccctccaaatctcagcgttcccggataaacatcctcttcgtgtctcaacatttactctcatttccccctttctttagagcagaaaaccatctgattactagtgaacaggttaacatggtgcttgtcaaaaggctgtgctactgaaaattgctgagcacttcagattagtaactaataaccatatcttgaccgtttagccggttcatctgctactgaaatatactcaatattctacaccatgcacataataggggaaaatcagggcagaataaattaagtggcatcaatagtagtcctacagaagaacaaacaacacaggacgaattatttactgtacgtttaaacttttttgtcacctttcaaccgatcagacaataacaagtatgaagaaagaaataaaaaatcatgtgcatctttcacagctagctgaaaagcctgaaaatgatgcgcagtgttatctcatctaagtttaaataaaccgagagcttgacatgccagattatgaaaatgcgaagaatactagaaatcagttatgatactatgtagcagcaactagaatcctgcttagatcgtcagaagagatgcagtagcttaccccagccccatcttggacagtcaacaagccactgaagcagacaacattcagttgcttgttgacaattcactgtcattcttaaatccatttgatgcagagaatacttaattcttactgctaattaagcacattatgcactaatgcaatccaaatcatggctcatgggtcttgtgatctcgtaggcttatcaaactaactgttccagatgcttaacagtccgattctaaccgagttaacactagtaatcaagcgaccaaccatgaaccatctcatgaacaattgaccaactattagacaaaatggtgctacaagttcagaaaaatgaatatgcagagaaacatcctctccgtgaatttaacaaatttaccactcattctgccctgtttgcagagcagaatatcctctaatcaatccttagtttgtacaaattgtcctctaatcagtactagtgaacatattaacaaaagcctgttatctctaaatgattttggcgaccaagaagccctctgctactaaattgtactcaacattctacatcatgcacacaatctaggaataaatcgtggcacagaaagtaaattcagcaccatcagtagtagcaatctatagaagaacaaatgacattcagacgatcatacaacatcgcatgatgaaagaaaacataaacgacctgcatctttcacatctagctgaaagcctgaaactgatctgtgaacagttaacaaactgaaatttggcttcggagaagaaattcagctacattgcaaatccatttcatgcaaagaattcttctatcaagaaaattaagcacggataattgggcacattttctcattgcattattattaactgcataaacaatgatgcatagactcaatccaagtactgaaagccaaaacgttgctgcattcatacaaatcatcagaccagagtccagagatcacatcacatgcattgcgttcatgcaagtctgactcagcaaggagaattatactgattgatcgagaattatcataccggatcaggaagactacatcatccacccaaacaagaggagaaggacatctcgaacaaatcaatagcgaatcatacctgtaccaggacgatcaaaactaacatgagcaatctcaggggagaagccacgccggcggtgagtagtccgacgggccttgctccggcaagaacttgtccacacgcggaacccccgccgcatccgccgccggtagccacttgccggtgtctctgcaggggtatttccccgcgacggcgcgagaagcgaacactgtcgactcgcggtagagcctcccgtcatccaggaagtagacgccctcgccgaactcgtcgcccggatagtcacccgcgtcgtacgatctggagcagcctcgcgcgacgaacagcatccgctcacccagcgactccagctccttccagccgtgcagggccttgttccgcttcctcggcggcggctgcaccatctcgaacaccttgaacgccgatgtcgtcggcggcgcggcaagaggagcaggaacgcgcctgaccaccatgaggagattgccgcgggactccaccaggtagcgagcaacgacgtctccgccataatcgcgccggccacgccagaagcgaagaatcaccctgggcgccatcttcatgttgccgtcgccgtcttcatggaaatcccgtgctgtgaaaacatggaggtcttcttctgcggtgaggaaaaggaaggctcccttgtggtgtatgacatcctccagagctggctcgtcgatggcaccagggccatgacccatcgccgcaacctgatcctgggaagcatttgctgactgcacgcgccaaaatgcgtgagtgcgtcgagcaacctggaagggccagtaggtgatgatggcggcggcgacccaatcctcgtcctccggtggccaaaaaagcgtcgcggcgagcatgatcacaccagtgttagggacagggccgtctggcccccccaattcagcagccgtcttgtccgggcggacaaaaaaagggaggttgaagcgcaactgatggtcgcggaggctgaggagcgtgttgcggcaggtctcgccgaggaagatccagccgccgtcgtaggcgccgaagcagcgcgcggcgcgcgcgccgtccgggacgccgaggccgtgcccgccgcagccgcggagggcgcacgagaaggaaggcccgtcggcgcgcgggacgaggatccacgggagcgggcggagatgcggcgcgttctgcagcggcttgacggcggcgcgccagtcgtggcagacgcgggccatggtgcggcggtcgacgaggcacgtgaggcggttgtggacaaggcgaagggcttccgccatgaagtcgcgcgcgggcgccgccgcgtccatgggaaagncgaaggcggagccggggcggggggcaaggcgtgaaggtgncggtggcaagggttggccgncggcgaagaaggtggaacgcgacgaggacgcttcgtcgttgtgcgccatgtttgaacttggcttctggaagcaggggaagagaggggaacagagtggattggtttggaagaagaagcagagaaggccagccttttgccagccgagcaagtggttgggcccaatttatagtgccggttttcttgggcctgaagtttggatcgctgctctttgctgagcgtttcttcttgggcctaaatgttttttttttttgagaacgtaaagttcggatgtacatatggtgcagaatcgtgtctagcagacaggagaaacaaatgggagcagggaaggttaacccttttttttttttttgagaaaaggcattcaagcaggttaacagttcagatggacagatggttattatcctacaggaaaaaaaaagagaaaaaaaagatagaaaaagttattggtccaatgaggtcatcatctttagtaacataggcacacatgttttctgtaggcgatatggttaatcttttcattagtgctgaactgaaggatgctcagttcacagctcgtcctttacagagagaaggggatgaggaaatgttgatacatacacaggatgcttatctctgaattccttgttcactttttctgaacttgtgcatcagtctgatggtacaacaaaaacactagattagacgctcgccaagccgtgcttttgccgaaaatatacagacatggcacccatccgacctcaaaacaaaaatatgcatggcagagctggcatcacaaacgaactcccagtttgaattttaaattcccggaaggtcacttatgaaaaagaaaaagtaaagccttcataaattttagcccatttatccgcctcaagatttggggcccaagaaagctggccctataaatgaggcccagtcccccatcccccttccaaaccaagcacatctcctccttcttccagaagcagaggaatccatcggttccattcctcctcctcgcctcgccaccggcaagccgcgcctccgcctctccaatggactcgccatggcgcgacctcgacgccgacgtgctcggattcatcctcaagcgtctcccgtgcctcgtcgaccggcgccgcatggcccgagtctgccgcaactggcgcgtcgccgtcaagcctgagcagccgcggccggggacgaggccgctcccatcgatcctcgtcccgcgcgccgacgggccttccttcgcgtgcgccctcgccggttgcgccacccacgccttccgccccccgctcccggccgacgcacgcaccgcgcgctacttcggcgcctacgacggtggctgggtcttcgtcgccttcggccaaatcctggactacgcgctactcagcctccgcaacggcacgcgattccacttccccgacacgggcacggacatggtggccgcgaccctctcttcgccaccggatgtacgatccacgcgttcatgtacgatccacgcgtgatgtacgatccacgcgttcatgtgttctggcgcatggagcatcaagttgtggagaaggcgactgctgttgagttcgtcaccacgtcagttctggaggatgtcatacaccacaagggaagcttccatttcctcaccagggaagaaaacctccatgtttttcctgtagcgggcttccacgaagacgacgacggcaatctggagataccgcccatggtggttcgccgcttctcgcgtggtgggcgagattacggcggagccatcgctgttcgttacctggtggagtccggcgagaatctcctcatggtcgtcaggctcgttcctcatcctccccaactgccgccggggacatgggcgttcaaggtgttcgagatggtgcatgagacgcccatcaacaacgacggggcaccatacgcttggaaggagctggaatcgctgggtgggcggatgttgttcgtcgcgcgaggctgctccagatcgtacgacgcggacaagtatccgggcgccgagttcaacgagggcgtctacttcctggatgacgggagactctacgatgaggcgttccaaatcttgaatccctttgcccagttcccctgcagcgacaacggcaagtggctgccgccggcggcggcggcggcggcggaggcggttaccggccgcgtggacaagctcttgccggagcaaggcccgtcgtactacacgccgccggtttggattctgccgtgagactgccatgttcttagttagattgtctgatgacttgttgtcgtgttgatatggtttgttgatttgtgcaatcgatgatgtgttctcgagatccatgtgtgcttgcaattgcttgatccatcatagcatctcttcagtactctgctattttcaccatgttagactaatgcagaaattgttggttctcatgactcagattgcattaattagtgaatcattatattgcaacgaacaatgattcagtgtgggggatcctgttcatgccaatttttcaggctaatcctcctcttccctcgccgaaagtcgcttaatcagcatccacagtgacagttatgctgaatcagcttgattcatgtcgaatttcccatgggtcaataacttgagactcgtattattttaattttctggagtctgtgagttcttatcactttttgtttattgagttccagactgaacagtaaagaatctgcaagtgatacatcgaagtcgtagtgaactgccaaaattttctcgtggttattgctggtgattaaccaaccaaccatctaaattttaccaacattttcttaccatcattcacaagatcctgagtgcaaattcagaaaaatgaacgggcaatgcagagataattatcctcctctccgcgtgtcaactttttctctcatttgatccactcttctgtagagcagggagggcagaagaacatcataatctgatcagtagttcagtactagtgaacagaataccatgacgcctaacatcaggctgtgttactgaagtaatgcctaaatgctgataactttgggtgaataaccatctgttaactgtttaaccattcttcacaacgttctaccttatgcaccgtcccgtactgccgaagcgccgccgccgtccgagaagggagaggcggtgtagcgaaaagaggggggggggggggaagggacgcggacgacgacgacgacatggagatggcgcggagctggaggggattgcctgcacgccgccgccgccgatccggtggggaagagaaaagtgagagaagggagagagagagagagggggaggaataaaggatgatatgtgggccccacatgtcagtaggtctcacatatatttttttaaaattttaatgctatataagcgtcacgtggcatgaagaccagatcaacacccccacgacaacaaaaccacccttcaaaattgctagagaattcaaattacactggtttcaatagttcggtcttacccgatattttagttaagggtcacgaattagatttgatgaacagttaaggaagttaaagtggatttttttccgaaggtaaaatgtctttctacatttgagcccattaatcttcctcacggggaagatgcacttgggggcttggggcccaagaaagctagccctataaatgaggcccagtctgatcgcatgctggcccacccaccctcttcttccaaaccaagccgtcatctccacccgcttccagaaggaattttttcgtttttagatttttttttaatatttacagaaataatctatcgaccaaaaaaattgcagaaatagcccctgccgcccaaatggtggccggcaagctgacgtagcagacggtgggtcgaccgcgccgtctgccgccgtcggccaaaattgcgattaggcccttgccgcccaacaagagggcggcaaggggctaattgtaattttggnnnnnnnnnnnnnnnnnnnnnnnnnnnnnnnnnnnnnnnnncgggtgatcacgtctcagggtcttatcactcg

SEQ ID NO: 15771 - DNA, 534 bp, Oryza sativa
ttatcgaggaaagaaaccgtggaggctcttacgaagtgaagaaattcccctcaattgaacatcctggcaagagtgtgctgcaaagctacatgcatgcaagatggcattcgtgaactgtcgtcctgttctctgcattgatgggacattcttgacaggaaagtatcggggccagatactaacagcaataggggtagatgggaacaatcaggtattgcctttggcatttgcttttgttgagagtgagccctcacaatctttcagaactcagtcacattcagtactctcttccccacttgcttcattacaaatccgaccggctttcgtcaatggctagacgccggggtgttgaggatccaaactggcgtagcgatccttgtgtatacctactaccaccttggtgccagcgtcctctctgcctatgcgggtgatcgatgccaactaatggcttcgaggaatcctgatattcgaggagggcgcttttttaggtgccctaactatgaccgtgaggtattttattatctgcatatgcttatt

SEQ ID NO: 15772 - DNA, 1701 bp, Oryza sativa
ggattcactaggttgattcatatggacacatgggagcatgtagagttggacagatggttattggtcctcccggccaaaaataaaaaagagaggaaaaagaaaaggagagatttattggtccaatgtgatcatcatctttagtaacacagatatgatggtaaaactacccgtacagattaacagatatgatgcctaccaacctaccatcagccatcaggctgtgttaccgaagaaatgctgatagtataacatcatctgatcagtactagtgatcatattaacacgctgcctatcatctgtgttactgaagaaatgctgataacttaggatctgaagaaatacctcttgactgaagaaatatactccacattttacattatgcacataacataggaacagatcctctgaagagaaaaaaaaaactagaatattagggaaggacctaatatcaaataattaggaggggtgaggctttgaatccaggtcgtctagcccaccaccttgtggagctagccggaagacccctgggcatttctcgatcctctgaagagtggcactagcctacctcagttcatcttggactgtcagcaagaaactcaaaacaggacgcagaagcaattcagattcactgcaaaaccgtttgatgcaaaacatacttctatcaggaaaactagccactgcaagtgacacattgcattgttattgactgcagcataacgatgtactaatgcaatccaagtcatgacgaacggcaaccattggaagcatattgcgttcttgattcactgcagcatcagatcacacaaattcatagtttcatactgcgttcacgattcatgtagttctgacttgaaaacattttctgctacaaaaggagaatttctccagcatcatagcaactaccaatccatgattatgacatcaaatctagactgaaactgcaactgttgactgaaactacactaatccatcgcagcaagaggagacgggacgggacaaagtacaacggctgcaaactaaaccacatctcggaggatcaaatcaacagcgaatcatacctgtaccaggacgatcaaaagtaacatgagcaatctcaggggagaagccaccccggcggtgagtagtccgacgggccttgctccggcaagaacttgtccacacgaggaacccccgccgcatccgccgccggtagccacttgccggtgtctctgcagggatatcgccgtcgccgccgccgagccgtgaacactgccgactcgcggtagagcctcccgtcatccaggaagtagacgccctcgccgaactcatcgcccggatagtcgcccgcgtcgtacgatctggagcagcctcgcgcgacgaacagcatccgcccacccagcgattccagctcgttccacgcgtacagggcctcgatgcgcgtccccgacggcggctccaccatctcgaacaccttgaacgcggacgtcctcggcggcgcgtgtagacgatcaggaacgcgcctgaccaccatgaggagattgccgcgggactccaccaggtagcggacaacgatgtctccgccataatcgcgcccacctcgcgagaagcgacgaatcgccctgggcgccatcttcatgttgcctttgccgtcttcatggaaaatcccgtactgcgaaaacatggaggtcttcctttgtgatgaggaaaaaggaaggccccctt

SEQ ID NO: 15773 - DNA, 4649 bp, Oryza sativa
  unsure (1)..(4649): unsure at all n locations
cgcatgtgcctgatnnnnnnnnnnnnnnnnnnnnnnnnnnnnnnnnnnnnnnnnnnnnnnnnnncatgtccgggcggacaaagaaggggaggcggaggcgcagctgaacgtcgcggaggctgaggagcttgtggcggaaggtctcgcggaaggcgaggaagagccagccaccgtcgtaggcgccgaagcagcgcgcggcgcgggcgtcgtgcgggacgccgaggccgtgtccgccgcagccgcggagggcgcacgagaaggaagggccgtcggcgcgcgggacgaggatccacgggagcgggcggcgatgcggcgcgtgctgcagcggcttgacggcgacgcgccagtcgtggcagacgcgggccatggtgcggcggtcgacgaggcacgtgaggcggttgtggacgaggcggagggcttccgccatgaagtcacgcgcgggcgccgccgcgtccatgggaaaggcgaaggcggaggcgggggccaggcgttatggtggcaagggttgggccgcggagaaggtggtggaacgcgacgaggacgcttcgtcgttgtgcgccatgtttgaacttggcttcttgaagcaggggaagagaggggaacagagtgaatgggaggttttgaagaagcagagaaggccaagccttttgccagccgagaaagtggttgggcccaatttatagtgccggttttcttgggcctgaagtttggatcgctgctctttgctgagcgtttcttcttgggcctaaatgttcccctttttttttagaacgtaaagtttggatgtacatggtgcagaatcgtgtgcgccatgtttgaacttggcttgtggaagcaggggaagagaagagacacagagtggcttggtttggaagaagaggcagagtcagagaaggccagcctcatggtggttggtgttcatgtcttcgatagttcgattgcattaggtaatgtttggttggtggaataggatgggatgggacgggatgggacgaacttacttttagaggtgttttgttgaggggcgagtggaatgggttggtctctagagaggaatattcctcccagatccgggacaaacccatccggcaaaattggccggacgagctcgtcccacttggacggagcacacagtgtctcctcggcgaccgccggcgctccgccacgaccgcctgccaccaccttcacgaccgccgacgctccttcacgaccgccgacgcttcttcacgaccccctgccttaacactggtcgccgccacgagcgagatgctcggcaccatcccgccactcatcgcgatgctcgacgagagcggctgcggtgatgtcgacgcggcgggctcgagtggcggcgaaacttggaggtagggagggcggcggcggcagatccaaaggagggggactcggcggcggcgaaactttaaggtagggagagcggtggcggcggatctggcgcaggggatctcccgatccagccgcggtgacgacggtgggccagcgggttgggtgctccggcggtggtggccgtcttgctgctgccgttgtgcttgatccggttgttccacgcgtggatgcaggtggcgcagtcaacggtcgttgacggtgatggcaaacagcgtccatcccatttctccctcatcccttcaaccaaacaaaaaaattgggattgtcccatcctacaaaccaaacatgtgagtggaatcatcccaaccccaaaattagggatgaatggtttcatcccatcccatctagtcccgaaaccaaacacatgcttagtggatcatcgtcgtgttgtagttagtaatgcattttctgcgatgtgtttactcaacattacttagcgttttttctgttaaaagaatgcattgcattgcatcaaaaccgatttgcagtgaagatcgatgaattgcttcttgagattggtttcagttgcttcaattctcaggatccatttaagcggatgctacatattaagttcataactattaatttgctgttcttctccacttatatcttttaaattactagaaaaaatgcatgtgcgttgcaacattgcaacaggtgaatgttattttaatcctattattgttatacgatttacatgggatgaaattcactgtgtgaattcgcttgaatatttttttagaaaatcatgagttataattaggagtccaactttactctcaagtgaccatacaagtttttttaaagaaattttttatatgacttcttttgtattttctaaagcaaacagacttaaaatccgactcaaacatggatatgtatttccaaaatagagcgaacttaataaccgattcaaatacggatgacttaccaaaataccggtaaaaacatcttcaatttttataatagtagagatagagatatattatttttaacatccgtttgacctattgtactccgctcaaaatatgtgataaaacaagtccaatatttaatatatttaaattattttaaaattgtattcttgttcttagctcttatagcagtgtagttactttagataccatgaaaagttactttcttacagcaatatagttatttctagtaacgtggggtaaatatttgcttttattttgtttttagagttactttcctctagcactgagttacttctaataccgtgaagagtaacttctatttctccagacttgcttttttttctagcaatatagttactctagtaatgttaaaagctacttctatttcttcaaagttttttctaatcccataaaaagtacttctatcttatcagttttacttccctctagaagtgtacttacatctaacaccataaaaagttacttctattctttttataaaaagattattttcttccaagtgtgtaattactttgaatacctaaagagttattttctatatgacgctaaattactctttacaaaatatttatagtgattacttccaaataaagaaaattactttctcctctcaatataattactttgtatttagttaggagtcttttctatattttacttcgcatagtttcttatttcaacatcattcaatatgtttcctttcaatgctactcaaaagtgccggttcgttaaaaaagtgctacacaaaacactagacatggcacccatccgacctcaaaacactaggcatgacgagttggcgtcacaaccgactcccctgttttagttttgaaattttttattaggattaggaattatcttagacgagaaaaattatcttagacgaggctgattcagagtaggaaaaattgcacacatcagtaggagactaggaggacatgatactgatcgtctgatccttctcgcattgggcgttcatggcctcgtgggctacataaaaggccatctaaaagcccatagagaataaatgaggcccattatacatttgagcccattaatctgcctcacgagggagatacacttggggcccaagaaagctagccctataaaagaggtccaaactgatcgcgtgctggcccacccaccttcttcttccaaacgaagccgtcatctccacccgcttccagaagcagaggaatcaatcccacacacacctcgccaccggcaagccgcgcctccgcctctcgccctcttcaatggacgcgccatggttcaacctcaacgccgacgtcctccgcctcgtccacaagcgccccccgtgcctcgtcgaccgccgccgcatggcccgagtctgccacaactggcgcgtcgccgtcaagccgcagccgcagccgcagccgccgccggggacgaggccgctcccgtcgatcctcgtcccgcgcgccgacgggccttgcttcgcgtgcgccctcgacggctgcgccacccacggccgcggacacccgctcccggccgaagcacgcgctgcgcgctacttcggcgcctacgacggtggctgggtcttcgtcgccttcggccgaattctggagtacgcgctactcagcctccgcaacggcacgcgattccacgtccccgacatgagcatgggcatggtggccgcgaccctctcttcgcctccgggcgacgaacgctgcgtcgccgccgccatcagccattcctgcatgatggacaatccacgaatccatgcattcgggatcctgaggcatcgagttgcggaggaggcgactcatgatcctgctgagttcgtcaccacgtcagttctggaggatgtcatacaccacaacaaagccttcaaattcctcacaagagaagaaaacctccatgtttttcctgtagcgggcttccacgaagacgtcaacggcaatcttgagataccgcccgtggaggttcatcgcttctcgcgtggcgggcgagattacggcggagccgtcgctgttcgctacctcgtggagtccggcgggaatctcctcatggtcgtcaggctcgtcaccgatcctcttctcttgccgacgaggacgtcggcgttcaaggtgttcgagatggtggagccaccgacgaggactcccatccacgacaaggagcccgcattcgcttggaaagagctggaatcgctgggtgggcggatgctgttcgtcgcgcgaggctgcttcagatcgtacagcaagaacaactaccccgacgctgatgtcaacgagggcgtctacttcttggatgatgggagactttacg

SEQ ID NO: 15774 - DNA, 4889 bp, Oryza sativa
  unsure (1)..(4889): unsure at all n locations
cagaatacccctgcaaagacancggcaagtggacgcggncggcggcgggtagcagcatggacaaggtcttccggagcaaggcccgttaacgtactcaccgctggctgggcttctcccctgagagtgctcatgttagtttcacctgtctgaaatgtgctatagtgtagtttcagtcaacagtttatggtttcggtcaagattggtgtgataattgtcggttggtacagttgctactatgctggagctacctagtaaattctccttttgtagcagaaatgcagtgtggtctgatgaattacatctatgcagcaatgatattgcagtcaatagtaatggaatgtgtaattttcagtgcttatttttcctgatagaagcatgttttgcatcaaatggattttacagtgaagctgaatttgcttctgcaccctgctttcagttgcttgctagcagtccaagatggagttagctgaattttcaatggctcccacacatttcataactttattatctattcacttttccataagttagctgaatttttaatgggcttctcaaattgctgctgggaaacatgcagattgtttctcttctctttcttcatactagttgtttcatagcaacttttttctttgagccagttctgaacttcagatatgacagttgttgattgtccggttacttcagtctgtgatgtttcgtccatgtgtgcagtgtacttgcaattgtttgatctgccataacatctcttcaatacttcacttcatgatttcagttgctgtccagaaaatggttggtgttaatggcttagattgcatatttgcagcagtgcttcggatcaaacggattttcagtttccgtataagaagtagatcgtttatctttgctttcttcataggactagttagttgctttatgatcagttgcatcggggtagtaaataatctaccttgtgttatttgttcttctgtaggaatagatcgtggcacgggaaaaacaaattcagtggtactatcagtatagtaccacacagatacatgtatgttgataactgtttcattaatcagttcactgctactgaacagaggatgttctgctcatttggtcatctgctctacaggaaaaattggttgctcatttggtcattctgaaattgtagcatagtctgatggtagtggtaccaccaaaaaaaagttcttcagacggttgtttcccctttctcagtacctatatggtaaaacgccaagcaatgcttttgccgagaatgacacattgacacccatctccctgcttgagttttgaaattttgattctgaataatttgtgttcacccggttgatgcagaatagcaatggtcaccctatttcagtatttctgtttcgttttactccgaaaaaatgcgtgttgaatttgagagattatgatacgagtacattggaatatgggttttgaaatatcgagcaggctggccctattggcccagtgaaaaagtaaaaccgtggggcccacgaaaactggcccaataaataatgcccagtctgatagcttcgttccccagcccaaccccctgcctcttccaaaccaaagccacccatctcccacctcccgcttcgagaaacagagcaatcaatcccacgcagccacatcgtcgcaatcgatcgcctcgcctcacctcgcttcgcttcctctccaatggagtcgctccaccacgacgtgatccgcctcatccacagccgcctgccgtgcctcgtcgaccgccgccgcatgggccgggtctgccacagttggcacctcgccgtcgcggagaggcagcgcagcaagctcccgtcgatcctcgtgccgcgcgcggacggcccgtccttcgcgtgcgccctcgccggctgctgcgccacccacggcttcgcccacccgctcaaggacgacgcgcgcgccgcgcgctacttcggcgcctacgacggcggctgggcgttcgtcgccttcggccacaccgtgggctacgcgctcctcagcctccgcgacggcgaccggctccacatccccgacatcggcatggccgtggtggccgccaccctctcctcaccgccggacgacgaacgctgcctcgccgccgccatcaacctctgcttcctgattgacgatctacgcactcacgcgttctggcccatgcggcgtcaatctgcggctgcgccggagaaggcggcgaaacctgcaaaggtcatcagcggccacgctctggaggatgtcgtacaccacgacgacgccttccatttcctcacgagagaagaaaacctccatgtttttccggtagcgggcttccgcgaagacgacgagggcaatctggagataccgcccgtggaggttcatcgcttctcgcgtggcgggcgagattacggccaaaacaacgctgttcgctacctggtggagtccggcgagaatctcctcatggtcgtcaggctcgttccccatcctccccaattgccgccgaggacgtcggcgttcaaggtgttcgagatggtggagccgccgctggggactcccatcaacaacgacgaggcaccatacgcctggaacgagctggaatcgctgggtgggcggatgctgttcgtcgcgcgaggctgctccagatcgtacgacgcgaacaacaatccgggctccgagttcagcgagggcgtctacttcctggatgacgggagactctacgacgaggagttgatgctcggtgagcccgatttccgggagtatccctgcagagacaccggcaagtggttgccagcggcggaggcgaatccccgagtggtcgagttcttgccggagcaagccccgtcgagctactcgccgccggcgtggcttctcccctgagattgccgtcgagctacaggtttttgcttgctgtcgattcgatcccccgagatgtggtttagcttgcagccgttgtactctgtcccgtctcctcttgctgcgatcgattagtgtagtttcagtccagatttgatgtcataatcgtggattggtacagctgctacaatgctggagcagtggagattgtacttggtaaattctcctcttctatcagaaagagtatgcaagccagaattacatgaataatgaatgcagtatattcaactcagcatgaatatgtgatctgatgaattctacatgaattacaatggttgccattcttggcttggatttcattagtcggtaagattgcaatgtgtaattttcagtgcttatttttcaggatagaagcatgttttgcatcaaatgtattttacagtgaagctgaatttgcttctgcagcctgctttcagttgcttgctgacagtgcaagatggacttggctgaattttcaatggctgctacacatgttcctaactgaattaactattcacttgttcataagttagctgaatttcagttgcttgctgacagtccaggatgggctgaggtagtgccactcttcagtggattttagcagaattttcgatggctgctacatattttcctaactcataatgtagcatgttaagtttaccaaattactgatacacatcggtttcagctagctgtgaaagatgccgatagtttacctgtttgttcttgatactagttgctcggttctgttgttgtataatcgtctgaatcttagtggagtactattgattctactgaatttatttactgcaccacaatgtattcctttattctgtgcataaggtagaacgttgtgtatgttttagtagcagaagaatggttaaacagttaacagatggttattaatccaaagttatcagcatttaggcattacttcagtaacacagcctgatgttaggcgtcatggtaatctgttcactagtactgaactactgatcagatgatgatgttcttctgccctccctgctctacagaagactggattaaatgagagaaaaagttgacacgcggagaggaggatgattatctctgcattgcccgttcatttttctgaatttgcatgcaggatcttgtgattgatggtaagaaattgttggtacaatttagatggttggttggttaatcaccagcattaaccacgagaaaattttggcagttcactacgactttgatgcatcacttgcagattctttactgttcagtctggaactcaataaacaaaaagtcataagaactcacagactccggaaaattaaaataacacgggtctcaagttattggtccatgggaaattcgacatgaatcaagctgattgagcataactgtcacggtagatgccatgctgattaagcgactttcgaagagggaagaggaggattagcctgaaaaattgaaaaattagcatgaacaggataatgatgcaatcccccagactgaatcattgttcgttgcaatataatgatgcaattaatgcaatctgagtcatgagaaccaacaatttctgcattagtctaacatggtgaaaatagcagagtactgaagagatgttatgatggatcaagcaattgcaggtacacatggatctcgagaacacatcatcgattaactggacaaatcaacaaccaccatatcagcacgacaacaagtcatcagacgatctaactaagaacatggcagtctcacggcagaatccaaaccggcgacgtgtagtacgacgggccttgctccggcaagagcttgtccacgcggncggtaacccgcttcgncgncgncgncggnggnggcggcagccacttgccgttgtcgctgcaggggtactggggaaggggattcacgaattgggacgcctcatcgtagagtcttccgtcatccaggaagtagacgcccttncttgaactcatcgcccggatacttgttcgcatcgtacgatctggagcaggctcgcgagacgaacagct

SEQ ID NO: 15775 - DNA, 3995 bp, Oryza sativa
  unsure (1)..(3995): unsure at all n locations
tcgtgacgaaatgcangnnnnnnnnnnnnnnnnnnnnnnnnnnnnnnnnnnnnnnncatccgcccacccagcgattccagctccttccaagcgtatggtgcctcgtcgttgttgatgggagtccccagcggggggtccaccatctcgaacaccttgaacgcccatgtcgtcggcggaaagaggggaggatgaggaacgagcctgacgaccatgaggagactctcgccggactccaccaggtaacgaacagcgaagcctccgccgtaatctcgcccaccacgcgagaagcggcgaacctccttggccggtatctgcagattgccgtcgtcgtcttcgtggaagcccggtaccgaaaaaacatggaggttttcttctttcgtgaagaaatggaaggctttcttgtggtgtatgacatcctccagaactgacgtggtgacggactcaacagcagtcgccttctactcaacttgatgctccatgcgccagaacacatgaacgcgtggatcgtacatcacgcagctgtggccgatggcggcagcgaggcagtgttcgtcgtccggtggcgaagagagcgtcgcggccaccatgtccgtgagcgtctcgacgtcagcgaggggtaatttctcgtcgccgcggaggctgaggagcgcatagtcccaggtgcggtagaagcagacgaagacccagccaccgtcgtaggcgccgaagtagcgcgcggcgcgtgcgtcggccgggagcgggtggccgaagccgtgggtggcgcagccggctagggcgcacgcgaaggacgtcctgtatgcgcgccggacgagtatcgacgggagcggcctcgtccccggcggcggctgcggctgcggcgcgacggcgacgcgccagttgtggcagactcgggccatgcggcggcggtcgacgaggcacgggaggcgcttgtggacgaggcggaggacgtcggcgttgaagtagaaccatggcgcgtccattggagagggctcgagaggcggaggcgcggcttgccggtggcgaggtgtgtgtgtgtggggaatgggttcctctgcttctggaaggaatttttttcggatttagatttttttttaaatatttacagaaataatctatcgaccaaaaaaattgcagaaatagcccctgccgcccacctctggggcggcaagctgacgtggcaaacgggggaggaacggacggtgacggagggagggttttttgcaggaaaacccttgccgccctctggtggggcggcaaggggcccgaatgcaaaaaagccagtcggggccggctattttgcaggcggccccttgccgccctctggccgggcggcaggcctcgctgcctataaaaggcctgctgcccagcccccagccctcattcttctctcctcaattccagtgaaaaaaaaagaagagaggggaggagaagagaagaaggggcgaagccctgccggattcagacgccgatttcaggtaatattcatagatcctatatgtgactattgagttaaatagtgtgtattctttaaaaatttgtttgaataaatgcattatatttttagggttttagttgtactaatctagaagtgcgtattgtagatatcggtaactacgtagatctgctagtttggaattaatacattaccgttgcattggcttacacaagaagatattacgttgtagatgtttattgcatgaaagagtaatatgatctagttatttcgttgacagatatgtcgaacaaacaaatattccaagtttaccatggaccaggaaacgtccgttacgggccaactggggtagatctgtcagattttattgtatcagaaaggggaattgagagaccggctgagaggagtgtaccttctataaaaggatggttaatgaggggcttgagagttgatccacagacaagtgacataacaatcaatgttatagtaagtcgggcaactgagggtttttattgggaactaatgccacttcaaaactctcgagtgtggagatggtatttggaaaatgcattgcaacgcgggtggcctctagctttggttccgtttgttcacccgaaggatccaggtgtgcagacgaacatggatgatggcgagggaccaagtgctgaagtaaacgagacttctgtggaggaggtcaacgcacgagaggacgggggcgtagtagctccagtgggcattcaaccaggtggagtggctgacgagggggagactgtcggtgccattgtggatgaaatggagagggaggattctgacaacgagcgtgtagaggaagttgattcgtcagatgatgagacggatattaatccagcagaatgggctagtgaggatttttctaggctgatcgtctctgaagaggatagtgtgagatgggagtacaaagaaaatgaggttattcagggagcgatttatagtagagcagaagatatgaaggaggcggtaaaacattttgcagtgtcacttcatagagagttttgggttgccaagtcgaaccggtcgcaatatgaagttcggtgtgttaaggaaaaagatggttgtccctggagagtgcacgcgtataaggggaaatggaaggattattggacagtgtcagttgttaccaagcatacatgttttctacctagtgttcagaaataccacatgaacattacatgtgcatttgttgcatctgagatgtatgcgcatgtcatcgataatctcacatatgaaccaaggtcaataatccgacacattgaagagacatacaagtatactattagctatgccaaggcctggagggccaaacagaaaataatagagatgagatttggaacttacgaagcctcgtatgataatttgccacgcctgcttggtgttatcgaggaaagaaaccctgggagctcttacgaagtgaagaaattcccctcaattgaacatcctggcaagagtgtgctgcaaagggcgttcttagctctacatgcatgcaagatggcattcgtgaactgtcgtcctgttctctgcattgatgggacattcttgacaggaaagtatcggggccagatactaacagcaataggggtagatgggaacaatcaggtattgcctttggcatttgcttttgttgagagtgagccctcacaatctttcagaactcagtcacattcagtactctcttccccacttgcttcattacaaatccgaccggctttcgtcaatggctagacgccggggtgttgaggatccaaactggcgtagcgatccttgtgtatacctactaccaccttggtgccagcgtcctctctgcctatgcggtgatcgatgccaactaatggcttcgaggaatcctgatattcgaggaaggcgcttttttaggtgccctaactatgaccgtgaggtattttattatctgcatatgcttattcattccgtatgggcaatcgctttattcttcgtaacactactctattcggcagatccgcactacggcttgcgcatacatcgagtgggtcgatacagaaaatcccgttctcgacctaaccacttgtttacaagaaggtcgctggtatttcgcatccgaaagtactgagcaatacttacagagaaaagcggcttatgaacgacaatgtcgtgaacaacagagcgactggcgggtgctaactacggcactccctccatgggaagcccgtccaagatacaggtgtggtgatcgttgtcaggttcttcgttccataaatcctacaacattgggtcgaaggttctttgtttgtccaaatattcttgacgacgatttcatggtaagaatattttgattacatgattccttattttctcacaacatttactaactttgcttgctttacatctattctttcctcccaggaaccaccaaggagatgtcaatacagagaatggatagacaccagaagggttctaactccacctagccgtgttgtgcagcttgaactaccagagcaatacagggttactaaancgggttgtgaaagag

SEQ ID NO: 15776 - DNA, 1302 bp, Oryza sativa
  unsure (1)..(1302): unsure at all n locations
gcttagctgcgtgcgccatccatggagccggccacgggccgcgctttgtgcactgctcnccgtattctctcgtggatttttgtcccctcccaaccagataaccctagtggcactcgggcccagacacacatacatacgtacctccactcacacacaaaccatggtgtacctagctactagtactaccagttatcgttcaaccggaatctgttgtaacgcacggatacttagctgataggatgtacttccgctggtttcattttaattgacgttttggacaatgacacggtctataaaatatatttttgaccttatttttctattataatatatataataaataaatgtatgttacttttattatagtgctttgaaagacaaatctatatatgttgttctaatttctttaaactaaatatttttaaagttattgatggtcaaagttataaaagtttgacctcaaccttgtctaaaacgtcagctaatatggaactggagggagggagtatatcctctctccgtgtaaggattaatccttagccagttcctcctgctctgggacatggtacagcctatccagctgcaacctcggatggaggacaaccttatctggcggtggtcgaacaataccgccttttcgatctacctcgtcggcttataaagctttcttcacggggcaacacttgttcgcgtgtaccgaccccctctagcatgcgcaagcgcttgcgaagtgctggtttttcctctggctggtgctgcaaaagtgttgttggatcgccgatgtcatgttgcgtcataccatggagagccacattgcttgccccttctacacccaggagcaggagacgcgaaccatatcatcatcgcttatgtcttcgactcttcgctcgctaggtctagttccaaatcctcgcgccgctggatgggctgatgttgccctagaccatcatttttgggtccaagaccggtggccgcaaacttggcatcgacttgcgagggaccatcaccgccccttcgattctattgtttcgttgacatcctggcaactatggtagaagtgtaatgcgtgtcttcgacgctgtcctatcgtcagttctgatcatcgtcgagaggattaaacaagaaggaaggctatggacgacagcggatgtatcttagttaggaggcttcttgggaggatatgcttgtgctcgtttgttttcctcttgttttggggacccatctcgaaatagcgcttctttgtgcgtctagctagcccgcccacccttacgagcgctccgacgtattcgtggtatacaaaat

SEQ ID NO: 15777 - DNA, 712 bp, Oryza sativa
  unsure (1)..(712): unsure at all n locations
atgcttgaaatttttcaaaagnaaaaaagaaanngatccacannncttttatgagtttgatttggatgagagcaagaaagtgaaaaatctgttttggacagacgggagatcgagggagtggtatgagaaatatggtgatgttgtgagttttgacacaacatatttcaccaacagatacaacctcccgtttgctccctttgttggaatttctggacatggaaacacaattgtttttggttgtgcatttttgcatgatgagacttcagaaacatttaaatggatgttcagaacttttttgaaagctatgtcacaaaaagaaccaaaaataatcattactgatcaggatggagcaatgagatcagcaattgctcaagtatttcaaaatgcaaagcacggaaattgcttctttcatattgtaaagaaagctttcaatctatctggaaatttgttcaaagcaaaagaagatagtggtagtggctatggttaagttacatggatcagagctaaatattccctttgtttcatatcataagaccctttaagtttgatcaagtttataaaaaaaatatagtagtatttttaacacaaaataaatatattattaaaatatatttaatgttagatttaatgaaatcaatttgatnnnnnnnnnnnnnnnnnnnnnnnnnnnnnnggntttcaacaannggttctacgagagnttaatacagct

SEQ ID NO: 15778 - DNA, 702 bp, Oryza sativa
  unsure (1)..(702): unsure at all n locations
ccgtggttttgaaccgcncccttttgatgcatgntagnaccgcgaattnggtaccccgatgaaccgaagtgaagaatacggtttcgccctgattcccagctgtcgcctgtggtgttgggtgttagaccgttggttccgctggggctgttgttgatggtgttcgcctccgccgtgtcgtcggttgtattctcgggctgtctgagctgcaaccaaggttaaggtaaataagtcctctatttattttaaggattgctatgattcatatttgttaccgtgggtaccaacaccatcttcctgtcatgagatgctcgggcaatgctctcgatgttcattgaagaaaaatgaaaatgaacaaaacaaaagaaaatatgctccatattatgtcgcatgtcatagtatataatgcatgtcaaaacgtgagcatgcactggtcatatatccacaataaatataaaactaagatataagcagtctgtgaacatttatcaattatcagaagattattagcaactgaagaccatgcaaatatgtgggatgcgacccaatggacaaatctgaggtaaataaaaaaaaatgagtagagcatgtttaaaatcaattaatggggcatgcaagcccaagttcagactttgtaaaagttaaattaatttaangattaattggttcaataccaaagttgtagaaattatagtatatttgggg

SEQ ID NO: 15779 - DNA, 1571 bp, Oryza sativa
  unsure (1)..(1571): unsure at all n locations
gcaattcgacactcatgctcagcatnnnnnnnnnnnnnnnngcnttagntagtcnnatcttgtttcactacgtgggtaagcacgggttccgtcgttttgtgggttctccatgtctacccactcgatgaagttgcacattggacgatatgtctgcgtaagatgttacaattgtgtacgaagaagttagtttttttatccatttgaacttcgaatagatgaagcatacctgatcaaagttcgcgcattggaagaatctcctgccccgagtttgtatcatgagggaagacttgagtatgcatccatccccacaatcgcacaaaggacggtcacaccatggtggaaaccaaccagcaaaaggatcgcttcgccagttgagacgctcaaggaatggcgcttccattttcgtgtgttgtgtgctagtgggaaagaagatatgaagaggttgccttcagattgtcaattatatagcgtcgttttcactgcaatatatgtgaactcaatgagatacattattcattagatgtgacaagacgatcacgcgtgggcgtgattcactttatgtcaacaggcagcgccgaaagttgatagtgacaactcgagctgccgcttttcatgtgtgctgttgtggactgtgcgcgctactggatctgacactaccgtgaagcgccgaaagtgtgttgtcgtgagcataagttgttctagcaccatatgaatgaaaagaactatgtagacgagacaaacacaagtagtactgcagtagtaatagcaaaagtagtactgctttacaagtttgtaagccaaaagaaacggtcacataaggactgaagaggtagaacactactgacgaggcctccttacccctgtccctcctaccctgcgccctaatgtgcccctgggagtacgtgagtcagtccgggggtacggcacggccaacccgtcctgcctgtacaggtgtgacctctggctgctcctgagtgtgcgcctctggagctcctccaagctgagaggagcctagtacgtcgtggtggtgtgcaccgtgcaagtcgtcgtcgtagaactggctagtaggaccagtcctaccggcgtgagacgaagaggccccagtactgaagatcccggctgcaaatcctgcaggacaaggaccatcagtttcatacaggtatttaatagtattaataaaaagtaaagtaccgtgtgggcgagggatcgacgctccgtgagaggaagagctggcgaacgcgcccgaagaggtggcgaacgcccctgcggagctcgcggaagcgccggtcgtgcctgcgaacgcgctcgaaggcagacgaggtcctgcgatgaggaaacgtgccgttaaaacatggtgacatattcgtgcaaaagctgaaacaaaaatgaactaatctctgggctgaactgtaccgtgcgaaactggtgctgtaggtcgcactgctccgaagctaggggcgctcgaaggcaaacgaggtcctgcgaggatggaacatcaagttacgacggggtgatgttttcttcaaaaccggaccaaacttaaggaacctttggctgacaataccggcaaa

SEQ ID NO: 15780 - DNA, 1016 bp, Oryza sativa
  unsure (1)..(1016): unsure at all n locations
gcggcacnnatggtcatggcatgcaaagagctgccccatggcgatcgttgctgttgaaatcgtcaaccgggcgccaatgtggcagttttgccacgcccggtacttgccacgcccggtttgctggcgtggcaaactgtttaaatattttaaaggaaagtgtcatggttagtttgtaaagaaaagctgtttaaaagttcatgtgtgggattagtttgtatttaaaaaaatagtacttgacgaagcttggggctcctcaccgggagaccgcacaagcccccctttgccggttcggccgggggcgctaggtgagtttcttcaccctcgatctgtggaatgttcgcgagagagcaaaacgcacgagacacgggcgatgtagacaggttcgggccgctgagaagcgtaataccctactcctgtgttctggtggatctgtgtgtgaagaagttacagagagtcggagagcaagagagttcaggctctagaacccctcttcctctttctctcctctacgagctcaggtattctcagagtcgtctaagagtcctccctccctttttcgttctccatcatcccttttcggtgggcaaggtcctccttttatatctcaaggggataccacatgcaccacttctacctacttttcttttgggtggggacccaccctatcttgaccaaaaacttggctcgcgccttcgcctggaagctaaatcacaacttgtccttgagtgaggcccagcgccgtcactcgcctccacttntacggaagtagatgcagcgtgggaacacggttgtctgccgaagacgtgaccggggttagaccagtcacagaccggtcattcttgtccaccacgcgtcagtttaacatgccgtacatctggccttcttcatacaaagacttacttgtaatggttgcgatgaagcctggcatgaatctggccgggactgacgtgccaactacaggagttagcacgccggctccggctagggaccagtgcctggaggctctcatcattcca

SEQ ID NO: 15781 - DNA, 4054 bp, Oryza sativa
  unsure (1)..(4054): unsure at all n locations
tgtgttnncattttngtcangttangaaacnnccccganttngtgaaacnnaccaccgagaattcgtaccccatttcttttagataatactccctccattttaggttataagatgttttgagtcaaagtcaaattgattcaagtttgactaagtttatagaaataaaatagtaatattttcgacccaagataaatttattataaaaatatatttaattattaatttaataaaactaatttggtaatgtaaatttactatatttgtctataaacttagttaaatttaaagcagtttaactttgactaaaggcaaaatatattataacctgaaacagagagattataaatgtttccatgcaccaaccaattcatcttttgttcatcaaaaaacacgcctgaattttcatctaaaggactgccaataagtaaacaacaaaaaaaacagaattgaattttcatataaaagactaagccgatagtaaataacaacaaaaacaaaacatgcctgaatttttttgagtgctcagacatggaatggaagctgcaattatttatttaagtgtgcgtccgacaagatttgaacttgagacttgtagctccgataccttattgagtttttttttttaaactaacgataccttattgagttgcatataactaccaattcaacccaaatattaaaatgatgaaaaaaaactaacaattcacttatactccaagtgatactgatcttcttgttcttgtatgcaggttgctcgcgtcatactgttcgtatacttcttcgctcatgtgtaccttcacttcgaccaggtaatcataatcaaccaatcgtcttctcttcagggttcagctttgtgacagtctgttgttaaattagttcctggctgttcgattaatttgcaggtgaggacggtgttcccgctagggttctacagtatgatggcggtgccgccggcgatgtcggcgatgaacctcctctggttccggaagatctgcaaggggatggtcaaggccatgtccagcgccaaccgaagtcaatgcgtcaagacagattaggacttgggtaaaaggagatgcaacgctgtctggaagccaaatgcttactagcttgcttgtttgatgattaactaaactgtaatcaatcaattgattatttgaaaaccactcgtgcgtacaaaatctgttacttaagagtagatatgtcccacactctttttctttgttcttttaaagactcattgaccgtgtattatggaataggccaagatgtaatacatttataatctctctgtttcaggttataatatattttgcctttagtcaaagttaaactgctttaaatttaactaagtttatagacaaatatagtaaatttacattaccaaattagttttattaaattaataattaaatatatttttataataaatttatcttgggtcgaaaatattactattttatttctataaacttagtcaaacttgaatcaatttgactttgactcaaaacatcttataacctaaaatggagggagtattatctaaaagaaatgcaaaatcagtcactaatcacttggattttggtcctgatcgtcgtctgtttgccaggtttgtctctgcaatatctcctggatgcgtccatgtaagtgcagacaaaggcaagcggtaggcatcatcagcttcagtatatatacgtagtttaattacattgtcatcgatcgatgatgcatatatcctgaattaattagcacggtacatctacgcatggccttgtcagcctgaattaattagcaggatatatacatatataaatatgttcgcatggccttgtaacaataccaggtcaaattaacagaccacaattaaacatgtagcaaactactatgagttcagtgtgtaatagcacataggaaacgatgagtttgacatgtggaggcaccggcagattgatgctggaattctgctgcttgatgccaattagtccggccaattactcaattagtagctgaagaattaagcaagctaactggccaaattggttgatgatatcgccagccattgattcgctgcctgcaagcgcagcctagctcctcgtcgactcgtcctcaactagcgatgatcaccaagtgatctatcagctcgccattaggaagaagctactgcttcaaagctattttcttactcatttctcaattacacatcacaatcatgaaatgtgatgacttcgattaattcttaggggttctagtagctcggtttcggttttccttgagaaaagcaaagaaaattacgcatcgcaatcgtcaaatgtcagtactctgaaacctcttaggagttaacatcctacccagtttttttctctccttagcaagattacacatcagaatgacttgttcatcaatcaatcttgtaatctgaagtgtcaatgtcgagcttaactgttattgcaggagctttgttggatactagtagagagatgcagaattgctttgctccaataaatttacctctgaattttctggaaaataccggattgatgtacacatgtgatcaggatgatcattagctgcttaaatattcagtgaaactatgagctaattaaccaattaccaaagactcttaccaaaaccatgcagctctgctggctcattgtaccggccaagcttacactggccaatctgaatacagccaaagaatcatcagattgatgtttcgcagattcctgccgtgtagattgctctcacactgccactagcttccaggttgacctagtaatactactcaaatgataactagggcgctctaatctctttccaattgtaaagtacataaatagttatgaaaaaattcggaaaagacagaggactagatatcctccctattcaatattttaagttacgtattggatactacggagtttgcacacactatagttattttaaggtaatggaaacattttatttgagctacagctaatattctaaaattaagttttaaaatttaaaatttgattgcggttgataataaacaagcaagcagcctctgctggttgccacaaaaagtactcctttcgtcccacaaaatacaaacctagtactgaatgtgatgtattctagctagtacaatgaatctggagatgtcacatccagttaggtttgttttttgtgagacggagggagtatatataagcacattgctttctcttgctccactcatcttcagctatgcagaaaccctacttgattgattgatccttgataaatcaacttatgacgggaagaggttcagacatgcaagattctctaggcttgatgcagtttcttgatcatcaccagtatctatacagcagcagtagcagcaacctgccactgcagcagcctttgttgtcccatcaccaccgatttcttgaagccaatgagggttgcgccggcgaggacgactcgccggagttcgtcgagccgccggcggcggcggcggcggccgggacgttcgagcaacggccggagttaggagcgtgcaaggaggtgtactccgaggaaggcggcgcggcggaggagaggacgggcgtggcgatggcgggggccgacgtcgaacaggtggcggtggaggatgaggaggaggctcacggcgtgcggatgatcgcgctgctgatggagtgcgcggcggcgatgtcggtgggcaacctcgcgggcgccaacggggcgctgctcgagctgtcgcagatggcctcgccgtacgcggcgtcgtgcggcgagcggctcgtggcctacttcgccagggccatggcggcgcggctggtggggtcgtgggtcggcgtcgtggcgcccatggcgccgccgccgtcgtgcggggccatcaacgccgcgttccgggcgctgtacaacgtcgcgccgttcgcgcggctcgcctacctggcgtgcaaccaggccatcctcgaggcgttccacggcaagcgcctcgtccacattgtcgacctcgacgtcgtccccggcggcgcgctgcagtggctctcgctcctcccggcactggcggcgcgggccggaagcccccccgga

SEQ ID NO: 15782 - DNA, 5974 bp, Oryza sativa
  unsure (1)..(5974): unsure at all n locations
cggggtgtaccccttttcggaatagacatctccccggggggtcctggggagaaaaaatatatgtaaagcaagcaaagtttgtgaattttgtgagaaaataagggatcatgtattcaaaatattctttnaatgaaatggtggtcaagaatattgggacaaacaaaggaaccttcgacccaatgttgtaggatttatggaacgaagaacctgccaccgatccccacacctgtattttggacgggcttcccatgaaggaagtgccgtagttagcacccgccagtcgtcttgttgttcacgacattttggttaataagcggcttttttcggtaagtattgctcagtactttggaatgcgaaaacacaagcacctttctgttaacaaggtgttaggttcaaaaccggattttttggtttaacccccttgaggttatgcccaacctaaggtgggatttcgccaaataagtaggcttcgagcgagtacagctggtgaccacggcgtgtccggacggtctgggctacacggtggcgggagaccacgacggcacggtgcggctggggtggaagaaacacccccctctacgcggtgtccgcgtggacgtggtgctccccgcctcacgcgcgtgcttaatcgaagctagttttaatcccttttgattagcacaaagtacatggtgattaagcactaagctaatcacccgtgcgtgccaaagccagactggtctcttgcaagtgggcccacgtaggaatagtcacatatgcaatgtattgtactactactactgtggctcctgggccaactcgtcagttgccagctcgggtatatttatccttatatatgcttgtatccacaattctacatcaagtatacaatttttttactgcactgagtataatatagtgcatctaaagaagaatgtttacactacactccctccgtctctaaatacaagatattttgtccgtctctaaatacaagatattttggttatgtgacatatcctagtacaatgaatgtggacaactttcttatactaagatgtgtcacatccaatcaaaatctcttatatttagggaagaagagagtactatttatcactttgtagtactacttatcatatcaatcacttccaattcaaattccccctactctactgccaatcatcatcccgaatcaaactatacattagtatttaataaaaaccattagtctttttttaacctctaattgcagccccaagaaatgaagaacggcctgagttggatagttgcatcaaagacttcaggaaataagatgagctatggatcttgatggtcatttagagaaagatgatgaatattgcaccattgcaagggtatgagtactatcaaagtcaacgaattccaagcatggtttcaacagaacgggcacagaatatatgcagtattttttttgggttaatgccccatgatcctaatctactgaatctacaagccccaaaaggctcttctaaactacaacaccctcacccattttgtgatgctggtgtacgaatcagcatctgtccaatcctcactgtacattgatcaatgaacaaatggaactactactcaacataccacggtagacgaccagtttgcaaaaaaaaatcaattttacttcatatctcagcagcatcctgaaagatcctcagtagtttgggcggtgctcactgaagcccctctcctctcatcaaatttcccgcatacagtgaactctcgctatcgcacaaggtggtgctgttcgtcgaacatggacttccggactccaggactaacaaaattgccttgttcatggattcacattgcaatctatcaagaatggatcatcccttggcaggtaccttctccaatatttcctgtatcgccgtatgccgagttctaaccacggtttcatgttgccgttgtagtgcaatatgccagctttctttatagcaccatgattgactccatagtcatgaccaagaccagactggatccactgtgcttcaataggatggaccagattttgaaaagcaagcaggcctgcaggtaacaccgcagctctccatgacgcttcagggccatgttgcagctgtcaaaagtgagacataggcacaaccgtatcagttaagaatttgcagctcttcgcttaacaggccaaacgtgcaagaaaaaaaatacatatcttaaataaacttcaaggcttcaagcaagtttatcttattagtgaagatcacggtacagtagggtaagttcagttgaacacaaacagaaaatcaagagtatagccatgaggaatatgccttatgtcaaatataacatcgaaagtagtttcttaaaaacaattcttgaaagagagaagaaaagacagctgctaagcatcactattcaatactaaccttttggagtactcgattacgaactgcagtcacatcatgctccctccatttattgagatcaataacactcactccagacatccagatacatgaactagcatcatatgggaagtcaaccaagtatggtctgagatgccttaatctaactcgacaagactgtacagcaccaatcacttttcctttcaaatcaagattccatatgtgtgacaagtctctctggactatagtatcatcttccaaaacaatcacccgtttaagattgctaaacagctcaggaagcaagaaaagagagtgtccaaacactgaaatatattcagttctcatttgggtatttggaattcgggcattgctatgggaagcgatgcggaactcctcatatggtgataagtgttcaactctcctattatccaaatgtgttgcttggaaatcttcaaaattcagaacaccgatagtggcttccttgtaagaatttctaatgaaccaattcttaaatgcataaaagttctgtgcatcagtaacaagatgaaaaaccacatttgctgattcctgaaacactgaaaagaactggtgagtgtcatgatgcagaaatttcaagagaccacatggtctacacaacaaaagtaatatcatacctcagaatttatcacagtcgagttgacagtcatggaagatgcaagaaggttggtagagaaaataacatagtgccggagaactggattttcaagcttttgcacattggagtactccatgtcagcaaaggatttaaagtagtctactgtcaatctcattgaaaggcagtggaggctcttaggtaatgtctgaactccaagccggtaaagatatgcaccttgtcttgcatgaaaatgagcttcatcctcagtcatatcaagcaattgcctcagttttttctcaaaattagtgcattctatcagacatgattttgctgcagctattgtcttctccatctttgccatattggctccatggcttcaaaaataacaaataatcactataacaaaacaaataatcattatagcaaactctaaacctatggggaaattttctgttccaaagtgaatctgtataacacattgagccatcagatcatcagtccactcatcatttagaacttactgctacaattattggtaaattattcatcccaatatcacacttttagcttaatacaatgttattcgatcaaactacagagtgttaatacatttcacaaaataataaggactacgaacatgctaggtgatgaaagagataatcctaaggaatcattcaggtaatgctcaatcaactgtaggctgtcaattatgcataagttatcttgtatacgtgcatattagacgacagtggatatcaaaatctgtgaaaataaaaaacaaacagtgaagcacaacagttagtaggtagaccatttttggtgcaaagtcaggctgcttaaatacccaacagtttcatgtatggtaaaatatcaatttctgaagttagcagtgccttatggattaaagatgatagcttaaaaatgagaactaaagaaagtatttctggaagattacttacaatgcaggaagatcagcatcacatatggcttcgctgagcatgtgctcatgctcttggatactttgcttcatttcatgtgaaagtttttccatcccctcaagttttgctatgcttggatagtaagctcttgcaacaaagagctggtctttaagtctcttcactacagaatctttcatcacttccttgtgttcaacagaccaaacacaatagcttccaaattctagttggcacgattttatactctcatcaccaggtaaaccttgttcaaaattgtccttaggatcagcatcagtattctgcaacattaggtgaaaaataaaaagtatgtaatatatgataattctgcaagtccgcaaacaagttacaaaggattattgaaatgtttctttaaaatattgcaaaagcaaggtgcatatcacatgccctgctcagaaattcatgcgaaagcagcatatatatttactgcacgaacagacaagggcatgttaaaaataactgtaaagcatattagctcttacactcagtaatgatatatcatcaaagatcacgatttgtttgataggaaggcctgcacattacaagaagaattaaagctgtaacttgatatttaaaattttaaaactaaataagtggtcaaagaatgggccctgcttacctggatggattgaggtattgctaatcggtttgtcaatacttggttgattgttggtcccattgctttttgcatcagaattaccggtatttgttttgctccagtcctgtgaacgaacaactaaatcaattaggtaacgcaaaaaaaaattgcatgtttcggtagatagacaagattttcagatgatgcaatgcaatttttgggacatagtgacaaacagttagtaagttcaaaaccccattcagctctgagcctcttacatgccaaaaggaaagaaacagtgccttgattgcagtagaaatgcaaaagagggccatgtgaaacaagatccatgatatggcaaaagcagactgacatttccaaaaaaatggggccatggaccatgtattaaaaggcaattccactcaaacactacccatgagaccacaatcggcacgatagcaactcacaacaagcactctacttggataaaatttcacgcatgaacaaagagaagaaacagctgcggccgatgggctcaaatgcaaaccttttcaatcgatggcggaaatttgttcgtgtcgttgactggcagcctgtcattttcctgcgaaaaaaaaatgcatcactgatctaaagattaaattctcttcccgcagtagtaccccatcagtcatcattgaccaaacctaattaggataaatacacctaaccacacccccatgtgattggaacatttcaggtaatagaacaaaaatatcccagaaatggcaatcatgagcacaccccctacctgcgatgtatttggctcccaaccaccaccctcgctgccgccaaacacctgtgcaacagaaacatgaggcaaaaatcttaacagcaatggattaaacaaatcaaatggcttaagcatgagctactagttagtttcaatctcaattgacactcaccgacacggcgctctcgtcggccaaatacactgtgatatcaaaagacaaaacaaatacaaacaaaatcgagtcaggggagcatagagagagagttgatgagcccctagatcgagcgcgagccggcgagccggacgggaagcccagatctgggagcggagaggctgaagagaaaagtagggttttggcaggggagagaggggtgggtggttacggactggacgggaagcgctggtggaggccgagcagcacggcgagcggcacgccgacggagaggaacagcagcgccagcgcggcggccgcggccgccacgctcctccaccgccttttcgccggggcccccgcgctcgcacccttggccttcattncccgttccccccgaccgaacgcacaggggggagcaaagcttagcttccacccccccaaagcaa

SEQ ID NO: 15783 - DNA, 3876 bp, Oryza sativa
  unsure (1)..(3876): unsure at all n locations
gggggggggggggggggggggggggnggggggggggggggggggggggggngggggggggggggggggggggggggggggggggggggggggggggggggngnggggggggggggggggggggggggggggggggggggggggggnggacgaatctcagccgttggatttgttttggagggctgagatctgagctatgtcaccttgtgacatgcctaccatatgtcatccaatctgaatcctgaaaaggccaagatttctcattgtttgttagtaattttttcctagtcaaacttaacaagtttgataaagtttatagaaaaatttagaaatatttaaagtatcaaattgatttcattaaatctaacattaaatatattttaataatatatttattttgtgttaaaaatactactatattttttttataaacttgatcaaacttaaagggtcttatgatatgaaacaaagggaatatttagctctgatccatgtaacttaaccatagccactaccactatctgtacataacctgtagctagggaggaggataaggaggaagtcacgaagaagttaccagctgcccaggacgccggcaaggagccttacctgagcaaggaagcagcaatcgaggcagggttcgtggacaaagatggcaagatcctgtggtctagctatctcaattacgtcgaacatgggaagactctcccggacgatgaggcatttgctaaggaggcgagagactaccaagaagccattaagaagcaggaggtgaaggtcgatgaggcgaccatgaaggccaggttccatgacttgatgaaggagtatggccgttcatacagcactgaggaggagaaggctcgccgctacgaagtattcaaggaggccaccctgtgggcagacaaggttaacgcactagagccaaggacgatcccttatggccctaacggatatgcagactttactgatgaagagttcaagcgtatgcattgccattgttctgccattgactgggagagatacatcgatgaactcaacactatggctgctcgtgggtggacctactttcgcgatccagatgcgacgacgaatgtcagcgaggcagtgaggaaggtatatatatttccctcactatcatcgcatgtgttttctttgggcctgtttagttccaaaaaaacttttcgtaaaaacatcatatcgaatctttggacatatatatggagcattaaatatagataaaaagaaaaaataattgcacagtttgcatgcaaatcgcgagacgaatctttgaacctaattagaccatgattaggcataagtgctacagtaattcacatgtactaatgacggattaattaggctcaaaagattcatctcgcggtttccaggcgagttatgaaattagttttttcattcgtgtccgaaaacccctttcgacatccagtcaaacgtccgatgtgacataaaaaaattttcatttcactgtaacgccccgacatttgttagccataaacacagcaaactcacaccggggtgttatgcattacctgtgatatagtaccagtcccaggatacactagctggtatacacagaataaatgtggaatcaaagtaaattgctttattacatcactgggtagtagtccttacaaacgttgccatcatggacaggcccacatatgagcaacacagcattacagagaaccataaaatcgacggcacagaagcgaacagcgcggagaactaagcgactacgcactaggcaaagaacttaggcaactaacttattccacaggcgaggcttggggctaggcacaaaacatctagaagtcttcatactcaacttgctcctggagatactcctcagctgtcaggtcgacgtcttcatcttcaaactctatagattattataaggggcaagggtgagtacttaacgtactcagcaagccggggaaaagaatgacatgtcggtctaacaaggaggctacggttttatttgcgaacaccttgctgcatcatcgcgtcaaaatctttcttttgatcaggtgtgaacttttctggattgatggtcacaatgttcccttcatcaacgtccgtgaaacataacttttggattttttctttaacaaatcctgggctagccgaggacggtgatggcggtagtttctcggccatgaagaaaattgcttatctgactcctaatctgtcccaccgggcgtgccaaaagcgtgttgacgaaaaacacgaggcctgggagatctgcttaactccagtgcaggtccaaagctcgccttcgggtgtgttagcgtgccagttgatttgatcctgcaatcaacaagaaatagatacaaagaaaccgcggttaaatctataaacgatagccgatcggctaggtgccgatgacatatcatttatctttgagccgatgtcatatgtaaatcgatcggcgtttgtaaataggtaataaagaattaaatctacttgatcggctgtagatattagcaatatacaattattatatcgatatatacttaaatcaaatgattgggatagatcggtcgccgtgccgagacagtataaatcacttagatcgaaatatatattaataacaggactatatatgttcgtaccatagccgatcggatagatctagcatatatcggctaatactccgatacgactctatattaagatgttaaaacaagcagaatataacaaacagaagcttaatatacttggatgcaataatatcttgacataaagggcagatttaacgtgtcaatgaagcatatagagcaaatatagttaaattagataagatcggctgaaactccgatactaccctaatcggtaaccagaaggcaggctagagattgatattctaagcatgacttaatagatcaaactcaactgatacagcattaagtatgaaaagaagaacaatatctagacaatcaagccgctgaagtttcatagagtggtagatatcttatataatctaaaccaacgtcgatatctaacctaatcggctaccctctgttaacagatgttagccgattgtgggttagatggtgatattgctagagattatgtaagatatatgataactcgatgaattacataaacaagattagagtatcataaagatgtaagcactaatcccgagaacgcaagccgtcataacaagttttacctcttgttgaagatcgaaaccgatgcagctcaacccgaaagtaagaactcgtcgaaataaaacaaaagcaaaagggtggcgatgcgccgaaattgtattgaacgtgtgtgttaattgattacatggggttcggggtctatttatacccgaaaattacaaactatgtccatatcggacacgactcttatctctaacaaaatctaagataccataagtctttgcgacagacttttacccaaacatatctttaaggaaattacataaaatattttaattaatagatacaattgccttctcaggactctatccatgtgcggcaattatcttgaagcacctcaattcaacccgatgtcatacaccaagtcgtattgtcggaatcggctgcatcggcttacctagtccgactcagacccagccgatcctaatcgtagccgatctggactccagccgattcttgctctgttctcaaatcgatctccgccttcgactccacttcgatctaatcttcttttccgatgccgatattaccaaatttggttgttaacaaaaatataaggcacatttctttttgtcaccaaaatcaagaagtaattaactcgtccccaatnnnnnnnnnnnnnnnnnnnnnnnnnnnnnnnnnnnnnnnnnnnnnnnnnnnnnnnntgcnntgtaactccgttcgca

SEQ ID NO: 15784 - DNA, 1885 bp, Oryza sativa
  unsure (1)..(1885): unsure at all n locations
cgtgtctttgannnnnnnnnnnnnnnnnnnnnnnnnnnnnnnnnnnnnnnnnnnnnnnnnnnnnnnnnnnnnnnnnnnnnnnnntgtttgtgtctcgacgagatgtataaatttggttggtacaatattacaaatatatatatatatatatatatatatatatatatatatatatatatatatatatatatatatatatatatatatatatatatatatatgtgagcgatgaaatcatatgtataatataactccaccattacaatggtttttagagggcatatcgaaattacatccagctgacgacgacggcgctcagcttcttcataggacgtacgtttcagtttccactcctcttttgttcttcttttcgcggggacatgcaataagcacgagcccaaattaagttgattatttcgccagattaagcaaaagatcacaaaaaatgtcaagaacaagagaagaatgtcatcgggttcagtacatatatgcatcgatcgatgaattaggccgggaggtaggacggcggcagcggcaggccgacgaccttgccgcagcggagggcgttctccggcatgttgtactcgtcccggagcgacctcgccggcgagacgacgctgatgtagagctgctcgccgaggtagtgcctctcccagatgttggacctcacgttccacatcccggcgttgtcgaacgtcagcatgatcgccgtccacgacctcgggtacacctggaccgagtgccggctcaccccgtccagcaggttgtacgtcttcctctcctccgccgaccacttccccggccccatcctgcgccatcagtcagtcagtcaacggtagcatcagatcgtatccatcatttatcttatttaaaaattttatgtaaatatagaaaaatcaaatcgtatttaaagtacactcgacaataatcaaattacaataaaattacaataaaatagatgataactgcataattatttttaaataaaataaatggtcaaaactcaaacgtttgtgaaaaaacatatattataaacgaatgttaaaagtaaaaaaaacatcgtatattataaatggaggtaatttaaaaaactttttttatatcattcgtcttattaaaaaattttattattatgcgcatcagtaagttagttaacagtagtatcagatcatatacatcattcataatattcaattttttatgcaaatataaaaaaaatcaaattatgtttaaagcacacttgacgataaatcaaattacaataaaatagatgatacttatataattttttaaaaataaaatgaatggccaagcctatctttaataaaaggttaatggaggtagtagtaatggggggcgatgtatgtacgtacccgacggcgaagaaggcgtagccgtcgaggtggacggagtccatgctcttctcggggttctcgaagatgatctcgatgaaggtgcggaactcggcggtgatgacgttggggacgacgtggagggggccattgacggcgggcggcacgtcggtcatctggttgtacctgaagacgccgtcggtgacgttgaagtactcggcgagcttgagcggcgtctcggcgtcgacgtgggagacgccattgaagccgtacttgagcttgccgtcgatgtggccccgggagaccatgagcctgatggtgcgcgtgatgttgatctggccgtagtggtaggacccctgcgggttggggcgggcggcgctcgccgtcaggttccaccggaacgacctccactggttgatcgaccacgcccatcccgccggcggctccggcacggccggcgacggcggcgtgctcgagccggcgtagcggatgacggctgacaccgacttggcctcgtggatgaaccgcgtggg

SEQ ID NO: 15785 - DNA, 802 bp, Oryza sativa
agccgcggtcacccacgtggcctgaccccctcgggggggtcgggcccgagggtgacatggccacccctcctcttgtctccccgaggggtcgggccgctcccgtttcggccccaaggcaaggggcgccccgaccccctgtgattttggcgccacgtgtatgggttaggtgagcacagcggggctcacctaactgcatttattgcggcttggacgagcgcgccacgccgcatttaatgcagcgcagcgcgcgctcgtccggtccgtgaccggtcgcagtgtgtgacaccggtcagatcgcgggttaggtggcaccaggcggcttgtcacacgcctcgccccgtcccgtcggaatgatgagagcctccaggcactcgtccctagccggagccggcgtgctaactcctggagttggcacgtcagtcccggccagattcatgccaggcttcatcgcaaccattacaaggaagtcattgtatgaagaagggcagatgtgcggcatgctaaactgacgcgtggtggacaagaatgaccggtctgtgactggtctgacgccggtcacgtcatcggcagacaaccgtgctcccacgctgcatctacttccggcgaagtggaggcgagtgacggcgctgggcctcactcaaggacaagctgtgatttagcttccaggcgaaggcgcgagccaagtttttggtcaagatagggtgggtccccacccaaaagaagagtaggtagaagtggtgcatgtggtatccccttgagatataaaaggaggaccttgcccaccgaaaagggatgatggaga

SEQ ID NO: 15786 - DNA, 1664 bp, Oryza sativa
cccctcgttatatttgtgtgggtacaagagaaagatataaatgtttcaatgcaagccagagatgtagagggtcctatcaatccaggggatgttgttggaccatcgatgcaaaatgaggaaaatcaaccaaggagggagcaggccatgggcatggcggattagggggagagagtcggtataattgttgatgaaatggagagggaagattcggataatgaggaagcggcggacgacgcatcatccgatgaggaaggtgatgtaatggccactgattgggcaaatgaggacttctctggacttgttatatcagagggtgatcatgtaccctgggagtataaggagaacgaggtaattgacggtgcaaggtatgctcataaggatgagatgaaggaggcggtgaagcattgggcagtttccttgcagagagagtttagggtggtcaagtcaacaaattatgtgtatgaagtgaggtgcatgaaggaagattgtccgtggcgtgtccatgcatataagggtaaatggaatgattattggaaagttagcattgtgaccgagcacaagtgctacttacaaggggtggagaagtatcaccgaaacatcacttcagcttttgtggcaagtgagatgtacagcagtgttgttggtaacattggctttgaaccaaaatcaattattaggcacatcgagaacaaattcaagtacactataagctatgcaaaggcctggagagccaaacaaaagattattgagatgaggtatggcacatttgaagcttcttatgataatttgcctcgtttgttagccaccattgcccagaggaataataatacttactatgacctacatacatttacatcggttgatgatcgaacaaagagtgtgctgcaaagagcctttttctcattgggtgcttgcatcaatgcttttgtgcattgtcgacctgttctatgcatagatggaacttttatgacaggtaaataccgaggtcagatattgacagcaattgggtgtgatgggaacaaccaggttctacctatggcttttgcatttgtagagagtgagaacactgaaagctggtactggttcctagagagagtgcacattgcagtggtgcgtatgaggcccaacgtttgccttatacatgatcgtcatgcgggtatgttgcgggctattgactacttgcagaacggttgggatgagaagggacttccagctaagtggcctgatgttcggagtcggtagtgcatgcgtcacatgggtgcaaatttctacaagcaattcaagaacaagcatcttatggagctctttaagaggctatgtgcacagagccaagagaagaaatttaatgagttgtgggacaagttggatgagttgacaatgaagcaaacagatgagcaatctcgcagaccacaagttgaaggtgacgagcctcccatacctcttggtgcattacatgatgacccaccaacaatgagaaggaggtcagggtcgtccatcagaaatttcactcagtggattgagaatgagcgtaaggagaagtggtctctattattcgacaccgatagatctcggtatggcataatgacaaccaatttggcagaggtgtacaactaggtaatgcgaggagttcgggtacttccattgttgctatggtgaattattct

SEQ ID NO: 15787 - DNA, 5615 bp, Oryza sativa
  unsure (1)..(5615): unsure at all n locations
ttggctgaanaataaggggcctatgntatngtannnccntngnnnngtagncagngganccaagcttaaccagttcgaaccccgctccggtggtattccctccttccgccgttcctcgcgccgccccgccgaggcgcgccggtgtcctttttacatctcggccagccttcgtcttcctcctctcgccatccgacgcggccgccacgtaggcgccacgtcggctagaccaagtcaacccgccagcctcgtccccgctcgcgtgcgctcggtccacggaaagcctaacggctgtgcgtgggcccgccacccttcggtccacccggtgcaccaaaccgcgcgccactcccatccgaaccctagcgcgcgccacatgcaccgctcccacgatgagccgcgccaccgacaagcgggccccactcgggaccccgcaaggtggactcggcccaccggccctctctctccctcactctccccgcgccccttgggccgcctctctgggccggccggcccattagtttggccgagccgcgcctctcctctcgggccacgcccaagccgcccgagggagtctaaatcacatccctccaatttctttccaaaaagggtttaataaattattaaatcctttttcctttgattagtaaatccaataaactttgaaaatccatatattcccaaccgctcatccgattgactccgttccacttccagtaattccgtaaaattgagatctatttaatggcactattaattaggctaaataggatctttcttttgggtcttgtgtaggttttcgattgtttgcgtatagttgcggttaccggattttcgtcaatcgtggttttctcggagattcgtgaagcttcgtgaagaccttgagcaaggcaagtcaccctttgatcaatttctcctataattggaaagtcattattattttgtttgcaacttgcattattagaatcactcacgtttaacttgcttggcctcggtttgcatgccaaaccgacagacctacctagtagtcgcactaattcctgtaggctgtactaccctgactccttatcgctccacctttgtggtaccacggtatccgtgctctctgagcgcgtataccaaatatcccacatacaccgttgtttatcgaaaacttgggaaatgggtttgtaaagccttgaaaacccgacatgtggtgtcggtgtgtttaaaaataaaatgaattgtgaaaactcgcgatgcgggggttgtgcctatgtggcactgtcccgtattcgcatataaggaccgattcctgtgggaaacgcatcgagcataatcaaagtgcaaccacaaggtggaatgggacaccctggctaagtaactagtcggttcagggaaacctcgcatgccaatagttgggaacgccagggcggggtcggttggagccaaaccgggttcctggtaagcaaggaagagaagcttgctgaattaccgatcgaggtggttggagtttgatttgtgaaaactaaaatggcctatatttatgtgaggatttgatccttctatgtggcatgaggtaaccctgggtcggcttgggaaaggctttgtcgcgagcctctgacaccggccagtgtctggagtaagttcgtatcttgtgggtaaagtgtacccctctgcagaggttaactaactgttcgaacagccgtacccacggtcatgggcgggtgtgaggtggttcccgttgcgtagatttgtttgcctgtactttgtgaaaagtggttgtggtttgggaatcgttaccagaatcagcctatgtggcagatggatgacctgagtggtcagaaacgaatctgtgtgattcgggatgtctgcgggcatcatagactaggcttcccgagtggaagcggattgctttgctgctgggcagctggactctgggagtccgagaaaatgaaaaaggctctgggagccgcctaatcaagtgaaatggctctggaagccgataagtaatgatctgactcggggggtcgatacatttccaattgagctgttgaaaagcatctcttaagtcgatttgagacgcaagtctctttttgacccaaacttaaaaagaaataaatcacttagtgatttcaaaatgatttcaaacaaaagatttgcaaaacaaccttgcctctcttccaagcttgcattaaacacctaagttcccgtgacttgctgagtacgaaagtactcacccttgctctatataaatatatatatagttcctccgccctgaagagaagatgaagtgaagtgaagaatagggtttcgccctgattcccagctgtcgcctgtggtgttgggtgttagaccgttggttccgctgctgctgttgttgttggtgttcgcctcgtccgtgtcgtcggttgtattctcgggctgtctgagctgcaaccaaggttaaggtaaataagtcctctatttattttaaggattgctatgattcatatttgttaccgtgggtaccagcaccatgtcctgggactggtaccgagaccgcggtttcgtaggaagcggttcgcgccgttttcccctacgacacgctcctgtcaggtgtcgttgtacgacggtaccagattggggtgtgacatttaatttcatatttccttttacatttataatttgttttatttaatttttcaagctcttctttccaattctctacaagcgccactggtttgttttcattgttcatctggaagatgaaatgtttgtctttcttgactcattacatgaagaaggttctgaatatcaagatgaagttaagaatagattggtcagtttattttcaaatttttaaatatatgtattactgttcaatttgtgatttggaatttataattacagagttttctttttatattttgtagacatccaattttgcacttgcttggaattccatcatggaagaatatcaaatcaattttgatgctttcaaaattgtatatccaccagtacctcgccaaaataatctgtaagttgtttttctttactgtaacttttagtccaataatattttttatttgtttttttttgttagagttgtacagatgcccaattgttctcttgttgacaggaatcttgtatgttttgttggtcattcagaaattcttgactgttctgtttttctaattgttgcataacctgtttgttttgttgttaatgcacaattttagtttgtttgttatgattatcattcaaaaaatttagttcctgtttgtcaattgtttcattcagaattactagatgggataagagcctgtttcttagtacaacatggactagaactgcaatagatttcattagtaaatttacagagtaaatagtatgaccataactgcattagctttttttaattttttttgtttgttttattttttatgataagtaactgtggttacttatgtcctttttctttttcctagttttgattgccgagtttttactctaaaatacatggaactatggggtccaagagttcagctgacaaaccatttctatcaaaaagacattcaaaacattaggattcaatatgtcaaccgtcttttcttccatccagacaattctgttctcggtacaggaacaaagaaactagtgattgactttgctcaggtaaattttttttagaatcattatttttttcacaattttttttatttagtccttatatttttatctctctttttatttgtagggaaattgattctggaataaattttgtttgttcaaatatgatagttggcaacttttgcaggactacaactgtacataaactcatgtggtagataaaatgcaaagtagttcataaaatgtagttgatataagaaacaaacatttaagtacaaaccagagtacatgttctggaatattacagaaacttatggaatatgtctatttccattgtattcaagtaaacctctctctattttcagtcatttccatttctattcttttgtgccacccctttttgatgaagatgaatttctcttctttttgccttctaattcatccccagaattatgcttctcctgtgatatatcttgttgcaaatcttttcttttgtttgaaacatctttctttttctgctctacaccatcctgcaacaaataatatctttctttattactttttttaaaaaaatcaattcatatggatttgtaatttttgttacctgttctcttgtatttttaacctttcttctcttcttccttggcaagtcaaactcaacgtgtttcagagggcacgttgaaaatgtgtgatctgtcctctgaaaatgactgcaatgatatagttctttttgctgtatttcttccataattgtcttgtatctttgagctggcctgcctttggattttgcaatatctggatccaacaatatttcttctgtattttcctcagattgttgattgccttgttcatgtgagttcaaattgtcttctgcatttggatctgaatcattgatctcctgctctgcatctttatttgaacacattaattccaattgtttagcgattttgtccatctcttccactgcaaactggaaagtttcattgcttttcgatccatttgatgctatttctgcacttttccttgacaaaatgttgaatctcaggattgagctctatgctaaaggtatatttccattgccttttcccccaagacctttgtactctttttttgtccatctttcaataatatatttttctggtatcttcattgcattgaggtggagcattactttcaatacatggcagcatagaagtccatctttctcaaactttgagcaaatgcagttgaaatcctccttttccaagtccacaataacaaggtacttccttcttctgattacttgaatattttgattcaatgccaaaaaaacttcataagttttgaacttctctacttcatttatttgaaatctagttgttcttttcaactcaacttgaaacttgatgaagattttgcgattatacattctcattgcttggtactcaatgtagtaatgggaccaaagtttgcttggtttctttgttcttgaaatgtgatcatcaaactgttccaagttttgaattgtatccattactctttcatactctatcatgaagtttgtaatgttgtactgtggaccaacattattcttaaaccttgagttagtcccttcactgagagctgtgctttttataaatggacagaaatcacccttgaaatacactggaataaatctttttctaattgaccacatgtgctttagaaaattgatatgctgaacttcaaagctgtcaatcatttcttgccataaatactcaaattcttcttctgtaactgagttatttatgatgtcttcatactcatcatacaacccttcttttgctttgaacaaatttccagatagattgaaagctttctttacaatatgaaagaagcaatttccgtgctttgcattttgaaatacttgagcaattgctgatctcattgctccatcctgatcagtaatgattatttttggttctttttgtgacatagctttcaaaaaagttctgaacatccatggggtccgaattctngagtttnaanngatggtctcaggagttcgtcct

SEQ ID NO: 15788 - DNA, 2198 bp, Oryza sativa
  unsure (1)..(2198): unsure at all n locations
ctttgaacaaatttccagatagattgaaagctttctttacaatatgaaagaagcaatttccgtgctttgcattttgaaatacttgagcaattgctgatctcattgctccatcctgatcagtaatgattatttttggttctttttgtgacatagctttcaaaaaagttctgaacatccatttaaatgtttctgaagtctcatcatgcaaaaatgcacaaccaaaaacaattgtgtttccatgtccagaaattccaacaaagggagcaaacgggaggttgtatctgttggtgaaatatgttgtgtcaaaactcacaacatcaccatatttctcataccactccctcgatctcccgtctgtccaaaacagatttttcactttcttgctctcatccaaatcaaactcataaaagaaatgtggatctttttcttttttccttctgaaaaattccaaagttttcatcatatcattgctgcttgtctccttgttaattgtggttctcacattgcttatatctttcttcgtataaggcaaagaagtcaatcctcctcttagaacagataaaattacaatcatgtgccttgttggtattgtcggagacatgggaccgggggtatcttgactagaggtttggggcagctgcagtcacccatgtggcctgaccccctcgggggggggggggggtcgggcccgagggtgatgtggccgcccctccctctgtctccccgaggggtcgggccgctcccgtttcggccccgagggctggggcgccccgaccccctgtgggtttggcgccacgtgtgtgggttaggtgagcacagcggcgctcacctaaccgcgtttattgcgggttggacgagcaccccacgccgcatttaatgcagcacagcacactcgttcggtccgtgacaggtcacagtgtgtgaccggtcacagaccggtcagatcgcgggttaggtggcaacaggcggcatgacacacgcctcgccccgtcccgtcggaatgatgagagcctccaggcactcgtccctagccggagccggcgtgggaactcctggagttggcacgtcagccccggccagatacattccaggcttcatcgcaaccatggcaaggaagtcattgtatgaagaagggcagacgtgtagcatgctaaactgacacgtggtggacaagaatgatcggtctgtgactggtctgacgccggtcgcgtcatcggcagacaaccgtgctcccacgatgcatctgcctccggtggagtggaggtaggtatgacccatctcgtcggatggtcatttggaaagcagccatggcaaatctccgcccattaatgagggagtaacagggagatccccggtgtcaggcgagtgacggcgctgagcctcactcaaggacaagttgtgatttagcttccaggcgaaggtgcaagccaagttttggtcaagatagggtaggtccccacccaaaagaaaagtaggtagaagtggtgcatgtggtatccccttgagatataaaaggaggaccttgcccaccaaaaaggggggaaaaaaagaaaaaaggacgctagaggggttctggagcctgaactctctagctctccggctctctgtaactccttcacacacagatccaccagaacacaggagtagggtattacgcttctcagcggcccgaacctgtctacatcgcccgtgtctcgtgcacttgctctctcgcgaacattctccagatcgatcgagggcgaagaacctcacttagcgtccccggccgaaccggcaaaggggggcctgcgcggtctcccggtgaggagctccacgctccgtcaggtatattacattccttcaaggtccttatgagcattttttcttctgtagtcatgtgtttgtgtgatttgagaaatctcacttcatctcttggacttagttgatgattgtggtctaattgtacccttgaaatattccaaatctcattcctctctgaaataaccagagcacacttgcaatctgttgcatcattttcatttgtatttctttccgaaaccactgtttcctctgcgcttactgatttggattgagaagttggtttgccttgtctattacatctgaacgttactctagtcacttctccaggggtacggaattcccgagtcaaagagcaatcgagtcgaagcgcatatcaaaaggcggatntcaaaagcacg

SEQ ID NO: 15789 - DNA, 4481 bp, Oryza sativa
  unsure (1)..(4481): unsure at all n locations
aacttcaatcatcaatcattgttatctagagaaaaaggtacaaccaacaaaaattaccttttcaccatctaacaaattgaatatatcaagattccaattatccattgcatcctcttcattactctcatcttcctggaatttgaattacattacaaagttaaaatttactaaaattatcataatttttaatactacaacaggaagtaatacatccaagacaacatgcctcatttgccgcatcattattccattcttcaatattagcattagtacgatttgttgttaatatcattgaattctgcaaaacaaaatttttatatcaatacttatttgcttttgaatttgaattattagattcaattaaataattaatatttcatacctgaaatgcacttggactcgcaacaaaagtagagtgtgctgaattttgttcctgtaaattccaataaaaacagaaatattacaactaaattatatatgatattcaaatattgtttttcttacctgcatatcagaaatcgtaggctgtgatgatatgatttgttccattaagcttgtgtacgacatatttgcaacctgcaaataaattttcatatagtattttgactaccaccttcaaatttttcctttaatagcaaaaactttgtaatatgaacttactgaattcattgatccgaaaagagataattcatcatatgaatatttgttgctgtaatcaacaaatgcttctgtcacacttgctgaattatccatactttgcttttctactgttgcatcttctgctcctaatccaatatgatctgttatatttgcaattaaagtaattgtgatcaaattatatataggttccagtcaaactgtataacaatcaagttgaagtttaaaattattcttattctgtttcaaattgactgtaatttttgcattttgtgtttttttactgaaggaattatgcatttgttcaattccattttgaattgttacctgtgtttggttcatccagagcattgcttattcctacctcattacctgttatgcctgcaatagattgattgattcaacattaaaaattagagtaaatttgtattccagtttgaaatttttagtattggaattacagttttttatgtaatttttatacaaattaactgtaatgaaagaattgttctgaaatagaataagaatacctgtgtaagatcttacctgagtttacaaaagttgtttcatactctgtcaaaatactttgtttcatattctgaatttgttttgactgaatacttctttctccttctgacaattcaattgtgatacctgcaaaataaaaatcattatgaaggaagttaagatagatactgtattttcagttattgttacatgtatttttattacttcttctctgtaactagttttaatgttaatattttagattttaaaaagtacccacttgaaagtatatagttcagatcatttagatgtttgtcatttttttaaaaatacattgaactacataattttttgtttcttacctgagctcaacatagctgtgttaatttctgtcagattcgattgacttataatctctgtatccatttctgtcagagctttgaagtgcttttttatatctgatggcattttttaaaaaaaatttcagactcattttaatcttcttatttgtgaataaaatttgaaattatcttgttcacctgattctttttcttctatttccatagaactcttgctttgtttctccttttgtatgccacctgcatagaaagaataaattaatattgcaaagaacttttgaatttctaaaccagcaagttctgaaacatagagtgtatttcccaatctttttcataagtccatttacagtgaacatatatttgtattacagagaaattatactataattccagtaaacagaaactgtaactacttaaaaatccaactacaatcaatttgatacttgattatagatactgaagtgaacaaatgaatcagtttgtataattctttcaaaataattttaatattacactaagtatgtatttcaattacagtgtaatgctactataattccagttaaaatttactgtaactcttgtttacctatattttttccttctatttccttagaacttttgcattctttgtccttttgtatgacacctgtaaagaaatattcaagatagtctttaaatgtttttcaaacctgtatgagtatgttccataagtagtattacagtaaataagtatttcaatttgagtataatgctactgtaattccagttaaaatttacttatggaacaaactatctgatggcactttttcttataatatctgatggcactttttcttttctatttctttctatttcaattagatatgatttgttttggtttttacatatgtactacttttgaagtatttgataccctgttttttgctcgaaaaatctgaaatcatcttgaaattgagattgaaactgcattagatcatgatttcatatgaattttacattgtttctttgtagttacatgtattttcaattgaaattgtagtgttcactctatatatttgtaatacaagttcactgtaactagtttcattatattctattttgagacattgaacaaatcaacaatgatctattatctgaaatcttcattttgttgtctgatgatgagagaaacattgaactgagatagtcttgagtttaaaacatatcttgaatgtgttcctgaatttgtgcatgattgtgtgagctaaactattttgtttactgaactaatctttttacaatgagttaatactagaattattgtgattcttgtatgtaattttattacttttttactgtaacatgttaagaaatttgtgagttcatatgaattggctcttttgtttgtgctgtatgagatattgaacttttatgtaatattgagttggatgagacaagtggttgacattgagatttgaatttgtcattagtttaatatggtgattatgctgataaaattgaatgtatgacaattcaggatatgctatatggcctagttgttatatttctgtataactgtataactgtgatatcttcagagtgaaattcagtaaggttggaagattaatcaatctgtcatgtttttttataaagttagtttggtattcatcaatagtacacagtaatacaatcatccagaatgcagtttcgtagtactgaatgcagtgtagttttacttctaacattacatagttcagatctacagagcaaacatatgaaattttcagttctgagttgttgtatttatccagcaaagtggattgttaaccttgtttcatttgacatattcagcaatttcatgtattcttttgaattgtatatttgacctaaactctctctttgatctttttcaggaattgtatataggggataagaattggagccttgaactaaccttgaactggagccttcttgtttctcttgattttgccttcctcttgttttttctttgtgttcgccagattctgtgtttcctttgtatggatctcaactttctgttcagaagttgtctttgatttcttctttcctctagaactactctttgattctgacattgtactctctccttccatctgcgatttggatcctctttttctctcttctttctcttctcctagctccatgtttgattcgtgctagatctgtttgtgaactaatagtgctgttgaaaagtaggggattgaaaagtgtggtcccatacatggttgattcatgtgacatgtttttcatctacttggcttccaagtttggcccctactacttttttggataggctgttggattataatttgggctttatttccttgtgttttgcttctaattttgtatcttgggcctgctttttactaatgggcttttatggatctggatatggacttgggccttcaaataattcgcatgggcgaaaaaatcatgggctttgtttatttgtgtttgattcaaattttgtattttgggccttctttttactaatgggcttttatggatctggatatggatttgggcttttatggatctggatctagatttgggctttaaaaaaatggcgttcaaataatcaaataatatatctgtttttaagtgtaatatctatttgtatcactttttctgagttgttggatgtgcatcctatggtagataaaatctgcatgattggagcttcagaaatcattcgattcctatatagacagccccattttttatttgtcttggatcgaccaaaaaaatgcaatagatcttggtgcgaagaaataactgcttacatattttcattttagttctcgatatttttagaaatgtttctaggtaattaacatccaattgtagaagagaaaatataacattgtcgtcctgaaaaannnnnnnnnnnnnnnnnnnnnnnnnnnnnnnnnnnnnntgaggcgcattcattccagcgcg

SEQ ID NO: 15790 - DNA, 741 bp, Oryza sativa
  unsure (1)..(741): unsure at all n locations
agtgtagaanatcttgtagactcncgtaangagacnnnnnnnnnnnnnnnnnnnnnnnnnnnnnnnnnngcgcgtgatgttgatctggccgtagtggtaggacccctgcgggttggggcgggcggcgctcgccgtcaggttccaccggaacgacctccactggttgatcgaccacgcccatcccgccggcggctccggcacggccggcgactaaaaaatcatgtgcatctttcacagctagctgaaaagcctgaaaatgatgcgcagtgttatctcatctaagtttaaataaaccgagagcttgacatgccagattatgaaaatgcgaagaatactagaaatcagttatgatactatgtagcagcaactagaatcctgcttagatcgtcagaagagatgcagtagcttaccccagccccatcttggacagtcaacaagcaactgaagcagacaacattcagttgcttgttgacaattcactgtcattcttaaatccatttgatgcagagaatacttaattcttactgctaattaagcacattatgcactaatgcaatccaaatcatggctcatgggtcttgtgatctcgtaggcttatcaaactaactgttccagatgcttaacagtccgattctaaccgagtaaacactgtaattaagcgaccaaccatgaaccatctcatgaacaaatgaccactattagaccaaatggtgcttccaggtcagaaaaaagaatatgccg

SEQ ID NO: 15791 - DNA, 759 bp, Oryza sativa
  unsure (1)..(759): unsure at all n locations
aagtcgttagatactgggttgcaaccnnccccnnnnnnnnnnnnnnnnnnnnnnntgagtgaaatttctgatggacgaccctgacctccttctcattgttggtgggtcatcatgtaatgcaccaagaggtatgggaggctcgtcaccttcaacttggggtctgcgagattgctcatctgtttgcttcattgtcaactcatccaacttgtcccacaactcattaaatttcttctcttggctctgtgcacatagcctcttaaagagctccataagatgcttgttcttgaatccgggcgccgagttcaacgagggcgtctacttcctggatgacgggagactctacgatgaggcgttccaaatcttgaatccctttgcccagttcccctgcagcgacaacggcaagtggctgccgccggcggtggcggcggcggcggaggcggttaccggccgcgtggacaagctcttgccggagcaaggcccgtcgtactacacgccgccggtttggattctgccgtgagactgccatgttcttagttagattgtctgatgacttgttgtcgtgttgatatggtttgttgatttgtgcaatccatgatgtgttctcgagatccatgtgtgcttgcaattgctttgatccatcatagcatctcttcagtactctgctattttcaccatgttagactaatgcaagaaattgttggttctcatgactcagattgccttaattagtgaatcaatatattgcaaccaaacactgat

SEQ ID NO: 15792 - DNA, 1037 bp, Oryza sativa
  unsure (1)..(1037): unsure at all n locations
gataactcacccatcatgctcatctcaaattccccgcgcatagtctcagcaaattttcaagcaaagcgtgagtcgaacaaccaaagatgatatcatccacataaatttgacaaaaggttgattatcaccatgcttgagaacaaaaagtgttttgtcaacctttcccattgtaaaacctttcgtaagtaaaaagtttttcagcttatcataccatgctctaggagcttgtttcataccatacaaacctttagaccatttaaaaacatgattgggaaaatcagaattttcaaaacctggtggttgtttaacataaacttcctcctgtataaaaccatttaaaaaagcacttttcacatccatttgatacaatttaaaaccttttgaaacagcaaaagcccaccaaagtctaattgcctcaattctagcaacaggagcaaaagtttcatcaaaatccaaaccctcaacttgagtaaagccttgagcaacaaatctagctttatttttcacaatcaaaccatcttcattttgtttatttttgaaaacccacttggttccaataatattatgtccaaaaggtggttcaactaaagtccaaactttatttctctcaaaattttcaagctcttcatgcatggcgttaagcatggagtcatcccttaatgcatctcacaaatcttggggttcataataagcttcaaatgcagcatttgctccaacatcagcagtcgtatcctcagtcgttgcagtacgcccacctatattaccaataatttgttccggcggatgtcgtcgttgaatgtgcaaaagagcagtgacttctaaagttgatccatgttctgtatcagtactggtcgaagtagtaatctctggaggaccatctcgatcagcatcaacagtacccgaacccgacgaccctggccggtctgaccgcacgtcctgtgccggtctgaccggaggtgtgtcggcggtctgaccagcctgnnnnnnnnnnnnnnnnnnnnnnnnnnnnnnnnnnnnnnnnnnnnnngacactaccc

SEQ ID NO: 15793 - DNA, 696 bp, Oryza sativa
  unsure (1)..(696): unsure at all n locations
caacgttgtnnncgcatgacaggnggccganncnnagnnnnnntagantggaggaattnggtacccccaacttcttagtggttttctccactactacctcttgttcttcacccgcagcctggtttaaactgatcagtggcttgtgcggcactggagactggaaggttaccacttctcctttcacattggtcaacttgatggtgcggctagcgcaatcaatcactcctctgtgccttgtcaaccaatccattccaagtatgacatctaggtccttggattcgagaagaatgaggttggctggaaaaatcaacccttggatttcaactgtcattgacgggcaatagtgagttgtggtcatgcctcctccaggagtatgaactcgcataggtatcttaagcttcactaaagataacccatgtgcaccagcaaaacgcttacaaatgaacgaatgagttgcacccgaatcaaacaatatttttgccggtgtcgagtcgacaggaaatgtgccccatataacctntggtgctgactgcgcctcctctgcaaacccatgattgacaccggcctgcacaaacatgggtccaccatgtnttgggttcggcactttcccaccctgtgtccccgcttgctaccattgaaggagagttccggcttttcttccaanctcttgggctgttntggcacagcttgctgagc

SEQ ID NO: 15794 - DNA, 700 bp, Oryza sativa
  unsure (1)..(700): unsure at all n locations
ttttggccttttgagactagantancntcnnnnnnnnnnnnnnnnnnnnnnttgaatttcctggttctttgaaaagaattcaaagtgataatggtggagagtttaaaaatgcttcatttgaacgattttgcaatgaaagaggtcttgaacatgaattttcgtctcctcgggttcctcaacaaaatggtgttgttgaaaggaaaaatcgtgttttggttgagatggctagaacgatgttggatgagtataaaactcctagaaaattttgtgctgaggctattaacactacttgttatatttcaaatcgagttttcttgagatctaaacttggaaaaacttcttatgaacttcgatttggacattaacccaaagtttcacatttgcgtgtttttggttgcaagtgctctgtcttgaaatctggaaatttggataagtttgaggcacgttctaccaatggattgtttcttggttatatcgtgtacttattttggggactaacaaaatcgtggagacttgcgaagtttcttttgatgaggctagtgcaggtattagacccgatattgcaggtacactgtcacaggttcagggggaggatggttgtattttttgagatgagagcgacgacgactaccacgacgaggtctgctcggccgtcagaccacgcaccagctggtcagaccgccacacacctcccggcaga

SEQ ID NO: 15795 - DNA, 1362 bp, Oryza sativa
  unsure (1)..(1362): unsure at all n locations
aggttnnnattgatggctgtcgagnnnnnnnnnnnnnnnnnnnnnnnnnnnnnnnnnnnncaacaccaatttggttctacagctgtgttggatcctgatgaagatggtgaagctgttgatcaaaaagagtatagaagtatgaggggatctttgttgtatctaactgctttaggccagacatacaatttgctgtgtgtctgtgtgcacgctttcaagcttctcctcgtgcttcacatcgtcaagcggtcaagcgaataatgaggtatttgaatcatacacttgagtttggaatttggtattctacttcatcttctatatgcttaagtggatattccgatgctgattttggaagttgtagaattgataggaaaagtactagtggaacatgtcattttcttggtacatcattgattgcatggtcttttaggaaacaatctagtgttgctcaatcaactgctgaatctgaatatgttgttgctgctagttgttgttcacagattctttggcttttatctactttgaaagattatggtcttacttttgagaaagtacctctcttttgtgataatattagtgctattaacattgctaagaatcatgttcaacactcacgtacaaagcacactcatattcgctttcactttttgagggatcatgttgagaagggagatgttgaattgcagtttttggacaccaagttgtaaattgctgatattttcactaaacctttggattctaatcgctttgcttttcttcgtggtgaattgggcataattcatccttttggcatggtttgagggggagtttgtacctcatggttttatcaagcaataatatgacaatgagaaaaattgagaaaagagagctttgtttatgcatatggtattttcttgtgcatgctagcaatactttgaaggtttatttgtttctagcatagcttgtatgtattctagtcttttcatgagatttagattttgcttttaagggagatgatgcatgacacttaaattctatacttgaattaagaaaatatgcaatgttgatgctagcatatggtttgatctataaatgctctatatatatgctttattgacttgttattcctcaaatagctttaattgcttattgtgaaaaagagaataaaaataagaaaaaatgaatcccgaatccttgaaaacagtcatgacgacaaggacatcgatatatacttaaatcaagtgattgggatagatcggtcgccatgccgagactgtataaatcacttagatcaaaatatatattaataacannnnnnnnnnnnnnnnnnnnnnnnnnnnnnnnnnnnnnnnnnnnnnnnnnnnnnnnnnnnnnnnnnaggcgcgg

SEQ ID NO: 15796 - DNA, 5057 bp, Oryza sativa
  unsure (1)..(5057): unsure at all n locations
tgtaaacttgaattaaagaaataatcaatgtttattgtagcatatggtttattcaataaaggctctatatatatgctttattgacttgttattcctcaaatagctttaattgcttattgtgaaaaggagaataaaattaagaaaaaatgaataccgaatccttgaaaacagtcatgacgacaaggacatattcgatgtgagcaagaaaaaatggggtgccgaatccctggaaacagccttgacgacagggacgtacccggaataatagagaaaaatatgagaaaaaaaaggttcaaaaaattctcttggttattttgtgctaaaggttgtttgagaaagagtgataaatacaataggtatatgtgtttagtgtttattcttcaacctatgtgcttgttaagatgttgcattataaatcgtatgaaatcatgaatttttattattgtttcaaacttaattgtaaaatctttggttcatggttatactttaatgcatgcttgttatgttatagatggattcatcttctttttattgcaacatatgacttgatatgctatatgtatgctgagctcttgaacattaatgaacataattcctatgcttgatgaaatcattgtcaaatgggggagaagtaatgtgaaaattttggattttatgaaatcattgtcaaaagggggagaagtaatgtgaaaattttggatttttggagaagcatggtgaatttttgaagagttgttgagaagagcatgtttttggttcaattgggaatttctttcttttaaaaaggggaagaagttttcttttggattttttagcacgatgtgtacatttgtacgaagtgtgctttttatttttccaaacaccaaaacatttttatgagtttgccaatgtgttcatcaagggggagattgtaaaattaaagatgtttttgattattattctgtgatgaacaattgggcattggagattattggttttgttatttggaatttattcacgaagtggttttggtgatgattgggtttacaggtgaatcgcaggattgttatttcatgtgaccggtcagactgggctctggtagccggtcagaccggcgtgtaatacgcggtcagaccggcgcagcccgcggtctgaccggccgacactgtgtcggtttcggtttcgggttgtttagttggatatccgagtttatttcatgattatgacttctagatggatactatacgtatgtaacactattgtttgctgctaatgagtcaagttagagatagcttggtcaaagaatatggtttctttgtttgttccatgagtaggtgtctcgatgtctccggagagtatttgcggtgatggaccgggagtcggcttggggataagacaacgtccgtggtggtcagagatcatgcgggatactaaggctagagttgatgcacgtggttgatggagattccatatggcatacgatggagttattgtgtgcgtgtgggatgcggagttgaatttggaaggagtccaaatttggtacgattggttatgtaaagtttctttcttgtactagagggtttcctaaggtgtttaggactcctagtatgagtttggttcgtggctttaggctgcctaccccatgtataaatagagggggagcgtgaggcttccctgtatcgctttagagagcaattgagttgagttttgagttagggtttcgagtttagtcgaaatttttgtaaggagtgctgttggtgcactttgtaaacacagagagaatcaataaagtcgtcatctactttaagagttcttcgatttgtgtttaccgggtttcggcggtctaaccggcaactcaccggtggtcagaccgacggcaatcggcagtcacaccggcgggaacacggcggtcagaccggcggcggcgatagcaagcagcaggcgatctcggcggttagaccggtagatcaacactggtcagaccggcggctcgcttcggtcagaccggctaatctacttcggtcagaccgatctcatcgaaattgagggtaacttttatttccgctaaaagttttcggtttttgggtataccaaccattcaccctcccctctctggttggcttagttcttgtaattcgattctatagcaaccagtcatgccagcatgttctaggacctcaagacaatactaacacggactgagatggatgtcggtaggacgagcacttatcccaagaaagtgatggaatttgccaagatccttcatagagaactcagactgaagagcagtgataatcatccgtaggaggtcaccaaagaaagctatatatggggacaatatcatcaacatatagtaatagatagatcacagaaaaacctcgatgataagcaaattgagacgcattagacttagcctctgtgaagccaagagaaagcagaatgttggcaaactagctgtaccatgaccggggggcctgttacaatccatagagggacttgttcagacgacaaaccatgtcaagcatggtgggatccacaaatccgaccggttgagagcaataaattctcctgaatagtaccatgcaataatgcattcttaacgtcgagttgatgaatcagccaatcccgagagctgaaagtggatggttcgacaatcagcgtaaatgtctcatcgaagtcaatgccaagacgttgtgtgaagccacatagaacccaatgagccttatatctgtcaagagagccatcatcttaaacttgtgacgaagttagtgtcgggtgtattcggaatgagctcccaagtgtgattcactagcatagcattgtactcatccattggaacatgctagtgcgggtctattcggtgaggagttcatataagcacgaaacctccataatctattcagccgactcatagaaatataatcaagagagatatggggagggtcggtagggatcagacttctcgacgaggtcaaccggacagtgcacagttgataacaagaggagacgtagtgctgtgattgtagggttcggatcatgttgatcgaaagccgaatcatgtttgtcaatttccatcaaatcaagagttatcaatacctaccggaagatcgagacctagtttcttgtaataaaatatatagatggtagtcatttgaacgtgttacatgtgtaggtttgggcgtccatatatgcctatataatgggcacggtgatgcacacaataatcaaacaagattcacagaaactaccatcaataacaggactcctgcacttcatacatggccactgccagctctataaacaagaggtttagcctcgccggtgccacggcgcttgtcaccggtggcagcaaaggcatcgggtacgtataatcaacttaccaaatcaaactgactaattgtttggctcatacgcttcatcattccagtggtgcaaatttatcgaagcatatcatatgaattattaaccatgtaaccgcgccatcgtggaagagctggcgagcttcggcgcgacggtgcacacctgcgctcggaaccaggcggagctgagcagatgccaggaggagtggacggccaagggcctcgccgtcaccgtctccgtctgcgacgtggcggtgcgcgccgacagggaggcgctcgccggcagggtgtccgccatgttcgacggcaagctcagcatcctggtagaagaacacgagcacgcaccatgatatgtgatattatcttctaatccagtataatatctctatatggacacgaaccgatgaaacggccggatggatatatatatatatgcaggtgaacaacgctgggacggcgtacctgaagccggcggcggacctgacgccggaggagacgtcgaggttgatgacgaccaacttcgagtcgtgcttccacctgagccagctgttctaccctctcctcaaggactccggaagaggcagtatcgttaatatctcgtccgtcgcttctgtcctcgcgttccattctcttcctatctactcggctgccaaaggtaaaaaaattaaactcccactctgtatgctatggacttcttgtcctattgcacaaaacaacaagcctagcttgcaaatataatttcactgaactgcacctcctccttcaggtcatatatttgacgacgcttaggattagattttgtttaacttttaaatttccaacgtaccattagttttatattattagaataagtttgtaaaatttaacagaaatttatgttatgatggtatagtttgaggcaaatacatgtatgcggtataggatgatatttattacatcctaaatgtatcgttgtgaacgggtataaatccaactccatctatctagtttattttgtgagagcgtttcacccaactcaactcccactatcaggtggatctaaatctaactccatctatctagtttattatgtgagagggttattccacccagcgttatttcagatctcatgttttattttggcacgtggcgcgcacatccagcgcgagagaaattaatgaattgatttatgtgcacttgcttctcaagttgtaataatcactagctatgcgctttgtaacgtcaggagcaatgaaccaagtcacaaggaacctggcttgtgagtgggcgagcgatgggatcagagtcaattccgttgcaccgggctacatccagactccactcctaactgccgtaagttcctcgttttacaaatactccctcctcctattttatgacgccattggcttttcgaccgacgtttgaccattcgttttatttaaaaattttatacaaatatgaaaatatttatgacattcttaaagaacatttgatgataaatcaagtcacaataaaataaatgataattacataatttttttaataagacgaatggtcaaacgttgaataaaaagtcaacggtgtcatacattaaaatatggatatggaggtagtaatatttttcaaaaataataatagctaggtactataattttagtgccgctttgttttagtatcttgctacgcnnnnnnnnnnnnnnnnnnnnnnnnnnnnnnnncaacgcgtgcgcattcaagagc

SEQ ID NO: 15797 - DNA, 2479 bp, Oryza sativa
cagtacattaagaattgaaaagtttttcctacatttaatgtgagagttcccaccctattggtgctatatgtcagatgagactaaagtggaaattgtaagagaaagaacataaataattaaatactatttacgaaagtttgtaactaggacatagtactacttattatgaaaaagtttataactatgacatactacttattatggaaaagtttataactatgacatacttatatttctcatatatattgttgctaacacatggtgcctgcactgcatgtgtatagttcgtggccggcaacgatttcgcacaggttgagttcaaccgtcttcctttgggccgtctcggtaaacctgaggacatctcgtcgttggtggcgttcctgtgcatgcctgcggcctcctacatcactggccagattatatgcgtcgatgggggccgtatgctttcttaataaactctacatatacaaaataaagatatatcatgtatcataatatattctactgaattgggagacttccaagaagaatgaaatctttgtgtgcccgtgtaccaaccacacacaacaggctagctagtcttctctgcatgcgtagagcatagactgggtgtaatgtgtaaaatggccaatatatatttgtattaagtttgggaaatcatgtggagaagattggcaagccgagtgtaatgaattttccatgaaataaaatttacggttcctatgattattgatacaaaacagtatgaatgagaccttgatttgttttgacttaagattcattataaggtttattcatgctgtattggaaaaatcaactattcattggattcgttccttttatacactagtacagatcatcttatctgtgacggctcctcacatgtctaggttttgcgggccgtcacaatgaagtcatctcaaacaggcccaaaacgaggccgacaaagatatacttgcacagacatgttagatgtgcataaaaatcgagcccgtcacggatgacacctatttgtgacgggctccaacttgaggaccgacaaagataactgatgatatctttgtcgggccctaacagaagcacgtcactgatgtccatcattggtgacgggctccaacttgaggcctggttgaaataactattatattaggcccatcacgatgaatgttatcggtgatgagcttttacttaggcccgacaaagataactaaaatacctgttaccgtcgtattttttttggccgttacagatatttattgcacagtataaataccccaactacctagtgtaatggttatcccactgttcactattttggtgggagtataagacggtgatttttgtctcttttctccaagaaaatcataaattgcaaatttaattgaaaaatagtagtcaattctcaaaaatttagtaaatacttacctacaaaatgtatatgtaatatttttctacttttatgaagctcggggatggatcaaagttacatgtatgggaaaactatgcgacgtcataccaaggtgtatagaaatggcatattgaattttattaacgccgcggaggaggataggaaaagaagaacaacgattgcatgtgttgtccatgtgcagattgcaaaaatgagaatatgttttacagcagagtggacgtacacgctaatctgatacaaagagatttcatgaagggctacacatgttgggtgaagcatggagatcaaggatcaagaagtggtgcacaaaatctagaacatgaagatcatgagcatgaatcaggaagtggtgcacaaaattaggaagatggagatgagcatgacatgtttgtacattctccactgggcggtgaaatggttgatgtggatcacaatctactgcaagacatgttacgtgatgttgagaacctagcttacaacgagagagattctataaagtttaacaagttggccagtgactcggagatgtctctgtatgccgggtgcaaagcaaaacacaccaaattgtcagctaccttggacctaatgaagttgaaggcaagtagtggatggacgggcaagattttcatagatcttataggaattttgaaggccatgcttcctaatgagaacacattgtccgagatgacatatgaagctaatcaggttttgtgtcccctggggttagaggtcagtagaattcacgcttgtccaaaccactacatattgtaccacaagcaatatccgaacatagatcttttaggaatttcatgtgatggatgaaatattttgtattattaaaaaaactttttgtacgaatgaagtacttatattcctatgaatttctattgtagcattaaacaagcctttctgttatatgaaattagtaaattatttagtgaaatatatgaaaatagtaatttttatagtgattttagttaatttggtgaattatttagtgaaataaataattatttagtgaactattgttcgttactaattatttagtga

SEQ ID NO: 15798 - DNA, 723 bp, Oryza sativa
  unsure (1)..(723): unsure at all n locations
cggacgcgcactgtatacncctgtnnnnnnnnnnnnnnnnnnnnnnnnnnnnnnnnnnnnnnnnnnnnnnnnnnnnnnnnnaacacattatggatgccaagcatgttggagggaagctcaagctggtaagcaacttcacccctgcgttccaaaatccgatatggtcccacaaagcgtggtgccaactttcctttggtttggaagcagtgtactcccctgagcggagtgacacggagatacacataatcccctgcttggaaaacgagctcccttcggcggttgtctgcatagcttttctgccgagattgcgcgattctcaatctttccctgacagctctaactttttcttctgcctcatttaaagcttctgtaccaaacaactggcgttcccctgtctgatcccagaagagcggagtacgacaccttcgtccatacagtgcttcaaacggtgccatttgcagactagcctggtaactgttgttgtaggagaactcagcatacggcaagcttttgtcccatgctccacccaagtcaagcgcacaagctcttaacatatcctccaatatttggttgactcgctcggtcggaccatcagtctgaggatggtatgctgtgctgaaatttaaaacgggttcccaattttttttgaatttctgccagaactttgaagtgaattggcttnctcgatcgacaccgattttttatgtacaccatggtaacaca

SEQ ID NO: 15799 - DNA, 1013 bp, Oryza sativa
  unsure (1)..(1013): unsure at all n locations
acaccgtcggtttggtttttcaaaacctcctatggcatccaccagaccagaaagctgtttctccctcttcaaatagtggtgcaatgggctgggcactttagaaaggttctcaatgatccgcggttattagcccccatgtcttaagaacttcggatacagagtgactgtcctgggtgggtcccacttggtacccgactccacatttggtgatgccaccgctactccttgagcattcacgatgtggccgagaaactgaacttccttaagccataagtcgcacttgctgaacttggcatatagctggtgctcttttaacttttcaagtaccagccggagatgctgctcatgttcttcctcggacttagagtagataagtatgtcatcgatgaaaaccacgacaaacttgtccagaaattccataaacaccttgttcatcaaattcatgaagaaggcaggtgcattagtgagtccgaaagacataactgtgcattcgaacaacccgtaccgagtgatgaatgctgtctttggaatatcctcttcgcggatcctcaactggtgatagcctgatcgcaggtcgatcttagagaacactgtagctcctttcaactgatcaaacagatcatcaatccttggcaacggatacttgttcttaatagtgacctcattgagtgcgcggtagtcgacgcacatccttttggctttatctttctttttcacaaaaataactggagcaccccaaggcgacgtgctcgggcggatgtatcccttctgtaactgttcatcaacttgcttcttgacttccgccaactcgtggctcccattctgtaaggccccttgtggatcggtgcagttccaggtaccaagtcaatccggaactcgatatccccttttggtggcattggtgtcagatcatcccgaaaaacccctggatactctctgactatgggaatatcctncaacttcttagtgggtttctncactactacctcttggntcttcacccgcagccttgt

SEQ ID NO: 15800 - DNA, 5118 bp, Oryza sativa
  unsure (1)..(5118): unsure at all n locations
tgcgataatgacggccgcatagatgaactagcgctacgtccacaccacgaaagaagaaaaaaaacgaaaaaaagggcgagcagcaacagatggccaatccgccgctaccgaccgccagcctcttggctgcacgcggagccgatcgcccgcactgatcacctgtcccggccgcttgcggcaccgccgcatgctgtacggcaccgcaagctgcctcaccagctcatcgcttaccaccgccactgctgtagcaacagcacagcgcgagcgagaaaccctaacgaaagaataggaggggagaggggaatggaggttgaaatatctgaccggtcttaaccgaacacaaattttttcataggccgggatcctttccacaccgggttggtccacgggggttgggtcatgaccccggccgttccgggtctaatcgaacatagccttatggaattagaaggcttataggtgttggcaaaactaaactaaggtcagggctatggcctaagcttatggcaaggtaaaaaaaaattcaaaacaatttattattttttggtttatcatgtgttcatttatatatcttcttccatttattccctttattgaaatatttgttgtggttttgaattcatatggtcttttatgttttttatcctattatgatgaatcttgatatagattggtgttcacaaacattttgggaaaaaaattgttactgataaggttttattagtgtttcacttatatgggtgtagtacaacttatagcaattatccgaagtgtcaatgaacctctattttaaaagataggttcaatgtgggctttcattttgctataaaccttgttttagattgtgtgggtgtgttatttataaatgcattcctgattttacccgttgtcatggagtttgatcattcgttctgattgttgtcatggatactgattacgatcaaatattgaatattgccttgtttattttatttcttgtacaatgtgaggcatgtgttgatattaatcacttacaatttattagtatatgcacttttagcttccttagggccaaaggtcaaacagaacattcacttataatttattttggcacaacatttatatccttaacacatttcaaattttaagtttcatgtcttagggttaaaagatatgaatcatcacattttagagttacgagcactagttaaaacatagataaacacaatttttagtgtggttaataattacctaatttggtatattttgcatactgtgcataaaataaacttttgaccaattttattcctgtttcaacagatagatcagcttgaattcacaaaattttagaaacaagtttcactcaatttggagttgatttgaattagttataaattttcttaggttaattcacttttttcttcattgaaataattataagtgtattacgcctattttttattcattttcccgaattagttttctaaaggaaaagtccccttacactgacaggtgggtcccagtcattttattaaagaaaatattatttttagtagaaaatgttgaaccatggtgacggtgaaactttaccatcaaatggcaatgggtccatgtgccaggaacgagagtttctttaccaaggatctggtcctagatgtcaatgtcccaaattttcattaggacatgagcatttgcatgagatattgatcaaaacatttcctggtgagctccttatatcatacgctcttttcttgggaaacttttattgcatagcgtaccggatgagactcctctaactttatgcagttggggctcacatgtcagtggcataactatatatttacatatatttacattgtaggaagtcagcgatccgtttccaacagcacctaagctgagagccatccgatgagcttttctattcgtgttgtacttcatgcattttgtttggcgcacggatccgatgaggcgacgaggcaacggcacatcgacgcgatggtgcgcaagcacaagtgcgactggttcggcctacctcgaagcagcaacgtgctggcgcaggtctgcatcatatgcgacgtgaacgcgatgcaagggaggagcaagtaagagagagcggtggtcctgcgcggcttgggttagggcacgacgggcggtacccctcaagcactgcagcagggtgcggccggccggcccgggtcatcgacagaaagctcaacagagcagggtgtggtggcggagcttggcgagttgcccgcacggtgagcacggctgccattgctggtaggaaacgatggagaaataaacgattaaaaacaatagatcaatcacagaagacacgagattttaacgtggaaaaccctcctaaaacaggagagaaaaaaccacgggcgctagcaagcaaaatatcttcactatatctagggtgaggttacatcgcggtacggcggcttacaagaggtatatatatatggtggaacctaaaagggatgacgatcggtctccagcctccactacgctccggcccaagccttcgggggacgggcctccgctccattacagaaagtgcaaatgaatttgaatcacaagtcaacaattgcgaggcggccctattggctgggagcctgcgggcctacgggagctgtcttggttcgcttggtggcctgccggctctagtgggctgtttggcctattggctgggccattcttgtctagccccactgctccggtaggcaggcctggtagggacaaggggaggaaaggatggatgggtttgttgacataaaaaggaataagttcacctgtgcttcctcatcttaacatcgagatttttttctcttaacaataaaaaccagaaatatatacacctaaactcaaacaaatagtcctatgatagtatggggcccacatatcttatttctaccagcaaaaccacccatatatactgcttaggatcttgattgcacgatttgtttgagtttagggatactcatttctggttttatggttaggggacctcaaaaatctcgctgttaagttgagggaccttcggtgaacttattcctcatagaaaaagctatgaggttggacctttaaaattgatttctcgatttagggaaatattttacctcgatagtgatgagcacgggttccgatcttgtaaagataactgttgatttagcaaaaacatgatacacattacctcacttcagatcaatattatctgaaccctgcaatcgtagaaccatgtcccctttggttatcatttatctcgccgagaagactaatttctacatgtgaatcgaataatacaagaaaaacatggtagattaaaaaaatattgtttagtttcgagtttacaattcattaataattttttcttcattgggaaaatttaacatctcggtgtaagatgaatattatatgttcaaaacttgtcgtcaaaaattaaaaacatagagtgaatctttgtccggtggagggatgccaccaccgccttgacatcggccnnnnnnnnnnnnnnnnnnnnnnnnaaccacctaggccacttctccatgactgacgccctcgaggcctcaccgacaatgaccgactatgtggctatgcggccgcactccttgctccctatgcggctatgcctcatccttgtgacgcaagagcgattatgttgtgttgttaccgtgctctctcatgtggtatgtagagcaccatccttttcaaaacgatatctcactcatagaacataaaggtcgtaggacaaaaactgatttatatggttggtctattttaaagataaaatattgttgggctgggcataattcttttattttattatataaaactaaagttacatgtggtgtttgaatctcctgaagatgaagatgaagttttttacgcaaaacgaggtggtaataacgtgtgattaattgagttttaattattataaacttggaaaatgtattaatctgatattttagaacaactttcatataaaaaggtttcgcatgaaacacaccgtttagcggtttgaaatacgtgccatgaaaatctttatctccatccaacttttgttggactaacgaacagggatatttacattgcacaggacgcaaggttcaaggaaagatgtaactaattgtccacagtgttttgtaaattgttcttcattggttcattccatcagtatgtaagagaacggccttctttttaaatctctggaaccatttttttgtggcacatcccctggaaaattaaatctttcatatgcttccaaatatgccatctaactagcaaaaagacctgcataaaacctgttcggttgaattgcattcttgcgagtaacactaccagaaagaagtttaattagatatggtattttctaagtattattctgaaaataatatgggattgcccgacctttatgtagaatcactccacagacctaaccacgcaatctgtgaaaatgtgactatggaaatgtattcctctgacattggcttaaacgttgtagacgtgtatgtagttcacttcatctctgccgttgaagcaatccgggggcattccaatcctgcatcttgccttctgtatcatgcggctcagtagcgcaccacgccgccagcaatggaaggacaaaatctaattcgtgcgctctctctgtattgccctatcgcgtgacatgttcaccggccgtccgcccgatcccacaagcactggtgcgtccgtctaaaccacacatggcctggcgattcacgtatgtggcattatcgagaagaatctgaatctgaagccatatgatgctctaggctacacctgcgagagggacacatccacctatacacctctactttaaaaaattttttttcttaaactaatcatctgatctacgatctgattacaccgttgtgttcgtaagaattgaatctttataaaaagatctcacatgattatattttgataaaaaaatataaattacttttataatatatctaaattacttttagatttgactaaattacttcttggatccataaaagtaaattcaataaagcctaaaagtaatttacatatattatagaataaacctccacacaaaagaaagtacctgtcatgacattaaaagtaaatccgtatgaggtaaaacat

SEQ ID NO: 15801 - DNA, 2057 bp, Oryza sativa
  unsure (1)..(2057): unsure at all n locations
cgcgcgcttgtagatcatacaacnnnnnnnnnnnnnnnnnnnnnnnnnnnnnnnnnnnnnnnnnnnnnnnnnnnnnnnnnnnnnnttcatgcctcttatattccagcacagcacattccaagatttaaaaacattacgcatctcgcgtgacgaacagcatccgcccacccagcgacgaacaactccttccaagcgtatgatgcccgtggttgttgatgggattccacggcgactactccttcgcgccaccaccgccccagcgcacgcgacgccggcgctccctcctcttcagcggcggccgccccttcccggggtgcccccacatgcgcgccttctcgacggcggaggcgcgagaggagatcgaggccgccatggacagcaaggagaccgtctacttcgacgacgtggccgcctgcgtgcacgatgctgccggcgagacgctcccgaccactactacatgaaacatttttctggacacaagaaaatgagagatggacaccagtccgtcccccgcacaaggaaatatattttcgtgtgcaggaaaataatccaccccacacgctaccatccttatcctcctccccatcctcccatcatgggcgcgcgctgccatttcctccccatactgccatcctccctctccctctccctgtccttctcccatctacctgtacccctctcctcctcggcgacgccggtgcactcggttagggtggcggaggcggcggcatcggcggccggggtggcggcatcagctaccgtggtgttggcggagcggatccgtctccggccgacacgtggaggtcggatccatcgctggccgccgtggggaggccgggtccatggcctatcaccgctgggaggccggatccattgccgactgctgcggggaggccggatccatcgacgaccgccgcgggaaggctggatccaccgcctgccaccgtggggaggctggatccgcggcctgccaccgtggggaggccggatccatcgtccgcacacgattttcgcgtgcgggtgcgtcacccgcatgaaaaaatcgggattttcgcagacgccgccttccagacaggtggaagctccgcacgcgaaaatcgattccacccgcacggaaaaatatttcatgtagtagtggaccttcgagtccctcgcccaccttcgaccttcgagtccttgttgggcggcgacggctcgtggcagtgggaggaccaggggaacggcggcgggatcttggtggttgatggtggtggcaatcagatgcgatataggcactgatgcggtagctggcgacgagtggcacagctcctcattgccgccttccgctcctcaccagtgccttccgaaggaaagagaaagggagagagaggggggaggatgaaggaagagaagagagcatgatttatgtgggacctacacatatttttttatttttaatgccacctaagcaccacatcaacgccacgtggaaagaagaccgaatcaatactgccacgtagatgccacgtctgcgaaactaccctccaaaaccgccgagggagtcaaattacaccagttttaagagttaggggttcgagatatccggctttgtgatttatggtcacagaatagatttcgatcactttcgagggtcacaaaactgaacttattcctattttttccggccttgtgagaacggatgttttgggccgaattcaacgggccagcagcgagtggctgcaacacagcatgggtatccggcccaaaatagacaattttttttatttttcttaaaagttaaaaataaattgtgtgaagtttctatactttgtttaatgtttctatatgaaaatgcatatatacaacatttgtatgtattatgagttgggccataaatgggctgcacatagcttgtgggcaaaaaagactaaccaataatttagccgaaagagggaaagtgttacaagtaagctacgttacagggggaaagtctacggtatgttcttnnnngnnnnnnnttncnnnnntnnnnnnnngnnnnntncaggcgttntcaatgnnnagcaatcaagggccgc

SEQ ID NO: 15802 - DNA, 5633 bp, Oryza sativa
  unsure (1)..(5633): unsure at all n locations
cgatgtgnctnattgattgacttgcagcctcnnnnnnnnnnnnnnnnnnnnnnnnnnnnnnnnnnnnnnnnnnnnggtaacttgcgcgtgctgtgtgttgatcttaccgtccctcaatgtccgcctcgtcgtcatgaggatgtctgcatcgccatagtggagcctggcgtccccgagcaagactggtatcatcatcgggcactcatatcggatcatatctttgaagttcacatgtatgaggtttgtgcgcactggacggttaatttgaggagaataactgcttcaacaaacgacactgtatatattatgtcaatcggggaagaaagtgctgctagcagctcctaattagttggccaatctgtcatgcgcgtgcatcatatggaaacatgcacttgcgtggctgtctgttgatgctcatgatgatcaggaaaataacttggcgactgacgtccggtcatgccgatcagagaaacaactcggcgacgacagtgattggatccatcgcttaaattaatcttgccggctagattggatccaagttggagaagaaaagcttagcgaattcgtcggcgacgaggaagttgcagctcccgaagtaaagaggaagccggcgactcgtgaagttgattccatcgtacttgtcgatagaaactcgacgcacccctacctagcgcgccaactgtcgaaacatgaattcggcaataataaaagggggtagcgcacgagacctaaaagtggatggatgcggagacaaggatttaaacaggtttaggccctctcaatgagaggtaataccctactcctgtttagggatttaaatccgccgggtgtagtatagatctgacgatcatatgtgctcatgccccctagagggcctcctgtccaccttatataggatgggagccaggattacaagatagaaaccttaaccaatacggtatcggtttcctaaatctattttacaatattgtcaaatcaggactttaggtcgctccataatataaaaggaaacgtaatacccaagtcatgatttgttacatattcctttgatataagctatcccctatgactagtcagataaccatgccgtatgggtatgaggtacccataatctccacatggcaaacacataattgccgatgaccgcttctctgtcctctgatgagatagcatgatcaggttctctccaaaatgttaggaaaaaatttcaatggcaaccatatatcgtaaacaggatacttgtttgatatgcaatgcccaaaccattgataacaggtaaagagtactatgatctgctcgtcaaagaccacgaagaaaaaatgatctacagatgtctgtaacacactaattcttgaggatatattagcaacaataaccttttggtatgcacttgtgttacaaattttataacatcgaatgaataacaggaaacctaaccattaccagaaggatattaatagtgtcagcaaataaagttgggtaaacattgcaaaaatcatctctcgggatcaaggtatattgcaatcatgttatcttacaggaatcctataaaaaaagcaaaataccagggcctatattgtccatgttggaagatttaaaaaattggttaaagcaaatgtaattggcacattaaaatgacaggaaggaataatatgagatatagcttaggaggttgacaaattacagattaattagcattctttaactgtagatagaaataaatgtaagatttgatgcagacgcctactcagtgctcatattacttccatagatactctccatgcactttagcttgttttcacttatagaaaatcggcatccttatgagagatttagagtctcatgggagcataaatctctactatctcataaccatttgtgataccttttttttcgagggtgctcatacctaaacacaaaaaactaaaatacattcctatccttgaaaattatcaaaggccattgatatgcagcttgaggtgccatggtagaaattaggcgagattccccatgttgatacatctgctgatgatctgcagttatgcacccatccacaacaaagtcaattagtatacctggggatactaccagctttttatgaatgataatcaaatagtgtgttcccaaattagataagatatattgagcactcaaccattgggagtttatatattgaaggacaataagtacaacgtatctgagagcatatttttagagtttatgaaaaattgggcggcgaccggccggcgatggaatcagtctgcggcgcgatgtagagagaccacttaacataatggttctagcatgtagatcatagaataatcaaataatttgatacccctggatacccctattctggaaatagtacaactgaataaattggctagactacagtacaaagaagaataattgaataaattggctagactacaatacagagcataataactgaatatgttggatagattatagtaccaaccaagtctaggtataattctgtccaacagaattaacagtgcacatgctattctcttcaaaattcacatgattcataccaaaattaatggttcagacttagtaacattttaaacatggaatcaggtagggaaacatatatacatgatgagagttgaggagaaacaaagacctttctagcagctgttgttagggtctggccgtttgggcgtctgacacccaaattcagatccacaggagtcagaaaagcagcagtgtcgatcccattgaactgcagctcaccgagaatgtcacggaggaatgtcaccgaatcccagtcccaatgtataaagtctttgaggtacctgatttagatttcagtaaacaaatgactacatatgattgagtaaataatatgggcacacatctgcaaataaaagtaacattattatgatatagttattgtagtgaatactcttttcatatatatactcgaactgcttgtaaaataatttaacaacaatgttctcttctccattgcaaatatacaaataaataaaaacccatgaaacattaagctcaatttattgtaaatcccatcatcatgacatcataccatctcattttcaaattacattttcaaggaaaaaattattagtctgcacaagcagaatttgaatgacaactaatagtaaaaactgaaatcaagaaaatgaataatctgaaaacttttccctgcattagttagtacagagtacgtgcagatcagtggtgagagggacataccgaactccttggcggaggtcgcgctggaccggacggcatgggcgaagcccggtcggcggggaaatccatttgcgatgcgatgtagagagaacgaaggaagcacgacggtgactggatggtagcggcgcgatggtgacctgcgggggcgacggcgattgacggtgacctgcggggagacggcggttagggttgggaatcgcaaggcgaggaggtgcgatggtggtgagggcttccggtggcgaggaacggtggcgaagcgtagaagatcggtgaggaaggcaatgccggtgggagagatcgctgcggagcagatcggcgcaggcggcgacctagcgacgggagggtgaggatggattttttttcgggagttacgggggatagacggggtgagcgtgtcgatgagtctgaccgttggataagcgttgaagcgatgaggtgcgttggatgtgtgacatgatgaatgatgaatgagtaaaccatttgtttaactataggatagattagacattctcaaaaataagtttatggggattggattttagcagtttcatagtgatgcatgccgtttggacgtacatgtgtgttttcgtgtaattcaaaaaaaaattgtatttttttcatgtgcagacgctcaagaggaccgtatgtgatgtggttgcattatgggtcctcttagagcctactggggttctcatgtagaaaaaattatttgtgaagtagtgttgtgaaaaataatgggactacattaagtgaaaatcaaaggtcggatgtttttgtctcttcattgaattttattaggccatttccaactcaagacactagccatagtttccttaaactccacatcattaagaaactagtaatagacactactcttccaacgcaaacaccactattccatacttaaatttaatgctacttatctcacataatgtcttggatgttatgtagaaaccatgtctaatgcaagacgtggtttccttctctttcctcatttattcacttgccacgtcatttttcatcctaggtggcatcttatttaatgctatggacaacatcctagtcattgggttgggaatgcccttagagaaagtttaatagtatagcccattactagctccaaatcatttatagccaatgtaatagccaattcatacaatagttgcttactatatgtcacgcccagaaatttagcccaaatttttagactattttgtgtattaaatccctgtccaggactagccagggtacacaaaatgacaagtaataaatagatccaaacgtaaataaagcgtaaaatacttaaagaataggcacttagtcctcacactgaaacaaaagcagcagcagcggaaaaggcgatcctagcggggcttcagctccactccataggcaaaactcaactgaggtctgaaccttggtcctctaacttcatcttcagctcagaagcactacacttctgaaaaaggggaacaacagcaaggctgagtactaccaccgtactcagcaagccacaccaatgatgcagacgtgcaagggcagacaaagaggggtttgtggctatttgcataaaggcggttgtaaaacattttattgagcaaaacggtaaaacagttcagtaattaaagtaatattaaatttccactgatcaacgctacaccacgttgaacaggcccaaccaacctaccagaactacagtgcattgggtcgatttattaagtgtgagactaatcacggtgaatctggtcgatcgcctataaccgcgggcacggctattcgaatagttttactttggccaaaggtgcacaactgtacccacaagacacaatccaccggcatgtcaccatgtcatcatgtgccctgatgcacacatcaccatgtcgagtgattgtgacaagacccttcatataaccccctctgaccaatcgcaccgcacctcaggtttcacccccactcctcgcaaggcagcgggcagtcccctctcgtgccacggtgaatccagaagccgatcaactgaataccccagccaacccaactccattacgcccacccttgcctgggaacgtcagccagaggaaagctatacttcaagtcaggcagttacccattcctgcttgtggcaagcgctgtatgtcttccagggtttcccgcgaactggtccttcattgccatgtgtgcgaccagcaaaaccatgcacccacagcccaccaataagtcgcattttagttggataattatggccaataaacatgcccgcatgtctcgagcacgcagctcattcagatactaaaaaggtctaatactgcaattatnnnnnnnnnnnnnnnnnnnnnnnnnnnnnnnnnnnnnnncgcttgnagctnggtacnttagtcntccatcgaacccgcccc

SEQ ID NO: 15803 - DNA, 1397 bp, Oryza sativa
  unsure (1)..(1397): unsure at all n locations
cccccttcttggggtgtggccccgcccatcggcgcgtgaacggtggtcttcggccccggccgtcgcctcgggccatgcgccgccgcctttggccgtcgccccgctttcccgcacggtcggtcaccgccgtcggtggcggtgcatcgccgccgcctcgctttggtcggccggtcggccttaggccgagccgagcccggccggcgcctcccttgcctcccttttgagccaccgcctggtggggcccacttgccaggcgccacctccctccctttggagccgctgacccgtggggcccacgtgccggcgccccccctttggctgacgtcagccctgggctttattgcgcaataaagtgattaaggctttttctttattagtaaaaacacagtttatcttctaaaattcataagtaattcatccgagctccgtttaagtccattcaagtctcagtaaatcaagaaaaatgcaaagaatccattaaaaatagttttgtttcctgtttcagtagtcttatagcatgttttgcttgtgtgctttgtttgtcgcgtagatttcggccgtttcgtcgatccgcggtttctcgaagacgttgctgaggtctcatcagtgcgagagcaaggcaagtcatgcaatacgtttgatcatattgtacccaatttacaaatatcccgcatttctattaaatgttgcattcttttacaatatcatgtgggatgggtcctactactcatccatatattgtttaccttatgccattgacaacttgggtattaaaatgactagatgttgatttaggaaatgcttagccatgcttagttctactagtacacaaaaagggaatcacattaaagcatagactttgattattggcaatagctttggattggtgccaccgcaagggtgttggttaattaaaatacactgaatggtgggctgtgggtgcatggttttgctggtcgcacccatggcaattaaggaccggttcacgggaaaccctgggagacttaccgtgcttaccccaagcgggagtgggtaactgcttgatctgaagtatagctcgaccctttcctaggcaccggtggcgagggtgggcgtgatggagttgggtcggccggggtgtccggttgtccagctgccggattcactgcggcgcaagaggggacccgctactgccttttgaggggtgggggtgaaaccttagcgtggtgtggatggttaggggagggttatgtggagggtcttgtcacgattttccccctttgcagtatcatggtgatacttcggggcatggcgacatgtgtggaatcgtgtcttgtgggtacagntgtacacctcttgccagagtaaaactattcgaatagccgtgcccgcgggtatgggcgatcaaccagattcac

SEQ ID NO: 15804 - DNA, 4483 bp, Oryza sativa
  unsure (1)..(4483): unsure at all n locations
aggcgtgtgnttttgtagaacctttgtcttgtnnnnnnnnnnnnnnnnnnnnnnnnnnnnnnnnnnnnnnnnnnnnnnnnnnnntatgacttgctgagtacagtgggtagtactcagtcttgctctcttttctcccacaccagagctgaagatcttcctagttggagctgttttgtcaaagttggtttcttcgctgccgtcaaggattgcctgtggagtggagtcgcccgctgctgaagtcaaacttcccggtttagctcgcttttatcttttccgcagcatttgtaatcttttctatttttggtagacgtggatctgtatgtaaacaaattgtggttgtgtaccctggctggtcctggatagggatttaatgcacattcagcttagaaattctagttcgagaatttctgggcgtgacaccgcggggtggtcgtcgtcgtcgcgcccgacctcgccgccaccgcgctggatccaccgcgcctgacctcgctgctgccgcttgccgccgtcgtcgtcgccgcggggaggtcgtcgtcgccgctgtcgacgggtggtaccgcgactacggtatttggatggtatagggatcgtcgataccaaggtatatgcgagattgaggtaaaagagatggagacatggatttttatacaggttcaggcaccttatctaacaggtaatagccctacatcctattggccggaaccggtgttgctctttatttatctggatcacacaagtagaatatttgggaaaacctatctagttgtcgtcaacttggtggcagggataaccaacacgtagtcaacgacagggtagtcttcctcctcgagcatgaactcgtcgagatcagagatagcgctagatccctctagccggcctccgtaggcaccggatgcggtatgtctaggctaatctctgatgtcgagatctggcggggtgtgttggcttatgtatatgttgtgtcttgttggtcttgtggcttgctttttctcctcctggggggcttgtatttatacccataggtgtccccttgtccaagaagaactagggagaccaatatggatacaatccaggtagtccttgtcattttcatatagaactctatttgtccttccttatccgaatctccttctatatacgaggtatgattccgtataagatatggtatgtggtgggccttgtcgtgcttagtcaactactattaggtatgtggtatccataacactaacagccccgcccgtgtgttggtatttcttaacgacattactagaaatataattcccagcaatggcccagaaatactcctggtatattatggttacagagttcatccacaagcgcatggatataccattgtagcatttcacccgagaatattccaagggtatcgtatttattttatcccgtgggaagataatgtagagagaacttgactaataatttatatattacttgtgataatcatattctaagcaggggttaagataatccaagggtagagtgacacacaagcattaactactcattctcataataaatcatctaaacacacaatgccgcgtcgccgcccacgcgtcgttatcgtcgttgcccactcgttgtcgtcaccgcccactcgtcgttgccgtcggggtcaggctcattgtcgtcagggtcggcgcctcctcgtcgtcgtcagggtcggtgatgagaacatcaacaccaacgatatatccacgcctccacaagtacaacttcaacgtcctattactcgcgctcgtgcacgtcaactcaactatcaggtgcattcattcttaaattcatatgattcttatttattccccggagacacgtgcactcttgttttattcaggaacaatggagagaatcaaatgggtgaggattcgcgcggggtggattcggactgcagcacagtcccaacttttgacggtcgccatgacttcatgcgaactctgatttgggcgtgcaagtactatcaagtctaccttcaaatggatctagcctcttgtccatatcagttctggagcagccgcaatcttcatttttctaccgagttcttttctgtccacggtgttgcgtcacctcttcgggcccaatgggccgtgtatcaagttgggtccattagggatgcgtcctagggttagagaacgaccccagcatccctgtggttgtccccttcctcttcttatagctttctccgccaccaagaataatcgggttttgtttagatcaaagtacagcgtcgctactttgccgagttgatcccgtggtcgattagattgccggattgcttgttactgaaccccacttgttacttctattgattcaatcaaacatctttgattcgcaaatttagttgcttgttcatcttgttcttgctggttctcgattgcttacaccgcctctggagttggtgtaacgattgctaaggcgcaacatccctggatagttgtagtcggatcgccaacgtcactccatccaatctacttatccctctcatcgaaatatcgggacaccctcaagcacatcagtcggcgccgccgcgaagggggcagcccgagcgacggggacgacgcggcagccgctagccaccagcacgcgcacgccgcccactcgtgctcggtaccgagagaggaagagaaagagagggagaggagagaaagagtgagagagaggaagagaaagagtgaggagaagggaaaaatatcagggggggagagagagaggaggatgaaagatgaaatattttgaagtggtgaggagggaaaattttcatttgaaatttctaatcgatttttatggcactaaatcaactcgtatgaaaaagctgtcaaaaacaaagttgtagaactcatttaggtgtcctgtttttcttttggtcatttctctatctgagttttattgaactatagaaaattttaatttcacagtcaatttcacaaactacaggtattttgaccaaattatcacaaaactacagatttaaggagttgtatcacaaaactacacatttagcaccaaatttatcacaaaactacagattttagattaaatatcgtaaaaatgcatatttaatattgaatttatcacaaaactaaaacttttggagtttaaatccctagcaccattgttatgatggagctataaacatctttactttttattaaattgattctaaacctgtagttttgtgataatttagttactaaatatgtagttttgtgacacttcatcttaaatgtgtagttttgtgataaatttggtgttaaatgtgtagttttgtgatacaccgagttaaatatgtagttttgtgataatttggtcatagtatctgtagttctgtgaaatttacttttaattttaaaatataagaaattcaaataaattttcgggtagtaaatgatacaaatgaaaaaattgtcaacaacaaagttgtaaaatgcatcaagatctacaacttttgtttcggtcatttttctatatgactttttttcgacagtttgaatttgaatttcaaattatgacaatttcaaacaacattttcaaatactaaatgatttcaacttaaaaagttatcaataacaaagtgtcataacttatcaagatctataacttttattttggttattttttcatccgacaaaatgatttgtaagattgttcacaaaatgcacatatctctcttataaagttttataaactatataagagatatgcaaattttgtgaaaatgttactatcactttgtctgatgaagaaatgaccaaaaaataagttatagatcttgataagttatacaactttgttgttgatgactttttcagctgaaatcattactgcttcaaaattttgaaattcaaaattttaattgataaaacaaagtcacaagaaaaaaggccaaaataatggcagtatgaacataataacatgacagagcatgattttagaaacttttaggaaaaataatcatctaatttaaagttcatatgagtgagataaactagttttaaatttttcaaattttatttttgcatacggctccttaagtggtccgtatggaaaaatcgatttttccatgcggtcgcttaagtgagccgcaagcgaaaatgatctcatttttgcatactgtcctcttaagaggcctgtacgggaaaatcgatttttccatacaggccacttaaggggctgcatgcaaaaatgaccatcgatttttataaacgccactagttatggtccgtttgcaaaaaatcatggggtctcgtaagataaatcacttttgtagtagtgcgcgcgccgctccctcctgccggtcctcgtgcaccgccgccgttttccgccgccgcagaccccgcgcacctcgttctctctcgtggctgccttanagctcgttnctacctttgagcgctcttgtgttgaccttccngcgcacgcatgcgccgttgtctttccttccaccttcggncagctgcccgttatccttcct

SEQ ID NO: 15805 - DNA, 1706 bp, Oryza sativa
  unsure (1)..(1706): unsure at all n locations
ttttaaacccgcgaaaggaatcaanggaactacagngngggagntntnggatnaagcttangatttccaacccatggcttgtcatggatcgatccaaatccctccttacaaacctgtttatgggcatgtggctgttttgccgtgggaggttagaatcggctctcgaagaacggaattacaaaacgatttaacagccgatgagtattacaaccttatggccgatgagtgggaggatctggttcagtcacgattgcgtgtccttgcaaaggttaccaaggacaaggaatgtgttactcggcactataataagaaagtggtgcctaaagatttttcagaaggagaacttgtatggaagttgattttgccgattggtacccgtgattgtaaattcggcaagtggtcgccgaattggaaaggaccgttccaaatttataaggttgtgtctaagggagcatatatgttgcaagggcttgatggtgaagtctatgggcgagcgctcaatggcaaatatttgaagaaatattacccaagtgtttgagttaatgcatgacagccgatatgttttcatcgccttgagatggccgatatagttatatcacccttagttgtttttatggtgtaatcggttgtggtttgccgatgaccaatggccgatattgttatatcgcccttagttgttttataattttatcaatgcttttgacattgtaaaattaggggggcacatacatatcaaaatgcaatgcagcttacaaattttttgagcacatatcaaaatgccatgcagattgtcaagacagtaaagtattataacgtcttagccgattacaaaatttgtaagttctattacatacaagttattgagacaagtattgctggatagccgatatagccttctgcctaatctgttccacttcttctatggcttgggcatcttgagcgtcagttccagggataactttcaaggacttggtcatatcagcgacattcttgatagccgattttagctttgccttttgttcttcaacagcttgcgggagatcggctagctttttgtgctccatatccagctcggcgttgcattcttgaagttgtgccatgagatcaatcttacgagcttcaagccgatcgatatttgacttgattatgccttcagacagctgatcaagcttggacttctctacatgcacaagctaccgattgtgctggattgtagcttcaatgtctttgcgttcccggcgatcggctaatctctgcctagccttctctagtttgaatcggtgttggtcaaggtaaacggctagagtaagggcatcggctaagtcatctgggagtagagcttggatgtctgtgaacctcgctcggatcgagccacaattggtcaccaagttatctagtgatgcttctagccgatgagaaatatcttccagtatttttctcacatcatcggaaaggggagctaatgctttgcttgaagtatcttcttctgcttcatcaaggtaatctctgatgtcaaaagagaagagatcggctagaacctgtagagacggtttcggaaagagtaagagctgggtgaatatagccgatctaattggtaagacaaaggaagacttactgggatagcaggagcaactagtcacagccgatgtgatgacttcccacagccgatggagtctagtcacttgatgattgcccaccagaggaat

SEQ ID NO: 15806 - DNA, 4841 bp, Oryza sativa
  unsure (1)..(4841): unsure at all n locations
ctcccgtgatgaatgccgactggaagnatgcatggggtgattgcagataagaagatttctctaggcttttgatatctgtcattgttgatgtcttcgaatctgaagtcccgtggattttccagaagtgttgagtctccatagataatccttttggaacccctcataaaagctacaaaaccaatctttgagcagatcggccgatagttttgctcctgcatcagttggtgtagaggcgtactctccatatgatgtgcatctccgatgagtgagttcctctccgtcatcgttaacagtcggctctaatcttgggaattcagtttctgttacagatggctgattgacaaccttaatgactatcaggtttaaccaagtttgcagcagctaccatggtccacctgctccaactattgagccgacggctgttttagccgatgcattgttcaacatttggtacagatagccgagaaggattttgcccaaaggaaattctttctttgattctaaggcttcggctagaaattgccagttggttgtagggccacaactggatccacagaagaggaacttttctaaccacatgagcaagaaagctacatgctctcgaggggtaacggatccttggcccatatatgccgccacatagccaaaccagccacctatgcttttggtcttgaagtcaaattagttcttggtgttcatactcatagggttagccgatgaagttacatctaatccagtaatcatggtgatatcgattaaagttggagtcatcggcccttgattaaacaaaaaggcattgatggtgtttgaccagaagtaagaggcagttgccatcaggggttcatctttggccgagtttactatagtgaggtcaagttcttggccgattccaatttcatcccagtgaacccttttgcttgctgatacacgtttgaaccatgtggtccaacttttttcaggtggaactttctctagagacggccaagatttgaaggtattcttccagtgacctagatctgggttggttaatctgaaggggatcctattggtttcaccaataataaactcagtggaatcagggttgtcgactgggccgagaaagtagtagttttcgtatgagaggcttggaatcgcgactagattggagagatgctacaaatccaaaacaaccgagaaaaagagagggatgtaagataagagaaaatcgatctgctgctaagaaaggggatctagccgattaggacttacctcagcatactcggctgatggcgtatcagatgggttggtggaggacgacatcactgcgggcggaaatctcgccgaagatgaagtcgcctggaagtcgcttttgcgttggaggaattgccggagagaaagaggacaaggtttcgcttgagcggtggaaatggaagtcacggtgtgagatttctcgaaggtgacggttagtatttaaagcacggcaataacggtcggaaaacagcaaagtgcgaaatttgctcggagtcgatttgcagcaaatccgaaacattaccaaatattctggacttggagggcatgtgttaacaaccagatttggtaacatcagcatcaggaaagaagattagatcgaagcaaagttggaggcggagatcgagttcggaaacagagcaggaatcggctggagtccggatcggctacgactaggatcggctgggtctgagtcggattagaaaagccgatacagctgattctgataatacaacttgacgtgtgatgtcgggttggattgaggtgcttcaaggagattgccgcacatggatagagtcctgaggaggcaattctatctattaattaggatgctttatgtaatttctttagagatacgattgggcaaaagtctgccgtaaagagttatagtatcttagagtttgttagagatggtaatcgtgtccgttatggacatatcttgtaattctcgggtataaatagacccgagccctatgtaacttaaaaacacacgttcaatataattcgggtgcatcgccacccttttttactttagttttgtttcgacgagttcttgctttcgggttgagctgcatcggtttcgatcttcaacaagaggtaaaccttgttatgacggcttgcgttcttgagattagcgcttccatctttatgatactctaatctggtttatgtgattcgtcaagttgtcatatatcttacataatctctagcaatatcgctatctaacctacaatcggctaacatctatcgaggaaggtagccgattaggttagattctgacgttgactcggaatatataagatatctaccactctatgaaacttccaacggcttgattgtctagatattgttcttcttttcatatttagtgctgcatcagttgagtttgatctattaagtcgtgcttagaatatcaatctctagcctgtcttctggttgtcgattagggtagcatcggagtgtcagccgatcttatctgatttaattatatttgctctatatgcttcattgacacgttaaatctgccctttatgtcaagatattactgtatttaagtatattaggcttctgtttgatatattttacctgttttaatatcctaatatagagtagtatcggagtattagccgatacatgctcgatctatctgatcggctatgctataaacatatatagtcctgttattaatatatattttgatctaagtgatttatacagtctcggcatggcgaccgatctatcccaatcacttgatttaagtatatatcgatataagaataatacattgaaaatatctaccgcccatcgaatagatttagtcctttattgtttatttgcaactgccgatcgattcacatatgacattggctcaaagataaatgatatgtcatcggcaccctagccgatcggctatcatttatagatttaacccgggtttcttggcttctatttcttgtggattacaggatcaaatcaactggcacgctagcgcacccgaaggcgagctttggacctgcactggagttaagcaaatctcctaggcctcgtgttttctgtcaacaacatccaaagaggaaaaagaagaaaccaaagcattcgacttagaatcaacttttcgagaaagaacattcatctcatgtgttttcagttttgtataaagtgaatccaaagtcaaagtagacatgttaacagactcctgaatagatgtaactttcatctcccaaatagacatgtcgagaccattcaaaaagtgacgagaaatctcagattgtggataattagcttcataagaagaatcaacagatctaatatcactcaaaattttattaaacctagaaagatagtcatccaaagcttctccaggtttcatctcaaatttaatatactcctttttaaaaagatctcaacgaagctctttaatgttatttgttccttgatgaaaattactcaaagcaacccaaatctcatgagcagtttgaagatgagcaacacgatcataatccgaacgagaaataccactcaaaagaatgttgcgagctttgcaattttgttcaaaagcagttttttcagcagcagtattaatagcttcaggaatcacataagcatgagaaacttttctccaaatatcataatcttcagccataatgtaagattgcatcctactacatcaatgagaaaaatccgttccatcgaaaacataaggcttagttgaaaacctagcgggagtagccatggcaaaaactctagatcgataaaaatccaaagaagaaaacaaggctctgataccacttgtaggatcgaattacaagaactaagccaaccagaggggggtgaatggttggtatacccaaaaaccgaaaacttttagcggaaataaaagttacccttaatttcgatgagatcggtctgaccaaagtagattagccggtctgaccgtagcgagccgccggtctgaccggtgttgatctaccggtgtaaccgccgagatcgcctgctgcttgctgtcgccgccgctggtctgaccgccgtgttcccgccggtttgaccgccgcttgccgtcggtctgaccaccggtgagttgccggttagaccgccgaaacccggtaaacacaaatcgaagaactcttaaagtagatgacgactttattaattctctctgtgcttacaaagtgcaccaacagcactccttacaaaaattttgactaaactcgaaaccctaactcaaaactcaactcaattgctctctaaagcgatacagggaagcctcacgctccccctctggttggcttagttcttgtaattcgatcctacagttgcaagccctattccatgacagttgataccaatgctaagctatcctccactgatggtaatcctgtgattgatctgaccgtctatcgtagtcttgatggtgccttggagtacctcacctccactcgatatattagatatctcttatgttgtccagcagattttataccgccataaagcgtattctatgctacctttgctgtactctggatcatggcctttacttccaaacattcctccacatttgacttagtggcatagtatgcagctgactaagctggttgtcccgacacgaagatgtttacttaaggctacgtcgtgtttttaggtgataaccttgtctctttgtcctccaaacgtcagaactatgtctcccgctccagttccaaggctgagtagagtgtcatggcaaatgctgtggccaaaatatgccgggtcannnnnnnnnnnnnnnnnnnnnnnnnnnnnnnnnnnnnnnnnnnnnnnnnnnnnnnnnnnnnnnnnnnnnnnncaaaaaacatcct

SEQ ID NO: 15807 - DNA, 17554 bp, Oryza sativa
cctctcttccgccagtccgccagaagggaggcacggtggtgccgcacgcgttgaagcggaaaggaagccaccaacgacgtattgcagcaggaggggaggcaccagcgacgtattgcagcaggaggggagccggcaggcgggtgacgcccatggagcggcggtggggggcgcctcccctcagccatatccaatgactgccctccatggttacccaacggtgagtcttcaatttctttccgtgatttgggtggagatgaattgatgttgaatttatgtgatgcttctgtgatttgtgtggggatgaatcaatgttgaattatttctgtgatttgtgtgcggatgaatcgatgtgatggttctgtgatttgtgtggggatgaatcgatgttgaatttctatgatggtgagatgttgatattgatgaattgttgtatgtgggatggggagctggctcgtgcatcgagccggtttttttgcttttgtgcctctcaaaggtgccagttgtgacctagggtcatcagtgccgcctctgagatgctggttgggaaaaccggcacccaagggtttttcaatcagcacatttatacctttatgtagtagtgttgttttattaaaactgaatatattttgatagttttgttttatgttaaaactattactatatttttctataaacatgatcaaaataaagaagtttgacttgaaaaagattaaagtgatttatagtatgaatcagaggtagcacttaacattagacattatcactcaaaatctttgatcaaatatttctaacggatggcaccacccttatgattattgtatgaacagtgtgtgcacacgaagtgttgctgtcgagatgtacgctccccgatccaacgtcatggatattttactacattatgacgtctctgttattttctgtgttgaaacaccatctcaatcccttaattatcgttgtcgacatatatacttgccccaacacatttttctcgccctgaactaccgccattgacagattagacacaccctggtcatcgtccgttggccacaaattcataactctcgcctcgccatttcaatttgtcgatagagggtgtgtttggatcccagccattgaatgccaacactcctgtggcgagccacgccatggcgtggcattccaaccgccaaccaagcagccctagaatatttgtggtgtgcgactgatcgactaatgggccttgcttgtcgttaatcgaacatgtggatatattcagtagactgttaacggaaacggatcctctgcagtcgaaccaatcatatctacttccttcgtttcacaatgtaagtcaatttagcatttccacattcatattaatgttaattaatatctatctagatttattaacatcaatataaatgtggaaaatgttagaatgacttgcattgtgaaacggaggtatattctttttggaataattctattttgcctccctcaagtcttgcctctgattgattagtatccctcaactgcaataccagatgtaaggcctcctccatcttcaaaaaccggagcaaatcgaatccctcgactgtttggatagcggttttatcctatgtggcactcatgggacccatatgtcagtactaatctctttttttttctttttactcacatccctcttttcctattctctctcctcgccgacgagcagcaacgcaatgacgacgacgacaaggaccagcattgccaccgccacaacatcgatgactgcgacgacgacgagtgcatgcgtcatctcaccggaggcatgagtgcatagccatggtccgctgttattcccagcggtccctagcgtcagctctcgaggtcccagcatcggcggctcccgtcagaccaaggtcccctcctctcccccaccccgtggctggtcggcgtggagaagggtggcgagttgtggctgtccatccgatgctgtgaaagagaaggagcaaataaaggacagaagtggaagaaaaacaatgaaggtgggacccactgcttttttattttccatcgggcactcaatgacacgtgggtcccacggtttttcataacttaagtgccacgtagatgccatgtcagccgaaaccaccgtccaaaaccgccttgggattttatttgcactggttgcaaattcgatgacaaattaagagacctaaaatgaacttattccttttatttttggctgacgtgtgtgcagtatgtgcacacgaagtgttgctgtcgagaagtatgctctccgatccaacgtcatggatattttactacattacggcgtttctgttattttctgtgttgaaacaccatctcaatcccttaactatcattgtcgacatatatacatgcgccaacacatctttctcgccctgaactatcaccattgaccgattagacttgtcatcgtccgttggccacaaattcagaactctcgccaattcaatttgtcgatagaatatttgtggagtaccgtgcgactgagcgactaatggggcttgctagtcgttaatcgaacgtgtggttatattcagtagactgttaacggaaacggatcctctgcagtcgaaccaatcctatctatatcttttatgagtcttttgcgttgctactgaaagcaatcgtctaagacttcctcaccatcattcccggccccgaaagatttagatgaagatttgaaagcaaatacacatcgggcgcccgatccgggggtgggaaaatcgggcgcccacagtcatgctgatgtcatacccacgtcatgcatgtaaaactactttaaactattttttttcttaaattatttatctaaatcataatccgattgcaccattaaattcgttgcaattaaatctttaaaacaaaatcacacgcgtatatattccgatgaaaaaatattagcttattattgaattatttttaaatgttgcacgttgttccaccaagtatatcggaattgtttcactaagtagatcgaaaatgtttcgatcgtttaaatcgggcgcagtttcaccttatataaaaaaaatattttagcaaatagtgaaaaaaagttttagttcactacaacatttaatccatacatagtgaaacattataagtacactaggtgaagcatttttggtgaaaaaaaatggaacgaattcccttaatagagggtttccataagatgtgggtgatttcttgcaaaagaatgtttcaattcactgcaaattagatctatacgtaatgaaacattgtgaatacactaggtgaaacatttttttgtgtacaaaaaatgaaacgaatttacttaatagaggttttccaaaatatgtgggtgatttgtttttttactagaaatactgccaggactttgccttgcagtgtgattttataaaaggaataaataggttatttacaaattacgagagaccgagaaggaaacaaaatgattacactgttcgtaaccaatcaaaaactgtgtgttttaggggatccttttttctacacatatgcagaagaaaatcggccttgaataaaggcctccaagaactgaatgagggaagctcatttcgaaagattttcccattcctttgcttccaaatgtgccaagcagcaataaataaaatttccaaaaaaaacccttccggttgaactgaatgcgggccgaaaccaccacctgaaagaaattaagactagagttccacacaattcccaaatgctgccagcactgctgactgaaggggcagaagaaaaaaagatgctctcttgtctctctgatattattcaggcataactcacaagtgagatcatcattctcctttgcatagtgacgtcgatcaagcatatcccttgtgttaagtctatctctaaacaaaagccaagcaaaaacttttatcctcattacatatcttgttttccagatccaaacaaaaaggtcttggcacttgctcattcgagaaagtgagcttataaaacctcttagttgtgtacttgtcagagttccagatgaaagaccaatcatcacccttgtcattatgcaaagagagagaggacaattcttcctctagaatgatgaattctccataggcttgggtgttcagaggcagcaagaaacaatcctcaagaggaatagagcacatttgattaacagagagggatctatccaaagcaaccatacacaaagctgggaatgcagtgcacctaatcttgtcattccaaaaatcatcctagaaaagagctgaggatcctgtcctgatgaagcattttgaaattcccctgaagatatcagatagagccactatatctttccaccaaaaagagcctttattccaaactaaatggggcaccttggagtcataataagaattccagatcagttgaacccatggcagatcctgcccttcgtaaaatttgaccaggtatttaagcagaagtgatgtgttttgaattcttaagttaatgactcctaggccacctttttcctttggtctacacatctaatcctaagaagcaagagatcttcaagttgagtttgggttgtttcccctccagaggcagtttttccttgcagtatcaatagctttaaccactgaaacaggcaactgcaaagaacagatgtaatatgttgggattgaggaaagcacagagttgatcaaagtgagtctccctccctgtggcaaaaattgtgagctagctgtcaatcttctctcaaccctgtctaccaatggtgcaaagtccactacccttggtctagttgtccccataggcaaacgcaggtaagtaaaaggcattgtacctatggtgcacccaagcagactagcaaaaagctcagcattctcatgagacagattgattgggtagagacaagacatatggtaatttactttgaggccagtagaaggtgcaaaagagttcaacgaagccttgaaacaaaacacctctctctatgatgttttgagaagaattaaagtgtcatctgcatactagattactgggaaacccctttcatcaagttcattaattggcttggacaacaaaccaagggagcaagcttagttaactattctctatagtaattcagcaccaagaacaaagagaaagggtgaaagtggatctccttgcctaacccctctcatgcatttaaaagaatttccaggtaccccattgagaagaactgaagaatgtgccgaagaaaaaaccatttgtacccactgcagccacttatcatgaaaacccatacttttcataatggatatcaaggcagagtgctgtatagaatcaaaagccttctcaaagtcaagttttaacaaaattatttctctctttgactattgacattgatggatatactcaaaagaccatgctaaacagtcttaaattgttttacccttaatgaagccgtattgattctcatgaaccagcttaggcattacactctacaaactatctaccatcaatttggttaatacctttaaactaatacccatcagagagattggcctataatcattaactgtttctggagaggacttttttggcactaaagttatgaaggatttgtttatcggctgcagatcagtataacaggcatggaagtgtgctgctaaccagtaaaattcctgtgatatgatgggccaacatttcttaagaaaatacccattaatcccatcagggctaggtgccttatctggttgaattaccttaattagattgtccacctcttgagtatagaactgatccaccaagcaatccaggttcaccggattgggaaaaagatccatcagattaaagtccatttgaggcaaaagaaaaatccccattctgtttttgaaactatggaataacatatcagctttctgattgtgtaaagtgactacctatccattctgatccagcacctgtgcgatagaattcgatctgaacctttaagtcgcaatggctttgaaaaaattagtgttctcttcacccagcagcatccacctattcgtgcaccttttttcgcaataaagctttttaaactcaaggagcttaaaagtttgcgacttgacaatttctctgaaattccattcaaacatggtcaagggcctatgctcttctattaggtctaggaaattaatcacagcattacaattgaccaagagagcagttaactgagacaagtttttactcaattgcagcaaactttttctcaaaaattttagcttgaaactgatgcatcttgccggatcttcataactagtgtccattgaccaaactctgctgacaagctcgaagaagccttccatttcaacccaataattctcaaatctaaaaattggagactttgggatatattgtgggccaggggatgaacagtggtgtttggaaaagccaaagtccaagatggacttgtaaaaacccaatcaagccgctccaagaggggactgctctgcatattactccaagtaaatcttctttcttttaaagggatttctagcagaccgagagaactaattatatcattaaaaatgaatatatcattcatatcagctcccggcttgtttctgtcctcaactaatctgtagaaattaaagtctcctaggagaatcatgttatcaactgacccaaaagaaaaattctttagccaagcaacaaaatctgaacgttctgggccactacatgggccataaatacaagttagggtccaagcttctgaagactgccttgaaacaaagttaactgtgacagaaaaactgtttatttcccctggagttcccaaaaaaacatttgaaacccataccactaggattccacctgaagcgcctcttgaaggcgagaatgcaaaagcatcaaaacgtttaggagcaaaagtctttatatcaggaatagtgaaattttgtttcttggtctcttggacatagaaaacatgacaaccactttcctctatcttttgcctcaaagataacaacttcgtgtcagcattcatgcctcttatattccagcacagcacattccaagatttaaaaacattacgcatgataaaaaaaacatatgggagtgcacaaagaagaagagctaaataaattagcctgaagaggcccacataacataaatccagaacaattgtaaagtccactcacactgtccaaagtccaacagcactgaaagacaaaagacatagttctgaacaaattaacactattcattcttaatcatccatgtctgcccggggaagcgtctttcttttctctcccgctaaactcgattcagccacgtcctcaggatgtaggccacataggtccacccccaacttttacaataaagacaaagaacaatcagaaggggatgaatctaaatttatatcatcatccagagcagagaaatcagattcattaatcttgctgccaggaataagaattttcgatatacctaccaactcgttcaactttttagcagatatcccccttggtttgccaattcccattcgatgatcaatcttaagctcttggctggcattaagaatcctggaattgtgccttctggtagggttgtataaagtagtcttctcatcccttttcttcacatgagccttaggaatcagaatcactgcaggggtgacttctggacttgatgactgggcttgcaaagtcatggcatctaaaatctcttgatgagtaagtccatcatcaggagaggaaggcaatagggcccagctggaatgtgctcttttaactacaggaggggcatgatcaagttcatgaaagggcttccatagggcagagctgaagggccagaattcaaagttgtatgcatgatttctagctttgcacaaatgatcaatcttttccaatagaccttccataggataaaaggatggatgctttggcccttccctgtcagctatctcctttgagcctagccaggaaaagctgcacctgttgatccttatccatcagattatgttcttctaacacttgattaggcaacacaatcagttgcctagggttttcctcaatctggcccattgggtgatccttaccccaagcatcctctatttttgcttctgcagcctactgttgctgcacaaagttatcccaatcaccacccccctgattaccagggtgtcctaactgccaaatatttccatcatctgggtcattagcatcatcatcattaggccctggctgcggcccagcagtaggtaaatcctcttcaggtggaatatcaacaaaatctccatccaggacaaaaaccgaaatagtccaagattcacctccaccgccattacccaaaggatcctgcaacactatctttcggggcacagagtcaagatccctaaattttgctcgcacaaacactctctatctagccagaaagtgagctaaccaaaagaggcaaccgctagatttatatggtgatgatcaacgaaatccagcagcaaatccaaaagaaggaaccagccttcccggttaaaatggcaagtacgccagtttggcccttggtcatgtttaacaaactcaacagtcgtcgtaagcagcaggggtgaattcaccaaggcatctctatgcatgaccgaatgaagctggaacataccaaacggggcggccgaacgcacaaacggcaaaatcctagaagcactaaagaaaaggcttgagggggcatcgaagggcaaatggccagaggaaatgctgtctgttctctgggccctgcgaacgacccccacaagaccaaccaagttcagcccgttcatgctactttatggtgacgaagcaatgaccccaacagagctaggggctaactcaccaagggtgacgttctccggggacgaagggggggcgcgaggtgtcgctcgaactcttggaaggggtaagagtcgaagcactcgaacacatgcaaaagtatgccacaggcacttcggcaacttacaacaaaaaagttcgaccaacggagctattgcctggtcatcttgtcctaaggaaaaaggcgaacccgatagccgttggcaaacttgaatcgaaatgggaaggaccgtacctcatcaagcacaaatccaggacgggatcctttcgactggcgacactggaaggcgaagagttcgaccattcctggaacgctgcctctctcaagcgtttctatgtttagaacgggtggcacccaaatcgccaacttgtaaaaatgtatatatcgttatgtaagcccttcggcactatgtaagcctttcggcatgaaaaaaaaagaaaaaaaaaagaggaaaatgaaaaaagacaaaaaaaactggatgtagggctattatccacaacggaggcccgaaccagtataaaatctttgtgtcctctgcctcatttttatttgtttgtgcgattgacaatttgcggaaaaaccccaagacaaacgcctgatcagcgaaaaaggccacggggcgaaacgaatcagccgaagcatcgctcgccgaacgattgaaaccgcaacagcttgtttcggaaaacaattagccgaacaccgtcacactcgatcgaaaggaaagcacgagtgcttcctgcaacatagaacaaaacggatcgaaaacggaagccgaaagctgaatagtcaaaacctatttcgctaagatatgaaaaggggccgacatgttcggacccaacgaaaagcacgtgaagtgacaatgcaaaaatagcgaaaaggaaataaaacgcacctttattgattttaaataaaaatgtatcatcacaatggtgcaaatgaagagaaaggagcaatggcgttacagcctggcttacagataaattacatcttcgccccagcgctctctctctctctaaggagcgatcgggcgaactaggttcgtcatcactactaatatcatacacaaccctaagaggagaagggagcgaaatagagactagactgtaacgacgctgggagatcgcctcctgccgatcagtcttctgatggtttcgccaaaagcgagccatgtcttccaaacgtcttgaatgaacaaaatcgtagtcttccaaggttcgcccagggtgcgcccgaagccacccggcaaccttaaaaaccttatagctgcgtccgtttatcaccatttcacgataaacaggccgaaatgggcatcgcacctttggcaaatcctttaatgccacaaatttctcgttttggtttcgccaactcccagaagggggccgaatgcacaacttttggcgaacaccctggtagacagtgcaaaaagggcaaaagacgaattgcatagtaagaataggcaaagaaagaaaaaagtaatgcataatgagaaatgggcgtaatcataaatacgccaaagattttgaccatcaaaaagtggctaagagtgagtcatatatatttaaaatgaccaagggcccctttttcagctacaataaggaggattggcggcagcccgccaaatacacttcgttcgccacatctggcgaacacaaaacgaaaaagaaaaactacaaaaatctaaggaaagggcggagggcatcacacctctaggtgatcctgggcatcgcctccacccccttcagccaccgcgtcctcttcttcgcaaaggtctgccgcctctgccttcgctagttgctccaaaaggcgcgccttggcggtagaacgaccgtccttctgccagaactgcttccgccatgcacgaagtgcgggcgaaatgtcctgtgcgccaatctcccaatcccccttcgcatagttagggaactcggcgacgtgctcgtagctgaactgttgcaggagacccatagtaaaggccgctgatacacgcgcacagcaatcgccgtacgtagtggcgcagtccgaaaccgaaccactaacctgttgggtccactcgaagaagttgaaggccgaggcatcttcggcagggacccctcgcacttttgcacccatgtcagtaagggcgaggcgaagcgtttggcacgccgttcttgcggattcggtagttttcgccatctcccgcgaaaaccgccgcgacttcttcatagcgctcgcttcggccttgctgacctccaggcgaagagcctccatcttcggctcagtaaggttataataatccgtcagcacggcggaatgggccttttctttctttaattcggtctggaggcgatcaacctcagctatggcttctctccctttctccagttcggccttgaggcgatcgacctcggccgtagcctcacttcctttctccaactcggattggagccgcttgttttcggctttcgcctctttcagggtgttggcgagggcctccatctccaagttcttacggcctatttcgtcatccttgacccgaagacggttcttaaatccatcaagacgagcccgcacggttcgctctgtcgaacagtgagctgcaagaatctggatgcaaaaaaaagaaaggaacggcgaagagagcaaatgttaattatgggacatgtaaaaaagcagaggaaaaccaagaatagagaaaaagcatactcgaactgccaagcttttaatagcagaacacacctcatcgaactcattcagttcggtgaacaagctcggggtgctggcaggtaagacaagattacttactccctccacaaagggaataaggtctgctcgggtctcaaaatcgccaggggcgaaacggggcgccgcaagagaatactccgaaacagatgtctcgatggccgcccccttccccttcgccttgactagcggcgaaataacccgctgacgcatagggctgccgaagaccctcgccgcagctgtcacgatccgttccgcggaggctgaagccccggcggcggcgctaccgcctgctccatcggcgccaagtgaaagaacgggggcggtcgaaaagtctaggctgcggccagcaggcgaagtcggagtctcgtcagaagactcgtcgtcgctgaagacgcgagcgacatcgacaagtccttttttcttggaaatccttttgaccgaacctcccttcgccgccatgcctgccgaaaacgcaattagcgccttcgccccatccaactcttttcagcgaaggggggagctgttcgactccaccccggtctcattgtgacccgggcttggagtaggagtatagccaggggtgtcgacgcggttttcgaccgcctcatccacggccttttggacctcaacctcctcctcttcctccccttcctcttggacgtcgtcctcgtcgtcggcgtcggaatcggacgaaacaggaacccttcgtttcctgggcgcaagctttacttgtccgcgcgttcgctttcacgaaggtcctgcatcgtcgttggccttgtgggggttcgcccgaggaggcagttcgccgtcgtaaacccggttcgctcggccagccgcttgtcgcgttagcagctggctatactcgacgaccgacacgtcgccgatcatcctacaggcttcggcgtcagcctggtcaagggtcaacactataaaaataaagggagtagccacattaagcgtcgaacaaagcaaaataacaaagcacagaagtgcattgcgaaagggcagtcttaccgttcgtcccttcagggagaaccaacttcggcaacccatcaacctcttcgccttgctcaactgcgatttgctacgactgggagaggggaaagatgcgaagcatgcagaattcctccaccaagtcgcggcagctaaggcgggagcagaccttacgcagtagagtgaaccgcgcctccatagcgccgtccacggcgatcttgggctttcggtttggcgcaatcgccctacgccagctccgaagggcttttgcggagtcagaactagcctcgaaggggatggtgtggtaaaaccacctcaacatccaatggcgatcccacttcgacatagcggcgttcaccggccagagatcggaccactcggggtgaacattaaagtttacgctcccgaacactgtcttcatcgttccagcttcggtaatcaccgtcttcgaattcacggtggcgaagaatatggcgccgaagagttcggcacttggctcaaacccggaagtccggcacgcccagtcgaagatagcgtccggaccagcgccgacgggctcaactgcgggagctcaacctggaaaaggcgaagaatctccggcaacaacgtgttgcacggaaaccagagccccgcctcaaaaaatacggcgaacaccactgtccggttgtcgatgggtttcggtacaacggctttccccgaggcgaaagcctgtccctcgactaaagccccagagctgaccaactttgcctgctcgccatcgtctatgagagaaatccctaaacaggcggtggtgtcgttgtcaatccggccggggtcgggccctttcgccgaagaggggttaggcttgcggggagccatgacgaaggatgtatgaagtggcgaaaggtgtgtgcagtggcgaacaaggggagtgagcgagaagtctaaggggccaaggggtgccgtgagagtaagaacggaggaagagagcgcgagcggtgaaagtggcaagtctggcagtgaaaaggtaacggggaagcatatatagcccaacaaggcgacgtttcgcctacccaccagtaataaagcgccacgtgtcgcgagggtaggcaaaacggtaaattcccatcgaccgagctgcacagtaaaaagcccacaaagggaagacccatcactgttcctttcggcccgataaaaaatatatatcacagacaacgaactttatttgcaggaacaatgtaggtttcggcaggagcatcggtcgaaggggggcgccacatatcataccacataccacatggtttgaatggtctcggccgaagctccaatctcacccttgcccgtgagaggcttgttggcggtatggcatgaggcccttcgaccaaaatctgccgaaggctatgtgaggagtggggagccaagcccgagacgtcaaaattagtcggggagaagccccccccatggcgaagactatggaacaaggacggcgcgagaggcgaaggatcgtgcgggtactctgctaagccggaggcctcttgggcaaaggatgcagggcgaagagtacatgccgaagggagacgacttcgccaaagcaagcgcgcccccgcgagggccagagaagccttttccggcccatcaagcctagaggccattgggccggcgatcgcctaacggcccatcaggagtccataaacctctattacactatatacccatgtaaatgtccctttcataagggtaaccatgtaaattcccctgtataaccaaaaccctagtagtaagaacctataataggggctataaatagtccttatagggccatgtaatggggggatcccaagtaaaaattctcaaattaatacactttacttctgtttcaaccactgttgagtaaccacgtctttcgacgtatgcggttgtcgttttaacaaaactttgatatgacatcactcgcggtggatgaagtggcagaggtcccgctgcacatttgtaatgcatgtatcgtcaaagcttgttcgatgttctattctaggcaactgcatgcatgaaagataatatattagtatctgaacgcgctgatgaagcctagagggggggtgaataggttgtccctgaaaacttaaaaacaaatcgcagcggtaaaattgaaatagactcgaaacttcctggtaaggaactccggaacttccggcctcccaggcccggaacttccggtgttctaagacaggaacttccgggtaacagaacagagatgaaattcaaatttcgaaacaagagactaagccaaacttcacaagatggtgcacaggtattctaagcagaggatatatcacagaatcatccacagaaacatcacagaaagagacaagagcgattttttcccgaagttcggatcttgcaatcctactctccgttgaggagctccaaagagctgggtctcaattaaccccttgcctcacttgtgcaaaaatcccagaggaaatccgcagccttcaaccccaaacacccctaggcaaatttctagaattgagtgaccaccaagatccaactcaacctactaatagaaatccaccacaagtgtgggttgctctacttggaagacctctagaatctcagcacaagaacttcactaacttacctcgttccctttcggaggaaaggaaatccttcacaaacttacccgggacatccacaatatgcaacggattctcgcgggtgatacctaaccgtctaggagataataagcaccgagatgacagcccacgagatattcaagtgctcacacaagttcctagtcttcacaccactccaaatcttcttctctccctctcaatctctctatctcacaagaattaggctctagattgagtggagaaggcaagaaacacttgggagaggctagcaacagctctaggttcgaaaagtgaaagtggaatggccaaagaacgagctggaaacgagctgtatatgtataatgactaggtgacgtcatctagccgttactcacaattttgaactggaaactagacaggaagttccggacctggaagccaggaacttccggataacactttggaaaaattctttcatcagaccggaacttccggacctagaagacaggaagttccggacctgcacttttggacagatgcagtataagcagaaatgactcctagggaatcttgacacttggttcacactaagagcacttgacatatctcagagcatcacctggaacccctcttaatagtacggtttttcctaaaaactcgatttcaaaagataaactatcctatgcacttctcgagttccagtccgctttgattttgtacttttggggggtctccaagcatccatcttccacacctttggactaatgcacttgaaagtcactcaatgaactcattagtcccttacccacatttgtcattaatcaccaaaacccactagggggattaatgcactttcagtatcatctagctgtgcagttcttcaatgcacttatacgttgactcgagagacttacatcctctacgttaaccttgtacctcccattaaccgtgaggaattcgcatgcgtaacacccgtataggatagtgcctctaggttgcttgtgacacttaatgacaaatcataggagaaaagagttaaattttgtaattagtaaaacaattggaatacattaagtgtgtggagtattaccgccaatatgtatgtactagcagcttctgctttgtttgaatttgatcaacacccttcttcttgtagcagttgtacgcactgtatggattttttactatttcgtattaaggaggagatttcattataatacattaatagtagacatgcaagagtatcagtatcacttactattgtaagattgttagaaattgtttgttcgtcttgtgatgataatcaagggggtccaagatgtcacggtgccgtacttcggttagataatgaaacatatgtaatgatcgctacatgataacaacggtgcagttagtcacggatgaaataacatagatatttacaaaaaaaaatctactggacttacttaaagttgtacgtggctaggatgactcttttattttgaaagtgtaagaagtctcgtccaatgtactatgcgacagtaatcagcttctgcttgtacaagccattcttatattccgctatctctttaggcgtcttgtccttgagctgcttggaatttggtgatagcgtcatggtatgctgtttttgacagatccttgttggatccagatatccgatagattgctttgccttcgcagcatccatatattgtatcctataaaagcagcttgttaataataataacatgtttatgtattatatcaattttttgtatgataaatgtgcactcatactcataggcaccatgcaccgagaaagtttacatccatcttttcccgacgattgatggcatgcagatcagcgaaatttagccagaagaaacctttgctggcgacagcatcaggtggtgatcgaattgttaaattagttaggccttcaatgctggtgtcgatgtaccatttatgtaaccatgtcatctcccatggaccctcatcaattgcataatccggccttttctttccttggcacgttttttactcccactgaagtcggttaccctccacttctccttttgatcatccttagacttggagttgaggcttttgagcactctaggcacttcagacttctcggtcggtttccttgttatcaaccggggtttggtccatgacatcttttgcaagatttgggtcctcatagacgtctggttctgcatcgtcccattccaaacccgatacgacttcgatgtctactccaactgatgacagaaattgcacatcttcttgtggcacatcccggttcttgcaccactggttcatttttcggtgcaatttgcacctccttttatttttctgggccttcagtggccctaggtggctaatgttcttccaccttatcattaaaccgtttcttcataggaggtcttgttggtttccgtggagcatcggtgcccgtgcccaagattatatcctttttgtgccatagaatatgataa

SEQ ID NO: 15808 - DNA, 728 bp, Oryza sativa
  unsure (1)..(728): unsure at all n locations
accccttgcgattgcactttcgcatatcaagaatcaataaatctgtcatggtacgttctaccagggatagcaatttcggtcgtagcctcaagtctcttaccagctcgtccactcggtacatgcaacgtacagggtgtagtctcctccaagtcatcaaagggataatttggttccggttgttgggtctcttcttctgtcttaggcagtagaaaatgtcttatgcaaaaccccatcatttgtttttcaaatttcttacccccttcgtccctcaagctttccttataggcgtcacgtctcttatacgaggaggcgtcctgtttgaacccttctttccaactcagcttagaggacactcctcgaacccgacccccgtgctcccgatttcccaacgcctggctaagcacatctttctccctctgtgggataaattctcctttcttttccttgctagataaatcttctatcttgtcggcaactccctgcagctcggggtcttcaaataacactttcccttccgatgtgatcttcggggtcctttcttttacccaatgcttggattgtatgttccattcttccattggcacaattcgatcaccacctgatgctgtcgccagcaaaggtttcttctggctaaatttcgctgatctgcatgccatcaatnnnnnnnnnnnnnnnnnnnnnnnnnnnnnnnnnnnnnnnnnnnnnngcagtatctcaattnnaacact

SEQ ID NO: 15809 - DNA, 1093 bp, Oryza sativa
  unsure (1)..(1093): unsure at all n locations
gttcggaaagcataatttggggacaaacanaccgggtggcatgtggtatttagcgtattgaacaaaattatatctttaaaaaatactattgggttcatctgttgtttgtcaagctaactgtttttttttctaatggatatatcacttacatgtcacaatttttgttaaggtgaaataaacagtgttctaactattttcaataagaaattaatatactttagtgcaaatcttagtaatacataaacacaccaaattataagctaggaagatgcaacatctggattaataaaataaaatcgaaaagttacactaaattatacaagagttgtgatctttcggattaagggtttaataagctatttaatgtgctacgttttagtcgatggcaattaagaagaaaatatcagatgactgtaaagctaaacaccatttgaccatccaagtacattaagaattgaaaagttttcctacatttaatgtgagaattccaacctaattttgctatatgtcagatgagactaaagtggaaattgtaagagaaagaacataaataattaaatactatttacgaaagtttgtaactaggacatagtactacttattatgaaaaagtttatagctatgacatactacttattatggaaaagtttataactatgacatacttatatttctcatatatattgttgctaacacatggtgcctgcactgcatgtgtatagttcgtggccggcaacgatttcgcacaggttgagttcaaccgtcttcctttgggccgtctcggtaaacctgaggacatctcgtcgttggtggcgttcctgtgcatgcctgcggcctcctacatcactggccagattatatgcgtcgatgggggccgtatgctttcttaataaactctacatatacaaaataaagatatatcatgtatcataatatattctactgaattgggagacactcacgtacaaagcacactcatattcgctttcactttttgagggatcatgttgagaagnnnnnnnnnnnnnnnnnnnnnnnnnnnnnnnnnnnnnnnnnnnnnggnnncgtcgaggggttcttaantcaagggcgc

SEQ ID NO: 15810 - DNA, 6581 bp, Oryza sativa
  unsure (1)..(6581): unsure at all n locations
aaagcagtcctatatgcccaaaggtgcatcagatagcttgtttttccatgccttccccatctcattgacagtcttctgtagaatattcttgatttgtttgttactcgtttctgcctgtccacttgtctggggatgatatggagtggcaatattgtgctgagcccaaagttcttgcaataagttttggaaggtcttatcgatgaaatgagaccctccgtcacttatcaccatatacggagttccaaaacgagggaaaatagtctcgtggaacatccggcgagcgtgcttagcgtctgcggtcctgcatggcattgcctctacccacttggacacatcatcaacggccactaggatatactcgcagtcataggactttgggaaaggtcccatgaagtcgatgccccatacatcaaatagctagacttgaaggttaaaattcagaataaagataagtaatattgaaaaaatagtccatgtataacataatacgagattaattagaactcaaaataaaaataaaataaattttgaaaatagaaaaagaaaaataaacacaattttgaagtaactaaaattcttactactccctccgtttcatattataagactttctagcattgcccacattcacgtgtgtgtttagattcattaacatctatatgaatgtgggcaatgctagaaagtcttataatatgaaactgaggaagtacttttttttttattccaccttcagccgaccgctcctctccttgacccacaaacccaaacattgccgaccctctagatatgtctccacatgcgtttcgtcttcttatgaactgcaaaaataggtttcatctttgatgggcatcaatgcccaccgaattccccttcaattggtgcattaattgtctcaatctgcctaatcttttaactctggccaaactgccaccattgatgaccagccgagctccccctagaagttccccttccttctctgacctataaaggggcggtaacatcctccctaccctcccctttgccttttccgggctctcatgccccgcattcactctcattctctccaacggacacctctccccgtcaactagagcagcgtagcacctcaccactgtctccattagcatcgctccaacctcctctaccggggccacacctttgttccggctggcagaagcaagacctcgttggcgaccagtggtaacgtcgtcatcttgctccttcagcagctggcctcgcctcatcggagtgccataccgctatgtcgttgtcactgtcggcctcacctcatcatctttcccccagctacccctatgcttcaacccaagaccccaggaatgttgtccctaggatcgacaaaaagaacgccttcgtcttctccatctatcgttggttcctgctgttgaccgaggatgtaaaagccaccatcaccatatcaaactctgtcgtacgtcggctgcaaggatcctgaatatcgaacaacccgttgctgaactgttgcctctgccaaagcaacaacggcgcgctgcactgttcccttcgagcggaatcatcgactcgactagcacgaagaactccccatcctgatgcggcaccccaccgccgttgtccatcatcaatggcatggtgttggattcggagtcaagagggcttgccggcaacccccgcttgggcaagcttctatctcaagttcttcatgtcggacttgtggctatagattttcttttttctgtcacttacatgtgcgccccacatctattttttaatttttaaatgcttaggctgccaggtcagccaaaaccacctcgcaaaccaatgagctcggtaaaatgcttagtattaattaatagttgagtgagtcaatgtactcgatttttactattaagatacttgagggagtcaagatggagtttttccttccgaagcacttgctccctgcagctgggcctggtcgcttctttacagcagactgggctctctctggcccaatcatgtctgcccgagctgctaggcctattaattggacattttagaccaacacaatattgtttagatagtaacatttctagcgcacactaaaatatactatttttcacgcaatgttttatgaatatacctaaataaattataaaaatacaacatactcaatctaaagctcaacatgcaagtagaaataattacttatgcaagaattaaatattatctataatttattgaattatacaaatcaacatgtaaacatatccaatcatctcctctcacattatttaaacatatctatctattatttttataatacttagcatatatctatccatatattccgtgttagtggaatattgtttagtttgtttcatgaaaaaccctacttttcatttgtttcccatctttcacttcttgcgaagcaaatcttggtcaacaatataatatttaatctgcaatcttctaaagagtctattaaattcatctttcaacaaaaatgttttgacaaacagtttcatttgatgctaatatcatgtttattccttacttgattgttgaaaaaacatattaaagattatttagtaattttcacatattaaagattatttttgtacatcctgctgccaggcaaatcaggtaatttctgtatatattttttttcaaattttgtatatttatgcaaattcacaacaaatatattttcatttttttctggtatagcagaatgtaatatatcagtttggctatttccaccgggggcaaccgatgtgaccgaaataatcttggatattttggaatataacggtccaaaataatttagaatttgcacaaaattaggtcatatttgaactaattttgcgaaattcgaaagaaaaacaggcgaaacagcttcctattttgatgcggtctgaaattttggaaattctattcggcaatttttgaacctggttattagtagtagatgaaaactagatattacaacatttaatgatcttctcaataccatccgcatttaaagaggctacaagtattagtcgaagacatgactacgttatatctgtgcagataatcaacattttccaaaagataatatcgaatctactaagttacgtagaccggtgtctgatgatcctcctttactaacacatttttcagcttctatcctcagatttctcattctctgtttcacattttgaccttcctccccattcactaatttctcaacagcagtttgaacttttgccctctgcagaacactccctacctccatctccacacccaacctccaaacagcacaaacatacctcgcatttcccatctgatctccaaaacatggcctacatatcatcggcacgccttcagatatactctctatcgtcgagttccatccattatgcgtcatgaatgcgcggacagaagggtgacctagtaccttttcttgcggtgcccaagagactatcctgcctcgaccattgatctcttcctgcaaatcactagggagctcactggaatgcagccgtaacccacggacaaggcttggccgaaccacccatagaaatggtagcttggtgccagccaagccccatgccacctccagaaactcctgagcatcaatggtggccatggtgccgaagctcacgaacaacacagagctaggggcttgtgtgtcaagccacctcaggcaatcacaatctgggggaagaaagctgcttcttccgacgagtggtatgagtttgttgagtggaccaatggcaaacacagggatggagagctcgtcgcggatcctgcaaatgttgtcaccctcgatgaagtcgaaggtgttgagtatgagccctgatgacagccgcgctgcggcgactacattggcaagcacgttggcgaagctgtagaggtttgtcgtgtcaatgcgctgtagatccttcactcggaaaggggggagaatgtcgactagagtgtccttttgggcatctaaaataaggagaaatggatgaacagatagatggagtagaaccatttatatgaaggggttatatttagtatcagtaaagattttgcacataagggaaaataactctgtttgaattttgattgaaatgattgaatcagtgaaacaaccaatacgaaaaaacatattaggataagttctataagtaatttagaagataaatacatatttgtagttaattattttaaatatacatcatgtccaataaaagtagttctgtaccagttgtcagattttgatagaaaaacagagtataattataataatctactttcagaatcaacctattcggttttgcttttgattctcgggcaaaatccacatcaaacgaaaagcaaacggggctaacactgtccatatctcaaggaagattaaaactagaactgcagagacggttgaatctgttcattcttacagaagacccaccgatcccagaatcatgcaagccacttgctagctaataaggcttgctttgagtctgttttcgatttttggctcggtgattctcgtaattttatttctcagactgtctgtgctgacgccttagntgagtaatagatcattactttttccccggaaaaaaaaactgttctttcttttctgctggattgccaagtcttgactgttagggtgtgtttggataatgagaaatgggagtgggattgggattgggaaatgaatgaaagattatgattaaatgaaagagggagaataaatggttaggatttaaagatgtcttttaatagatgggaaatcatttccctatatcattagccaaacaggaccttaaatctatatactctctatatctcgttatctagaaaatctacctaatatgttgaaaatatttctaataacttgatgatcttcataatttccgcaaaataagtagggagaaaaacacagagctccaagcgatggacacatggagtaaactcaccgtcgacaggcaagaagcccctctcaagcagaagagggtactccatgaacgtccggaagctcgacgcgctgctcgtcatcagcagcatcagcggcacgccgagctctggcgccgccgccgccggcgcgtaccacatcacgtcggcgattacgcacaggacgccgccctcctcggcgagcagcgcggccagccggtccgcgaacggcgcggcgcaggtctcgttgagcgaagtcaggaccgccgcggcgtcctcggacaccacgagctcgggcggggtgccgtcggccacggccacgaagcggtactccggcggatgcgccgccgggtccggcgctctgagctcggtgtggaggacggtgatggagaagccacgggagcggagcacggcggcgaggtggaacatggggatggtgtggcccgggtgcggcatcgggaaaaggatcacgcgcccgcgcgggggcgccatcttcgcctgtttcatttagtgagataaatatatatatatatatatatatatatatatatatatgcagaaattttgagggaatcagcggcggtcaagaaataactcagttctaaaaaatacctgacaacacgaagtccaatttatgcgtttttgttatttatttatcggaggggactaccgatcgggcatgacgtcagcgccacacatgcgtacaaaactactttaaactattttttttcttaaattatttattcaaatcatgatccgattgcaccattaaattcgttgcaattaaatcttcaaaacaaaaccacacatggatatattccgacgaaattttctttagcttattattgaattatttttaaaagttacacgatgttccaccatatatatcggaattgtttcactaagtatatcgaaaatgtttcaatcgtttaaatcgggcattgttttaccttatataaaaataatgtttcagcaaatagcgaaagaatgtttcagtccactgcaatattagatctatacatagtgaaatattctgagtacactgggtgaaacatttttggtggaactatcgtttaaatcgggcattgttttaccttatataaaaataatgtttcagcaaatagcgaaagaatgtttcagtccactgcaatattagatctatacatagtgaaatattctgagtacactgggtgaaacatttttggtggaacaaaaaataaaacgaattctcttaatagagggtttccaaaatatgtgggtgatttgttgtaaaagaatgtttcgttcactgcaacattagatctatacatagtgaaacattgtgagtacactaggtgaaacatatttggtggaacaaaaaatgaaacgaatttcattaatagagggtttccaaaatatgtgggtgatttgttgcaaaagaatatttcaatatactacaacattatatatatacatagtgaaacattgtgaatacctttggtgaaacatgtttgataggggcacgtggcaggtggaggcaagataaatggtggggcccactggcatgcgtgtcgcatgggggaagagtgcccgatttcgctcccccacgccggtcgtccgaggcgaagaattttcgttatctcaggtaataccggtgtgggattcctagctcagacaggaagttagctaattagtttggg

SEQ ID NO: 15811 - DNA, 1333 bp, Oryza sativa
  unsure (1)..(1333): unsure at all n locations
ctttgccgtcccaagggcaagctcggccaccgctcatcctccgtgaatcatcgccgaaaccccatccctatcactcaaggtgagctccacctagtactgtcgctaccggccattgttttagctgcaccgctccggtcctcccctccttaatccctcattccccttccgcaggtcgcggccaccctcgtccgtttcttcctaagcgccgcccgtcgccgaagcaacgccacctcccttcgccagagctccgccggcgcccctcggtgaggaacccctccatctcctctccctttcccctttttccgccgcctcccgcgtgtgtcaccacgccagtggtcatcgccggcgaccatcaagccgtgcatcgtcgctccccggccggccagccggtgagccggctcctgctcgcccgtggccgcccgatccccctacaggggcgatttgggccgtccacgtggccctccccgtgccgcctggtgtcgctgccctgtggtgccacatcggcgccacctcgtcctccccgtccgccgtggccacctcgtggctgccatgtggtgcgcccgcgggcagtgcgcacgtagaccgagtccaccgtgtgccgaccttctttgagccaccgacaggtggggcccgcttgtcggcgccacctattccccttggtgacgtcataaaccattattaattgcgcaataaatcattaataattctagaaatccattaaaatggttcaaaacttctaaaattcatatctaattcatccgaactccgaattgagccattcaacttgcaaaactcatctaaaattgagctctacatgtttgtttacttttatgtactatttccttggtatttattagagattttccttgttttgcgtgccagcgtgtagtatccgtcgtttcgaaagtccgcggtcgcgaagaaaagagttcggaagattgtttgaaagaacaaggcaagtcacacattccccttgtgcatgttgatcccaatttataaatgttttatcgtttgcaaataaatatgcatgttttgctaattacatgggaatagggtttacctatctgctcgcttgtgccatgtttacttgatatctgttctttgcaaccctggatgataaatcgactagctcatgttacttatgtgacatagctagaactatatgctnagcccatgctaattacactagctcagtnatgggataatgcagtttagacctttagatctgatgagctgctgctcagacatccggcatgttattgccatatttatcactaaatgcgactattgtgggctggggtgcatgttttgctgccacacaatgcatgaagac

SEQ ID NO: 15812 - DNA, 1411 bp, Oryza sativa
ttggttcgggtgttggtctcttcttctgtcttagcaagtaaaaaatgtcttatgcaaaaccccatcatttgttttcaaatttcttaacccccttcgtcctcaagcttttcctaataggcgtcacgtctcttatacgagaaggcgtcttgtttgaaccctcttttccaactcagcttaaaggacactcctcgaacccgacccccgtgctcccgatttcccaacgcctggctaagcacatctttctccctctgtgggataaattctcctttcttttccttgctagataaatcttctatcttgtcggcaactccctgcagctcggggtcttcaaataacactttcccttccgatgtgatcttcggggtcctttcttttacccaatgcttggattgtatgttccattcttccattggcaccggaacccccgccttcttcatttcctcatcctctttattccacagtgcaatcttacgtgcgtacccaccggagcccagtcgatggtgccatttttttcgcttggccaagtcagacaaccttttactcttggccatttcttccggcgaggtcttgaactttacaaatttgtcccattggttcagcgttattttcccatatttcttaaatggtgccttccccttctgcacgaattgtgtgttcagagtgtttttctatccgcgccacgccttgtccattgtttgcaatgcgcaattccttgtcattgcttctgatccctcagggaactagaaccttttcttcatctcatcccaaagagttttcttgtcccctgctgacacactatatatcccagtccttgatcatgactgcgatcttatcgcttactattgcgctacactgaaagctgaactttgcgcgtgcagtggagggcgcgagcggctcaccatttggacttatgtgggtgacaacgtacaacccatcgtctattctattcacgctcctcttgccctttctctttttggtaagctctttggactttgctttcttcttggagttggaggtcgtagttgggacttcatcgagttgggcggcttttttcggatgccatctagatctttgtggccccatttcctacgatattaattaaaaaatggttgagttagtacgaactactatttatcactcgtacagttgcaactcaaatgacattatagaaacctaccactttcttgcgaaggacgtagtcttcgtcgtcttcttcaccatcatctttcgtccgccatttcgggcttggaccaatatgaatctccctcgtcagcttcatcactgtcggacccatcggctggcggcacggtaggttgcgaagcaaccacaattgcttgtgacggctccacgataggctatgacggctccacggtaggttgagaaggctcgactatcagctgtgagtacttca

SEQ ID NO: 15813 - DNA, 1795 bp, Oryza sativa
  unsure (1)..(1795): unsure at all n locations
cgcgctcatgatgatacaacnnnnnnnnnnnnnnnnnnnnnnnnnnnnnnnnnnnnnnnnnnnnnnnnnnnnnnnnnnnnnncgagaaaaattgtcaacaataaccaacacataccactttcctccaacagattgcactctagctggaccaacagtgtccatatgtaatagctgtcccggtgcatccgtcaacacagaaacaataggagcatgtgaagtagaaaccatcttagcatgacgacacggtgtacaaaccaaatcaagatctttcttaagtttaggcaaaccacgaacaagatccaaaccacttaacctagtgagatgatcaaaaccaacatgtgcaagtctacgatgccaaaacatcacatctttatcaaacttagcaaccaaacatgttatcacaggtgaaacaggattttcaaaatcagctttaaacactcttctataacgagaaatattcagcacaaaatcaccacgagaatcaaaaactttactttcagttttcttaaagtgaacttcaaactcttcattaacaatttgtaaaaccgaaagcaaattgtacttcaagtcctcaaccaaaggtacattcttcaattcaaatttttcatttaccttaaccatacctgtagcgagaacatcacttgtagcagcatcaccaaagataattgattcagtcttagatgccttctttagggagaagaaccaatttttatcaccggtcatgtgccgcgaataaccggaatccacgatccacacgttctccttccttggcaccaaagcctacacataagcagaagtcgaagccttagtactggggttacatgataataaaaatataggaatccagtactgagacacatgaccagaagatcaaataggcatatatctacatgcaaaatcaattttagaattttcagaaaaattcctccaaggccggtctgaccgagggtgtgtagttggtctgaccgaggcttcaccgccggtctgaccggtggtcggtttgaccgaggctgttcagcccgtctgaccggtcgccggtctgaccgcgggacccactacggtctgaccggtttcctcgagggaaaactcgatttttgccactttgattttgcaaaagcaatctctctctcctttttctttttatgagctaatctaaacaaaaatcaacaatatgtccatcttttccacaaaaagaacaagtatatttttcacgatgattagacatattggtagcactagaagatttagcaacacaagcaacaacaggagattttgcatgcataacattggattttgaaaaagatgcactcatagtagacatgataccagcagatttaaacacagttttgttagtatcaggtttaaccaaaatctcaccacttctagcaccaacacctaacacaacaggaggatgtctagaattatgatcataaggattaaaacctaaaccacggttatgtgtgctaacctttgattgatctaaaatcatgttgaggttctttttaccatcagaaaatcttagcaaagaatttttcaaatgagaaacctctttttccaaattagcacaattttcacaatctaccatgacacctttgcttttacgacatttggggcaagaaagcagttcattgtttttcacaacatcttccatgtactcaacacgacctaaagcatcttttagtttcatcttattcaaattacatggtgagcaatccaaaacatcatgaggttgttttaactttttagcagaaatcatgttaaacataaactagcatgaaaggcatttgatattttg

SEQ ID NO: 15814 - DNA, 2614 bp, Oryza sativa
  unsure (1)..(2614): unsure at all n locations
cattattcatagctcgagcanttcntgttagcaaccnaaacccaaatcctccctcctcgatttgttcaagttgatcatcggatgtggcattaaaaacagcaagaaaagatgacttagatgaagaagcatcaacatctgttaacaaccagatttggtaacatcagcatcaggaaagaagattagatcgaagcaaagttggaggcggagatcgagttcggaaatagagcaggaatcggctggagtccggatcggctacgattaggatcagctgggtctgagtcggactaggaaagtcgatacagccgattccgataatacaacttgacgtgtgatgtcgggttggattgaggtgcttcaaggagattgccgcacatggatagagtcctgaggaggcaattgtatctattaattaggatgctttatgtaatttctttagagatacgattgggcaaaagtctgccgcaaagacttatagtatcttagagtttgttagagatggtaatcgtgtccattatggacatatcttgtaattctcgggtataaatagaaccgagccctatgtaacttaaaaacacacgttcaatataattccggcgcatcaccacccttttttactttagttttgtttcgacgagttcttgcttttgggttgagctgcatcggtttcgatcttcaacaagaggtaaaacttgttatgacggcttgcgttcttgagattagcgcttccatctctatgatattctaatcttgtttatgtgatttgtcgagttatcatatatcttacataatctctggcaatatcgctatctaacctacaatcggctaacatctatcgaggaaggcagccgattaggttagattctgacgttgactcagattatataagatatctaccactctatgaaacttccagcggcttgattgtctagatattgttcttcttttcatacttaatgctgcatcagttgagtttgatctattaagtcatgattagaatatcaatctctagcctgtcttctggttgtcgattagggtagcatcggagtgtcagccgatcttatctgatttaattatatttgctctatatgcttcattgacatgttaaatctgccctttatgtcaagatattatttttttaagtatattaggcttctgtttgatatattttacctgttttaatatcctaatatagagtagtatcggagtattagccgatacatgctcgatctatctgatggggctatgctataaacatatatagtcctgttattaatatatattttgatctaagtgatttatacagtctcggcatggcgaccgatctatcccaatcacttgatttaagtatatatcgatataagaataatatattgaaaatatctacagccgatcgaatagatttagtcctttattgtttatttgcaactgccgatagattcacatatgacatcggctcaaagataaatgatatgtcatcggcacctagccgatcggctatcatttatagatttaaccactgtttctttgcttctatttcttgttgattacaggatcaaatcaactggcacgctagcgcacccgaaggcgagctttggacctgcactagagttaagcagatctcccaggcctcgtgttttatgtcaacacgcttttggcacgttcggtgggtccactaagaagtcagccaacaatccttcctcatggccaaaaaacaaccaccaccactatctagcaaaggctgtgttaaggaaaagatgctgaagttgggattgactgacgtcaatgaaggaaacgtcgtgccggtcgatccagaaaaattcacacctgagcagaagaaagagtttgaagcaatgttgtagcaagcacgggatcagttcgtgaactcattcatgtagacccgcaaggggacacttgttcagaagtacaaaataaaagtcgttgctgatgatcctgggactagttcttctaaggatggagatgggaaacaagctctagacggctcggctcagccgagtatcaagggtgctaccgacggctctctaggaaatcaaggtgacaattctcaaggagtacatggagtacaaggtgacggggtgcatggagttcaaggtgacggtgctcaggggatgcagggaggaaattttaatagtgaagtggcacaggactttttcaataacttccaagatcgggttgattacgctgtgcatcatgctttgatcaatcagtctggggtgttagtcaataccctatcaaacatgatgaagtcgatagctgatggttcaatagctgaacatcaggctgcaggcccggtttatttgcaaggaggtgtcttcccaaattatcagtctttgatcaccgatgttcagccatctattcaggcgattccctccgttgcacccacaactcagccggcggcgccggcatcaattcccctatctgctacatcagctatggcgccaggccagctagtgaaccctcggttgttaatgagggaacagccatagcatggcgggcaggctgccaatcggctgacccaagatcaggttgctgccatgttnnnnnnnnnnnnnnnnnnnnnnnnnnnnnnnnnnnnnnnnnnnnngacataccccct

SEQ ID NO: 15815 - DNA, 2133 bp, Oryza sativa
gatttagcaccaggggtcaataagtgcatcggccgggtttgcaacgcctggtggtcagcctgtacaacaatttgtaaaccaagttgtcccagaacatttgtttcaccacgtacagccggacggcacagtaatgcctcaggttgttcctgagcacttggtgcgcaatatccagccgaaccttcataattaccaagggggtaacttgagttatcaatatcagcctccttccccgcaagcccagtatcagccagggggattggctgaacctcggtttgcatctcaatatggttagttcgagcccatgcagcaacagccacaaggagcagctcagcaacgaccgtgggctgatgtgattgctgatgtgatgagggaacagtttgggcttaaaccaaaagagactggaagcttgtatcggcagccttaccctgagtggtttgagacagttcctcttcccaatcagttcaaagttccggacttctccaaattttcaagacaagatgatgtgtcgacttatgagcacattagccgattcctggctcagtgtggtgaagcatcggctatagacgctctgaaagttaggttattctggttatctctgtctggatcggcttttacttggttttcctctttgccatatggttcgatcaatagttgggccgatttggagaagcaattccacagctatttctatagtggggttcatgagatgaaatgatctgacttgacggcgattaagcagcgcatgatgaacctgtgcacgagtatattcagagattcagggagatgaggaacaaatgcttcagcttgagtttaactgatgcccagttagccgatctggcctttcagggtatgattgctctgattagggagaagttctcatctgaagactttgatagcttgtcacatctgatacagaaagtaaccctgcatgagcataggtctgcggaagttaggaagaactctaagagagttaatcatgtttgtccatacatgtataggtaggatgataatgaggatgattctgaaatagctgcggccgaatgggtaaggagtaaaaaggtcataccatgccaatgggtgaaaagttctggaaaagaagagaaatacgattttgatattactaaagctgacaagatctttgatctgctactccgagagaagcaaattcaacttcctgctggaaatacaatcccatcggccgaggagttaggcaaaaagaggtattgcaaatggcataattttgggtctcattctactaacgattgcaaggtttttagacatcagatccaggtggccattgaggggggcaagattaagtttgatgattccaaaaaaccgatgaaggtcgatggtaatccttttcctgttaatatggtgcatacagctggccagacagccgataggacccgcgcaaggggttttcaagtgaattcggctaagattatcaacaaatatcagaggaaatatgacaagcagcaagagaagcattatgaagaatacgatgatggttttgatcctcattggggttgtgaattttttagattctgctggaatgaaggcatgaggttgccatctattgaaaactgccctgggtgcagtgatattgtcgagagctcaagccgatcatataataggggtaatcggctaaggcagacaagggtttttgttcatcaaagattaggtcctgtgaatcaagaacatggccaagaagacggtgtggttaggaagaatcaatggtgtccttctggtattttcacgaagaatcagaagagaagggttcaaagattgaggaacagagaacgccttcaggaggttgaacaagaaattaatcatcggctgaggaaagcaaaaccgaggcaggagtggcgtgttaagaatcaggttcctctagccgatgatgttgcagccgatgaggcaaaaaggttggcaaaagggaagagtgttgtgacggcacccattaacatggtctttaccttgccagccgaattcgggatcgatcaagtcgatgtcgacgaggtggaagaggaatcggctaagttggttctttcaccggaaccagcaattgttcgagaaaccctgaggggacagataattcgcatctttaaccattggttataaaccgctatgtcaatg

SEQ ID NO: 15816 - DNA, 1006 bp, Oryza sativa
  unsure (1)..(1006): unsure at all n locations
ccgctcccccttagaatctacgtctnnnnnnnnnnnnnnnnnnnnnnnnnnnnnnnnnnnnnnnnnnnnnnnnnnnnnnaagggttcttacaccttgttgcttggaagagattggattcacgccaattgttgcattccttcgacaatgcatcaatgtttgattcaatggcaaggcgacaagatagagatcgtgccagccgacaggtcagttaatgttgccagtgctaatttagccctttgggatatggatggccttgattgtttatctggaaaagtctgggatggagattttctaaaagtatccgattctgatatacagccaattaaagatggagaacccaagctattattttgagggtgtcgtggagggtttagatgtctacactaagcatacagtagatgatctcgatgacaagcaaggtcaaggtttcatgtcagccgatgatttggaagaaatagacataggtccaggcgatcggccaaggccgacatttattagtaaaaacttatctctggagtttagaaccaagctgatagagctcttaaaagagtttagagattgcttcgctctggagtattatgagatgcctggactcagccgatcaattgttgaacatcggctacctatcaaaccaggggttaggccacgccagcaacctccgaggagatgtaaagccgatatgcttgaacctgcaaagctgagattaaacgattgtatgatgctggttttattcgtccttgctgatacgctgaatgggtttctagtatagttccagttattaagaagaatggcaaggtcagggtttgcattgattttcgagatctgaataaggccactccgaaagatgagtacccaatgccagtagccgatcaattagttgatgctgcttcgggacataagattttgagttttatggatggaaacgnnnnnnnnnnnnnnnnnnnnnnnnnnnnnnnnnnnnnnnnnnnnnnnnnnnnnggccaaaggggtaatcagtccgcgccc

SEQ ID NO: 15817 - DNA, 1134 bp, Oryza sativa
  unsure (1)..(1134): unsure at all n locations
ttaaggtctacatcgatgatgtgatggttaagtctaaagaaataagggcccccatagccgatttaggaaaggttttttaaaagaacaagaaaatatggcctaaagatgaatctgacgaaatgtgctttgggtgtatcggctggcccagtttttggnatttcttgttcttgaaagggggattgaggtaactcaaaggagtgttaatgcgatcaagaagattcagcctccggagaataagacagaattataggagatgatcggcaaggtaaattttgttaggaggtttatttctaatttgtttggaaggttagaaccttttacaccattgttgagattgaaagccgatcagcaatttactttgggggcagagcagcaaaaggctttggatgatattaaggatatcttagctctactcctggtttgattcctccacagaaaggaataccgtttaggttatatttatcggccggtgagaagtcaatcgtctcagtcttcattccggagttggaagggaaggaacgagtcgtattttatcttagtcgtcggctcttggatgctaaaactcggtactcccctgttgagaagttatgcttgtgtctgtatttttcgtgtacaaggttgaggcattatctactatctaacgagtgtactgttatatgtaaagccgacgtagtcagatacatactatcggctccaatattgaaaggaagagttgggaagtggatattttccttaaccgaatttgatcttcggtatgagtctccaaaggcaatttagggacaagctatagccaattttattgtggaacatcgtgatgattcaatcggctcggttgaaatagtaccgtggactttattctttgatggatcggtgtgtactcatggctgtggtatcggcttagtaataatctcccctaggggggcatgtttatagtttgcttatactattaaaccgtatgcgactaataatcaagctgagtatgaggcagtgctcaaggggttgcaactactcagggaagttgaagccgataccattgaaatcatgggggattctctgttagtaatcagtcaattggnnnnnnnnnnnnnnnnnnnnnnnnnnnnnnnnnnnnnnncgagggcgntatagtcgcgt

SEQ ID NO: 15818 - DNA, 725 bp, Oryza sativa
  unsure (1)..(725): unsure at all n locations
aaagagtttgaagcgtttgcctggggtgaaaccaatggtgttcgttctgtatcgctacttcgggctgcagcctcatcaacgtcatcttcaattatttcttcatccagagcttgttcactggatggatctagagcaggtagatcatcagctggtgtagtcttctttgtcttagctgtcttagccggggctgaaatatttacagtcgatgatttgttgtttcttttcttgccagcatcggctggttctctgataagcccttgaagaagagctgaagtcttgggggcattatagccgatgatggggggagatggcccacctccgttggggatcagtcctggggcatactcgatatccctgacgttgttgctttggtgagggggcgaagattctgttgtctgcaaatcaggagaaaggttagctaaggactaatcgaccaagtagttgttcaaataaaatcaagtgagttaggacttacttgagggacaatatttggaaagagatctgtcataaacatggaagccgattggtggaataagtgtagcttccattcaccccaccatctgtcaaatgttttgctcctaaaggttgccagctttatggtgtcaatgctacctagaggaggtccttggagattgagcagccgatccatcattaaagannnnnnnnnnnnnnnnnnnnnnnnnnnnnnnnnnnnnnnnnnnnngcagtctctatttnngacgcct

SEQ ID NO: 15819 - DNA, 732 bp, Oryza sativa
  unsure (1)..(732): unsure at all n locations
cacgcggttgtcatctgcctccacctccnnnnnnnnnnnnnnnnnnnnnnnnnnnnnnnnnntaatccagtataatatctctatatggacacgaaccgatgaaacggccggatggatatatatatatatgcaggtgaacaacgctgggacggcgtacctgaagccggcggcggacctgacgccggaggagacgtcgaggttgatgacgaccaacttcgagtcgtgcttccacctgagccagctgttctaccctctcctcaaggactccggaagaggcagtatcgttaatatctcgtccgtcgcttctgtcctcgcgttccattctcttcctatctactcggctgccaaaggtaaaaaaattaaactcccactctgtatgctatggacttcttgtcctattgcacaaaacaacaagcctagcttgcaaatataatttcactgaactgcacctcctccttcaggtcatatatttgacgacgcttaagattagattttgtttaacttttaaatttccaacgtaccattagtttatattattagaataaggttgtaaaatttaacagaaatttatggtatgatggtatagtttgaggcaaatacatgtataccgtataggatgatatttattacattctaaatgtatcgcgtggaaacggtataaatccaactccatctatctagtttattttgtgagagccgtttacccaactcaacttccactanaggtggatc

SEQ ID NO: 15820 - DNA, 3234 bp, Oryza sativa
atcacttggaccttatggaatgctttgtttattgggaaattggcttcacaccgctccttctattcaaaatccccaaaatggttttagtctgggctcggggtgcatggtttttgatggtagcacctcggccatataaggaccggtcttcgggcctctgttgcaaagcactaccgtacttccacatgtctagtgggtaaggattagtttgtggctcagtctagttataaacaaaagtacacggatggagatggaagaagtcgggggtcgatggacatctccagggcaaatgaaggctacacgagctgtggcccggtagtcgagatgtcatggcacagggccggtgtcctgctgctaggggctcagtcctgcctgcctgtcccgggggttccggccgtaggtgggattgggtcggtactcttgtctatggctaggatgggttggaaactatgtcacgtcttccgtctgtataccgtggtggtatgtggcacgtggttacacgtgaggaagatgtgtcttgtgggtaaagatgtacacctctgatcagagtataatctattcgaatagccgcgccctcggttatgggcaagccgagcaatgtacccaagttagtgttttaattcttaaaacctgcttaacaactaaaatgtggaatggttggcctgggttggcttgggacgagctgggacccagggtcgggttgccagttcggtctgaatcatcgtaggccttgggttaaggcaggttcgtgtgggttcacggccttgataaataatattgtatagttctagaatcgtgtttacaaaatagctttgagcaaccaatgtctttaaatgctgtttactgcaaccctaaccctttatagtataaatcctttgtactcccttgcatttattctgcacttgtgggtgtgtcttgttgagtacggtggttgtactcagtcttgctcaatttttcccaaacccagaagaggagttcctggaggatgaaggctttggtgtctagctcgtgcctgccgtcaagtgcctgtggtcgtcgccctagtcttccgctgtttctcgttggtctctgtgtgtgctgggccttcgctgcccatgtaataaattaactatttacgcttccgcttgttaaactctgaattgtatcaacttttggtgtaccttgcctcctgggacaaggattaatgcacgcacgtaaggaacgcccgttgggttatttccggtcgtgacaagttggtatcagagcccccttgaccctaggacgagccgtagatcccaagccttagcagtattttcgaaataaaaatcctctgttatttgtgaaaaccctctagtctttctctgtcttgctgcttcatttatcgccaaaatctgattttttttaaaaatgttgcttttctttttggttttgtttggagatggccggcagcgtcacccgtcgtggtttggacatgactggtttcgtcttggagctgcggggcatgtgcgttgtcctggggtatccacatggagtggactaccagggcaggcccgttccggagcaggaaggtgacgatgcagagccccacgctgcttgggaggccactgcagtgatcctcgctggctctcccgagcggacttcgctggcagtcaccgcgggtggagattctttccccgccgcttgcaaaagcgccgctctcctcgccatcggcactcttcaccagcgctacccggacgagttgcagcactcgccctaccgctaccaccctcgtcgcggaggagcccgcgactacgccaccttccgggatgctagctcggaggatgacgctaccatcatgcacctggcgcgcatggtggaggcgtacgacgcggctcgtatcgacttccatcagatggtgcgtcgtggcatggtggagaacaacatgaagatcctggagctgcgtcaggagaacttgcagctcaagaaggacctcgacgcgatggaggcgcagctgcaccagctcaagatcgcccagggagaggacagccgtcccaagcatcgccgcgtctgccgcagccagaagatcaccgcccgcaagagcacctccaggcccgagcttgttcgtcagtccctggcgtggacttgcttcgtcgagacccctcgtgccgagcctgcgcccgtggttccccaggagggggaagcctccggcgttggtagctcggagggtgcgctgttgctcaccttccgccctggcccgtcgcagcggtagacgagcagttagtaggcttgcgcgtgtgtttttcctcgtttgcctttttgagttgtgtggggcatggttacacaggtgtgtggtgtaactatgtcggagcctgtctttatttgtttgcctaagcaacttgaactctaatgaaccaatttaatagcagtgataaatttaagaataatagtagtcgcgggtggttagttttaatcgtcagctctctttctctgcttgctggttctgtgtggggttttcagatggtgacgaccaggagaaatgttaacaccggtgaaggcaaccaacccgagggcagcaaccccaacccccaaggcaatccacctccaccaccaccaccagacaccaacgccattctcacccagatcctcgcccaacaagccaacatgatgaatactttcctccaccacctccaaaacccgccacaacagaatgctccaccaccaccaccccaacactctaaactcgccgagttcctccgcatccgcccacctaccttctctagctccaacaaccccgtggatgcgttggattggttgcatgccgtggggaaaaagctggacactgtgcagtgcagtgatgaagaaaaagtcatcttcgccgctcaccagctgcaggggcccgcatctctatggtgggaccacttccaggctacgcagccagaggggcaaccgattacttgggctcgcttcaccgccgctttccggagaacccatgtgcccgctggagtcggggctcttaagaaaagggaattccgggagttgaagcaaggcaaccgctccgtgatggagtatttgcacgagttcaacaatctggcccgttatgccccggaggatgtgcgggaagatgaggagaagcaagagaagttcttggcagggaatgggacccctttggaaggccccttgggggtccccctttggggggggttttccgtctagtctctgagactatccggatttccaacgtctggtggacaagagcatccgcttggaagccaagcacaa

SEQ ID NO: 15821 - DNA, 1253 bp, Oryza sativa
  unsure (1)..(1253): unsure at all n locations
cgcgtgnaatgataactcattgtacanccaattcgtttggagctctcctgatcctagcttatcgantccttacccaatggctttgggcaactaagtggcttttaaatgctgtttactgtaaaacttaatccctatattattattcgcttgtacctcccttgcattaattatgcatccccggtgtggcttgctgagtactgtggttgtactcattcttgctcaatctttccccccttcagtaagagaagctttggagaagatgtcttaggtggagtcctggcttataccccagttgagcgcctgtgaagatggagccgtaggccgctagtccgctgctgtttatttttgcttgtcaggcctgaagtgcctttgtaataatgtaaatattatcgatataataaagatgtgtcttttatatcatgtttgtgtggtgtaccccggcttttcctgggacggggattaatacactagcgttcgggaaaaggcaattttcccggtcgcgacaattgtatgccaaacttagcaagtgtgagttatggttgtccgaagtcaaattcttagggcacgtgatatctgctaaaggagttgctgtggaccccgaaacagtgaccgccgtcactgaatggaagcaacccaagacagtcactcaaattcgcagtttcttaggtttggcaggatactaccggaggttcatcgagaacttctccaaagtcgctcgacccatgacacagttgttgaagaaagaagagaaatttgtgtggagcccgcaatgcgagaaggcgtttcaaactctcaaagaaaagctggtttcctcgccagtgttaatcttgccgaatactcgcaaggatttcatggtgtattgtgacgcttcgcgccaaggattggggtgcgtgctcatgcaggatggtcatgtggtggcctatgcctcacgccagctacggcctcatgaaggcaactaccccacccatgatttggagttagctgcggtggttcatgctctaaaaatctggcggcactatctcattgggaatcgctgtgaaatatatactgatcataagagtttgaaatacatcttcactcagttggacctgaatcttcggcagaggagatggttagaactcatcaaggattatgatgtgggaattcactatcatcctggtaaggccaacgtggtcgccgacgctctaagtcgaaaaagccattgcaacactcttaacatccgtggcattccacccgaacttaaccaacagatg

SEQ ID NO: 15822 - DNA, 5096 bp, Oryza sativa
  unsure (1)..(5096): unsure at all n locations
acgggcgaggagaaaatagctgctgatggtaacgacgttgcggatgatcttggtcagatgttgcaggacgccaggggggactgcgaaagtgaaaaggaggcccataaattgaacaagatgttggaggaccacagaacttcgttgtacccaggttgcgagcaggggcacaaaaagttggataccactctgtagttgttgcaatggaaggcaaaaaatggggttagtgacaaggcatttggcgatttattgaaactcgtcaagaacattcttccgggggggaacaaattgcccgagacaacgtacgaggctaagaagatagtctgcccgttaggactggaagttcataagattcacgcatgtccgaacgattgtatcctatatcgcggtgaggagtatcagaacctagaagcatgccctgtttgcaaagcactacgatacaagattagacgggacgatccaggagaagttgacgggcagctaacaaagaagagaattcctgctaaggtgatgtggtatttccctataataccacggctaaggcgtttgttcaggaacaaggggaatgctagaatgttgcgatggcacgctgaagagcgtcaacaggacgggatgctgagacaccccgccgatggttcgcaatggcgaaacatcgacagaaaatttaaagaatttggaaaggacgcacgaaacatacggtttggtttgagtacggatggcatgaatccttttggagagatgagcagcggccatagcacttggcccgttacgatgtgtatctacaacctccccccctggctatgcatgaagaggaagtacataatgatgccgattattattcaaggccccaagcaacctggtaacgacatcgacgtgtacctaagaccactggtagaagatcttaaacagttgtggaagaaggaaggtgtccccgtgtgggacgaggacaaacaggaggagtttaacctacgagcgctgctgttcgtaaccatcaatgattggcctgcacttagcaacctatccggacagtccaacaaggggtacaaggcttgcactcactgtatggatgaaacagaaagtacgtatcttaagcactgtaggaaggttgtatacatgggtcatcgtcgattccttgcagcaaaccacccggtacggaagaaaggcaagcacttcccacataaggccgaccaccgtacgaagcataaacatcgcagcgggaaaacagtgtttgctatggttaaagatcttaaagtagtgttcggaaaggggcctggaagccagcatataaaaagcgaagatggtcacgcggcgatgtgaaaaaagaactctatattttgggagttaccatattgggaattcttggacgtacgccacgcaatcgacgtgatgcacctcactaagaacctttgcgtaaaccttcttggcttcctaggtgtatacggaaagtcgaaagataccctggaagcacgtaatgatctgaagcatatggaacaacgcggcgaccttcacccggaaccaaaggagaaaggaagccattacttgagtccagccagctatactcttagcaaggcagagaaggaaagtatgtttgaatgcttggagagcataaaggtaccgtctggatactccacgaatatcaagcgaataataagcacgaaggagaagaagttcataaacctaaagtctcatgactgtcacgtgttgatgacacaactgctaccagttgtaataaggggtatccttccagacaatgtccgggcaacaataacaaagctatgtgcattcatgaacgcaatttcgcagaaggtcatcgatccggatagattagaagcccttcagaatgaagtggtgcaatgtctcgtcagttttgagttgatatttccaccttcatttttcaatataatgacgcatctgctttgtcaccttgtgaaagagatccgtattctcgggcctatgtacctacacaacatgtttcctttcgagaggtacataggcgttctgaagaagtgtgttcgtaaccgtgctcgtccagaggcaagcatcgccaagggttatggaacagaggaggtcattgaattttgcgtagaatttatcgaagaccttcgcccaatcggggtacctgaatcacgccatgaagggagactacggggaaagggaactctcggaaggaaagcaataatgacggtagacaacaatttattccgtaaagcccatttcactgttctgcaacactcttcattggtagctccttacatcgaggagcacttggctctagttcgcgccaggaacatcggtaagtccgatgcatggattacacggcatcacattgatactttccccgcatggctacgacaacatctcatgggtaacaacttgcctttctggtgaggggaccgtctgggtcgatcacgacattccagggatatgagatcaatgggtacacattctacacgagagcccaagacatgaagagcacgaaccaaaacagcgctgttcgtgtcgatgccatgggacacgatggaacaactgccacgtattacggtgccatcgaggacatatgggaacttgactatggtcctctcaaggttcctctgttccggtgccaatgggttaggttgactggtggaggcgtaatgattgatgacagtgggatgacaactgttgaccttaacaaggttggatactcggacgaaccttttgtccttgccaatgatgtaacgcaagtctttttcgtgaaggacatgtctagcaaaggaaagaagggcagagggcctgatgagcctaagcgtcaagtggttcttccaggcaaaagaaaaatcgtcggagttgaggacaagactgacgaggattacgatcagttggatgggcaaccccctttcacggtgacgattgaccctagcatcctcctatcaaatgaagacaccccttactcacgcagcgatcacaaggagggaacaatagtgaggagaaagtacgtgcggtcaaccgtcaccgccgatgtaatgccgtaattattgtgtacacgatgtaaactattttggatgtattgattatccatataaatcaattgatgtatggcatatgttaattacgcacgattattagaggtttcaacaagtttaaatcatgtatatgctagtatatgtgatacttacaatttttaaaagttttaaatcacacaggtggcaatttcatatgtatgttaattagagtttttaacatttaatttactagcattcatatgctaattaaaattgactaaaagggacttaagttcattaaatgcactgcacaatgaccatattaccccctaaaaccatgcaaagtggactgcaccatgcccttgttgcagcatgctgtttgctgccgctgctagcattttacaagcaaaccattgttgctgcatgacagcacaaccaaatgcaagccaaatcaatgtttgaccccaacatcacatgatttaatccatcataatttggacaaacacacaccttcagcaagccgaatcacaagcaataacccccacatcaatttcatcatcaatatcacagcccaatcacagaaattcaaagaagctcatatacatctcaagttgttgaaatacatcacagaagtttcaatgttacaaattacaagcactcatggttcaattgacaagttaaaccaaatacaattcacaagaaaaattgaaccattcattacattcctttcaaataccacaatccatcggcaatccagtcccgaaattggttcatgacacgcgagtccaattcgtttgttggttcgctagatggagaagaggttccacccaatggatcataattttcatcatggtcacaattgtcgaactctgtatcagccatttgactgtctctaatgaaattatgaagtgctatgcatgcatggataattctgctttgcttttcctgcgagtagcttggtaaactaaacaaaatcctccaattgttcttcaagaccccaaatgacctctctatgacattccgacaagaagaatggcagtaattaaagtgctcccttcttccccttggcaatgtgctttcgttgtactcttggaaatgatatgttatacccttgtatggtgctagataacccggcctatttgggtatcccgagtctacgagataaaactttcctgaaggtggctttggaaacttggcactaaatctagtttgtgcatcattgaataccctcatgtcatgaaccgaaccaggccacctagcaagtatcgcgtcccaaaacgactctaaaatacatcctcaaaattatgcatagaataagtaaaatccatgtgaaagcctccaacaattaaaatgtgcaaagttaaaagtcgaataaggcttggaggatttttgtatatttcctaaaagcctaaaatgcgtaaataaattttagtggaatttttagagcacaaataataattaagaagaaataaacaaagttaaaatggttttataaaaagaaaaaccctaaaaagtccttttccccccccttcccctcttgggccggctcggcccacctccctccctctctctcctctcccccgcggcccaatcagcctcctccccgcgcgcgtgccgctgacgggcgggcccgcccgccaccctcactgacgggtggggccgccgtcatcccctacctcgcgccgctcccgccgcctcgctcgtgccctagcgccgccgccgccgcgaatcccgccgcctcccgccgtccccgcgcgcaataaagagggggaaatcattccccgtgattccctccctctttccccccacttttctctctctctctccctcggatttgttcggaaacgtttccccctaaacctcgccggcgcatcaatggcggccggatcttccgcggccgattccccctcatccggccgccctctctcactcccaaccctatataaacgctccccgtgcctccctccaccgtttccgccactcgccgctctctctccccgtcggaatcgagctcgcgccgtcgctctctctctccgccgtcaccgnnnnnnnnnnnnnnnnnnnnnnnnnnnnnnnnnnnnnnnnnnnnagctgtctatcggaatccaaanncccacg

SEQ ID NO: 15823 - DNA, 698 bp, Oryza sativa
catggtggggtagttgccttcatgagcccgtagctggcgtgaggcataggccaccacatgaccatcctggaaattttttggggaaaaaagggcccaaaccgggccaaccccccaattcctttggcggcgaagcgtcacaatacaccatgaaatccttgcgagtattcggcaagattaacactggcgaggaaaccagcttttctttgagagtttgaaacgccttctcgcattgggggctccacacaaatttctctctttttttcaacaactgtgtcatgggtcgagcgactttggagaagttctcgatgaacctccggtagtatcctgccaaacctaagaaactgcgaatttgagtgactgtcttgggttgcttccattcagtgacggcggtcactgtttcggggtccacagcaactcctttagcagatatcacgtgccctaagaatttgacttcggacaaccataactcacacttgctaagtttggcatacaattgatgttcccgcaactttcccaataccagacggagatggtgctgatggtcttcctctgattgtgagtataccagaatatcatcaatgaaaaccacaacaaacttatccaagtattccatgaacacttggttcattaagttcatgaaaaaggcaggagcattggttaaaccgaacgtcatcaccgtgaattcatacaatccgtat

SEQ ID NO: 15824 - DNA, 7636 bp, Oryza sativa
  unsure (1)..(7636): unsure at all n locations
cgcgtccattagaacgcctgcttacgnnnnnnnnnnnnnnnnnnnnnnnnnnnnnnnnntcccatatgtccaccaagtatgttcctctgttgatcaaagatgtgaaccccagtgtttcctggattaacccccctattaaatccagtgtgcaaagttgagtcaattccctgacttccacagaaattcgagggtgccccaacagttggcctgccctgcataccaccaaattggggtatagagaaattctgttgtggcccaaaatgtgtccccaaaccttgagagccaaatggtggtactgttggttgtggacgcggcaggtcaaaaaactgattgctgttggtcattcccgggccagtccccactccctggctcaccattcccattggattaccagatatagcttcaattgcaaatcttacctcagaagatgtggtattcatcgccgctgtagaacttggaccagcagcatcagcagtagtagcaggagcagatttccccttcgctgtggctgccgctgcgttagctccagcttccccttgctcttccaccgatttctgtttgcatagctccaacagcaaccctttaatctccttaacctcccccttgagtgcctttagctcagccacatcctttttcatcgctgccatatcagtcctgaattcgttcatctcctccatatcaaccatagactcgctggatcgggtcttcgttaccatccccctcctacaggatcggcttggaacttgttcctcccctctggatcccgaacaggagaatctttctaccgccgcctgttctgagtaacgagctccgtagatttcacagggccacaccacacaggatggaaccccaaccctcgctcaatcactcagcaacaactccgttgcccccaggatgatcttgccccaactcaggaattttacggtggatctcgccgccgccttccaccaaccctcgccggacaaaatcagagccaagaatcgacactgctctgatacctttgtcagatcccgtgattagaaatggaactcgcctctcgatctcaccgatgatagctctcgatttagtggccgccgcaagacttctagggttctaactctaactaagtctaagacaagtaataatatggttctcgatatcttcctctctccattccaccgattaataaaggtttacatgagtttcgatgacagcttgcattacagcggaaaaacagagtaaaattcagagaaaacgacaatgatgacgtctacagtggtcccatgggaaacttggacggtgggatttgccttcataacgcttcaagtgtctcctgggccgtccaatcttcatcagatcagtccttccagtaacactaaacgaaatttactgaataaaagtttagttaacttctgcatccttcagaatctccatttctcctgtccaattcctgacatgcactgcactgctgcctggaagctgatccacatccaccggtggttgtcgtgcaggcaagctgttcgacggaatgcatctttgcttgtcggaacaaggatccccgcggacccagtcgccggcggcggtggatcccagcttggacagatccggtgtgttgcttaagtcctatgtgttattgcatacgttcttggttgtgggtgatgtttgctatggagcgtgacacacccggccggtggctcgtgcaggtgtggtgctcggcggaatgcccaagaagatgtcaaggttggagttggacgcgggggtgtcgctgtgggcaggccttcaaccggacatactgggaatcgtgctccacttccttccatgccttgccgaccgtgcgagggtgcggtcagtatgccgtcactgacgagccagcgcgaacggccacgtcctgccaccgccgctgcccctgctggtgcttcctggtttcaagttctcgagcctatcagacaagggggatttcatgcctgtgcggtgcgtgccggtgcctaaggaggttgcagctgatgatctccgatgtgtgggttcttttcatggatggcttgtaggtgtgactcctaacaaggatcgcagcgacgagtacaacagagatgccgatggtgactgcttcctggtgaatgttttctctcgcaaggtcattcgcctaccgcagctgtgccatatgcgttacaattttcctgcttactccagtaagaccctccgcatcgtcaatggttctggtgaggtccattttggtgtcaatgatatatacacaatgtcactatgtaatgtggcactatctgcttcacctgagtcatccaagtacattgtggctgcttcctcagaccacaagggtgcaccagtaccagctctctggcagcctgggatgatttcatggcaggtttgctctggagttgaaattgatggcccaagagatctctccttctaccaggggaagctttatatgctcatgaggcacaggacacgcctattcacttgtgaacttgaggaggatgatcgtgggttcatggtctctcgtattgagctctctctcactgagctgcctcgcaatcatccctaccaggaaggtggtgcaataagttgcaatatggttgtgtggcgtggagagctattattaatcatcagacactacaatggcgattaccgtaagagacaacttcataaagttgaagtgtttgcactggatgttgacacaaacccttatggactaactgagattcacagcttgaatggtgactgtatctttgttggcttaggtggctgcaagtcctttcctgctggtctacatcatggagttgaaggtgaccatatctactttgtccctgatgattggaggccttatgatacatttgtgtatagcatgagagatggtaagatgaggtcctttgccgtcaaactattagcttccgaatttgatgtggaccagttgagtcgtgatttcccggtgtggttacttcctaccgaatgatgctgcgcagcaaagctgatctagctgggagggtggtcaagagcttacctttcattagactccttggtcgagactataatgtgtattatctgctatgttcatgttgcaactctcagattatcttttgtatttcctgttgaactggcaaccatgatttggtgctctctttcggagtctttcttgtttctgtttttctgggacagtggtactgttgttgtctgactgaggacatataaagtatggctgcattattctgctgttgtttgtggcatgtcgtttcttcaagtccgatctttgatggtgttttgagaaaaatatgtcatggttttgcgatatggatcagaagttagtatattattgctactatgtatctgaaggctttgatgttgcagttgttgctggatcatctgtagagattttatttcttaaggcgaaaagtttgattcatatactcaccagatattccatcttgttctttctactcaaggtccatgaagtttgtcatggggttgctggaacgcacaaacgggctccctgtctcttttattccattttctggttatttttcctatctattttgactatgaaactcgagacaaaatttagctgtgaaaatttatattttctcataaggcattagaatttggacaataatttgttcatgttctcatataaaacttttcacccaactttcaaaaccagataaataactcagcatttgcattatattgacctgcatgctgtcactaaatccttaacatgaacacccttgggttggggcagatggagaatctcgcatgaatggaaatgacaacactagttcttacgtgctgcatgcccactctgttcatatattggtgctccacatatgtgctagaatgttcacaacacttttttctctctctcatatctcaccaagaactttgatatatcaaaaggtctatcaattaatcatgtgaaatagtttcggactagtgaacatagttaagcggccggatggtgcgaattaagtcatgcctctttctactttttcaaaattacctactatccaggatgagtcccatgattttgttactacgaatgcgtctagagagcatataatttcaggtgttgatggaggagtttgtttcttcagataaaattacaagctttcagaatcaaaggttcaactgatcaattactcaattcctcaaagcaaagactcccagtccctcaatgcactacaagaccttatatatatggatggaatcatcaataaataacaaccctactgctaccgttttcctcggtcttttgaatttcttttggctcatcggaatttttttagtacagaagctcctcgatggggcagcttaaccgttcaagcatatcatatataaaatccatgtatagtacatccataaaaaaatattagtgcttacacattgcacagccagctcgatgctgaaaagatataaccatttaaaataactaggtgaaacctcgtgccttgcagcgggtgtttggtatgataataaaaattagaaataatgtgtaagataactagacaatagaaacttgcataagctgatttttttttttaggaaaccgacggcaggagctctgccggaatttgatttgagaaaagaaaatccgtgcaatacagaccagagcgagcaaaataaaaatacagatcaaggtggcttaaaagccgagctacgaaggtctatttcctgcttgacaaagtaagctacgtccctctctgatctaacagaactattgaaaattctattattcctttccaaccaaatattccaccatgttgtgaggagatctcctcttgttttcagcttttgctcatttgaaccttgacgatcgatttcagtccaccagttggatgttccacctgtggattgagcatttcctcctgccaagtttagccatgagcaaacaaggttccatacttgcctgacgaatggacattcactgaacaagtgatttgtgtcctcaaaagcacatgtgcagaggcaacatatccaattgcatggccaatgtctcatgagaaggttttgcgcagtgagagttttctgatgaagaacaagccatccaaaaaagagtgatgctccggtgcaatatacttgaagtattatactccgagtagaattaatctggaccgtttattttaaagggtaggtaagtaatcttctaatatcctttaggggtaattttggtagggggtgttttgttcggtgcgcatcttcggttcgcatcggttcacatcgtaggtgtggactccgtcgcgctattccttccccggcgtcaccgccttgcccgcatccgtccgtatcgctcgccgtcgccgccttgtccgccttctcagtcgccgtccctctcctccgcccgcgtcgccttatccgccccctccgtcgcagtccgcctcccccgcccttccccgcctcaccgttgtctccagtccctccggcgccgtccgtcggcccggccatcttcccctcccccttcggttcgcatctggtcggaggcaggcaccggcaggcggcagcgcgccccgcggctattcctcctggcaggcggcgtcgcggctggtggcgcggtgcgtcgcgtctgttcgacgcaggcggcggcgtggcttgcggcgctggtagtggctgggtgcggcgaaatcatcaggtaggtagtggcaatcttgtttttcagttcaatagcagttgaacttgccgaaatgggactaatgtgttacctgaattgctgaatctaaatctgaaaattttcttctggattttaaaagctattgtttttgtaaataccagtccataaaattagttgtttcccatcgatgttttcatatcacatcactggtagaagtagaaaacagcacattcccttcggtaatttggttatacacattgatatttgattcgtttctgtcagtttgatgcttcagtggtgatgttaacatgtcctacagagtagcaagtgcaaaatgcatcttgagtgaaaaacatatctgccaatgttgaatcattaggattcaataaagatgacctgattcttgtgaacgatgtggcttgtgcaaaattatttatctgataaacgaactatagaatacggtggagatttactcagtttgtcaacgactgttatgtgtgttagttcttaactgtaccgcattggctcgccctctgtgtgtgtgtgtgtgttttacaagttattactgttgtgcatgactaggaaatttagctgttaaaagaaccacactttagtttttttcttggtcatcattagcttttcctgtctcaggttgagaagtggaatgaacagagggagagtgggacatttgcaggaccactctaaatctcctgtttgagagtcttctcagatcagtccgctgccctcgtcggtgtcactgctatcatctggttggagtgggactcattcgggcgacgctccggtgcaatatacttgaagtattctacttcgagtagaattaatctgaaccctttattttaaagggcaggtaagtaatcttctaatatcctttaggggtaattttggtatgggatgttttattctgttcgcattggttcgcatcttcggttcgcatcgcaggtgtggataccgtcccccaattcctcccccaacctcgccgccttgcccgcctccgtcgccgtccgtatcgcattggttcgcatcttcggttcgcatcgcaggtgtggataccgtcccccaagtatgaacgatgaaactgaagaacaatagttttttgaaagaaatatgaacaatattaaattgattttgctgtgcatgtatggcttgctgccctagcgaactgaccattgatatttagatatgatttagcatgacatcttctggtaggataagacaaatgcgatatattttgacaaaaatagacaggggctgcattaacattggacttggcttattttgctagtttgtcagctaacttgattatgtccataggaatccacatgacctgcaaaagagattcaggaattgtggcaacgatctgactacaaataggtcttaataagctgcaatgacctggctccgtttcggatcttccttttttaagggtttcgacaatggtagaattatcagagaggagcatgtaaccgaagtcattgtgaaatacacaaatgcatatattctccagtggtgctgaaaaaagaaacagagttctgaaactactggatgatgtgcaacacaaaatttgactgtacagctgaaatgaaaaaagaaaaattatctctgaacaaccattttcagaaaatgtattttagtataacaatttatcgtacatacaaaatttgcagccattgtgggggaactgtagtaattgctcaatagtttagagtggcaatgtatttatgcagttgatggttgttctttttttatatatacttataaggtataaaggacgtaagcttatatttgggtgcttgatctgtttgtttttttttgtacttttccgtaggtgaggtctgacataatgccttcgagctatgtgagcctagaggttcaggaagagtataaaatgatgggccctgtggttttttnnnnnnnnnnnnnnnnnnnnnnnnnnnnnnnnnnnnnnnnnnnnnnnnnnnnnnnnaaaaggggtgtnatcaaagcaagggggnngtacaatgaggggttatcaaaatngcatcggcc

SEQ ID NO: 15825 - DNA, 730 bp, Oryza sativa
  unsure (1)..(730): unsure at all n locations
cggtcaaaactgctttgaacttactatgtactgttttaagagacctaacaaatctgtcttgggcttgcctaactgattggggagcacctactatccataaaaaaagacccaaacactccatggaatccatgttgtttgtggatttcaactcatatgattccacaagcacagaatgtaacctctcaaaaactggcctgtgcatcctaaacatgttgtaacaagcagttctattagctaatgttctcataacccaatcatgtccagactcaggtgctacccttcttggagccttattagagtaaagttccaagtaatacgtaccaatcatggcggcaagcatacatgctcttctcctgtccatttctcttttcttcaaaatataaatgataagatcaatctcatcatcactgctatcttcatcagagatatcttcatcaccactgctttcaccatcctgcaggagtgacatatgcatagaaagaaagcacatcataaatataatatgaccaaacttcaagaagaaaagaagggaaggtttaaataggtccacacatcacatgttcattacgtcacatcacatcaaacaagttgatagttcaacacaaaagtagatcataactaatgcagctaagacacaactaatgcagannnnnnnnnnnnnnnnnnnnnnnnnnnnnnnnnnnnnnnnnnnnnnnnnnnntcagggntnacaaagnccaaaattggcccg

SEQ ID NO: 15826 - DNA, 8230 bp, Oryza sativa
  unsure (1)..(8230): unsure at all n locations
gcagcgattgagaacacctctnnnnnnnnnnnnnnnnnnnnnnnnnnnnnnnnnnnnnnncgcctgcacggctggcctattatgctgccgttgttgggcgtctacgtcttcaccgaccggcttgccttcgccgccgccgactggtgtccacacctgcacggctggcctattatgccgccgctgttgggcgcctacgtctacaccgccggcctgcctccgtcgccgccgactggtgtcatcgcctatacggttggtcggtcacaccaccgttcatgggcgtccatgtcttcaccgaccggctggccttcgtccgccgccgactggtgcttccgcctgcacggctggcctattatgctgccgttgttgggcgtctacgtcttcaccgaccggcttgccttcgccgccgccgactggtgtttccgcctgcacggctggcctttatgccgccgttgttgggcgtctacgtcttcaccgaccggcttgccttcaccgctgccgactggtgtttccgcttacacggctggcctattatgccgccgttagtgggcatcttcgctttcaccgtcgaccgccttcgtcgccgccgactggtgtcttcattgttattgatggacgactttgttcccacattggccacttctgccatcaccaaggggaatattacaaagctaagtcatcatttattttattctttatatgatatttttccttttcctctgcctcactataccaattggtcttccattgagtagtgagtcgggggctacagatgttatatcatatttttcataatatttatcttgattgcttgcgacataatctgagtacaaaagtacctatcgagttatggagttctatcttcctatgctttccgttcggtttgccaatggatggttgcctttgggccgattcctagcacccgggggctcgttggatggaccgaataacgcaaggtgctaagtattattcggaataaatcaaaagcatagagataagataatttattttctgctcttaataattgcaaaagtacccgagtagtaaactccgatccgtgaaactttgttccattaatgacgaactcatgacactcatatgcatgattgggaagtgcttaggccgactcccagtgcttggtggctatgattagtcgggcagagtgtttaaacgtaatgagtcatctgctcggggaaatcaaaattgacaagaggagaaatacatatttataaatattttaaaatacttgattttttctcgagtattatatttatatcagatactactcatcctatatgtttgttctgcaggatccagatccagatatgcataaaagggattcatggctttaagcttatctcttacgctccaggaatggatcagtcagaacatcaccaccggctcgcctcgaccgctgccgactggtgtttccgcctgcacggctggcctttatgccgccgttgttgggcgtctacgtcttcaccgaccggcttgccttcgtcgccaccgactggtgtcctcgcctgcacggctggcctattatgccgccgttgttgggcgcctacgtcttcaccgaccggcttgccttcgtcgtcgccgactggtgtctccgcctgcacggctggcctttatgccgccgttgttgggcgtctacgtcttcaccgaccggcttgccttcgccgctgccgattggtgcttccgcctgcacggctggcctttatgccgccgtagttgggcgtctacgtcttcaccgaccggcttgccttcgtcgccgccgactggtgtcctcgcctgcacggctggcctattatgccgccgttgttgggcgcctacgtcttcaccgaccggcttgccttcgtcgccgccgaccggtgtcctcgcctgcacggttggcctttatgccgccgttgttgggcgtctacgtcttcaccgaccggtttgccttcgccgccgccgactggtgtttccgcctgcacggctggcctttatgccgccgttgttgggcgtctacgtcttcaccgaccggctgcctcgtccgccgccgactggtgcttccgcctgcacggctgacttattatgccgccgttgttgggcgtctacgtcttcaccgacaggccgcctcgaccgccgccgactggtgtttccgcctgcacggctggcctttatgccgccgttgttgggcgtctacgtcttcaccgaccggcttgccttcgccgctgccgactggtgtttccgcctgcacggctggcctttatgccgccgttgttgggcgtctacgtcttcaccgaccggcttgccttcgccgccgactggtgtttccgcctgcacggctgatttattatgccaccgttgttgggcgtctacgtcttcaccgaccggccgcctagtccgccaccgactggtgtatccgcctgcacggctgatttattatgccaccgttgttgggcgtctacgtcttcaccgaccggccgccgcatccgccgctgactggtgtcaccgcctgcatggctggcctgttttaacgccagctgatgctatcttcttcacggctggctacatcgctgtcactactaataggcatcagtatcttcaatacaagctgcctacgtttgccatggctgccgactggtttcttcacttccatggctgcatgattctgccagtgttgattggcccattatgccgctgttgttgggcatctacatcttcatcgtcggtcgtctcgtctgctgctgactagtgcccttacctctacgtctggtttatacagctaccactactgatggacatcatcatcttccgtcgccgactggttatgccgccgtcgactggtgtttttatcttcacaactgcgcgtcttcactaccagtttgcttctgttgccgacgactcgtgttcacttcatcacggcaatgcaactttgtcatcatggtagagcgacttcatctttattatcttcggcactggcaaactctattgctgctacttcgcaagttttgctacttcaccaaccacgacgtctttgtgagcctcgacatcttggcatgcgatgccatgttattttactacaacaagaggctctccaatattcaggatttctacttggacatcttcaacacatatcttcaatcaagcaatgactactcgacgacaagaagctataattctcgactctatgttcagttgtttcccaactaaccaaagagtcgggggctacacaaatacaaggctcaaaatttgacaaattttatgtcaagctgaagaaatcaattaatcagccaacgagtcaactccaggagtcattatcttcatctttgcttcggagcagacattctacttcaacaacttcaaatatttcggtttagacgagttgggcaacaacatcagctctcctccaattatttgtcttcacggttggcctactacgcaactgccgatagaggatctcatcgttatcatcggctgctacatcgctattgactggatcaccgacatcgtcatcttcatcaacatcttgttaagcctcttcaacatagcctactctgctgccgttgatgggaaacttcgtcatcatagtcggctatctctgttgccgctaatcatcattaccgtcggatgcgtttgtcgccgccgattattttcttcatcttcatgattggtggatttcgccatcaccgttgatgcgcgtttacgtcttcatcgtcggtttgcttttgtcaccaccgactgttcttttgttgttgttgggtgcctacatcttcattgctagctgacctgactgttgccgactggtttcttcgcctccatggttatgcaacttcattacctttgattggtgtcactgtttttactaccactgacatcttccgttacttctgatgagcaatttcgtcttcatgttggtcatttcatctccatgccgactgcgtcagctattgccaatagacaattttgactatgacagaaggacaagctatatgctcaggggctcatcaactcaagcgtgaggattatatctccaatttggacttgttccggatacattccacatggattcatagtcatgagtctattttctatgctcaaagactggaccaattattattccccgtaagggctatcaaccgaatacttgcgccagtcgggattcaattattatatttattttggagtatcccataagggataatcattcagatcagaagctattcatatgagctacacttggtctatattacccagaagatttattactcgggagcatgttacatgcgtcatcctttaaagggtgtcgaaggcatattttttggcctaagcctaatatgtctgcaacccatgttttcaggtgtggcctgtcacgttcttttagggacttaggcactttttgcttaggccaaagtgcgcgtgatcaagtgcccaataccccaataccttaaaatccttttataccgcagttacttaactttttaggagttggtacaatgcatcttaaaaggtgtcaaacagtaaagctttatatagctggcccgctgactttttaatatagtcatggtgcttgttggttttttaagcaattggttagatacaatatctgtgcttttttgcacggtagtgtgcattttaatgaccaatattatggcttaggctgattatataatgggggcatttttcaagcgggtggtaaatcctttatgagtttatttactcggattttataccacatatgccatatatttccaggggtggtggaaccatgttgtttttagggacttaagcacatttattaaaacagtgtgggcatggcgtatgaccaatactttggaaatttctttattcacaacatacaagcttttttatagctgttttgctatgtgaattttcaataatgtagccaactttaggttacactcatcatattttacaaagcagttggtatatcactcggatcatgttattcagggatttacaccgcatatgctacatattaatatcaagtcgcttggttaactataattatcgaagccactcggttggttggattatttattccttgactatatgcttagtttgttcacttaaccgcatagtcgagggctacacctattaggtgcatctagtcggtgcacctgactttattttccagccctccacagtcttcagatttggtaaaagtactcgggagaccatgacaaagatgattgaagcactcggctttggagtaatctggttcgagagaagattatcttttcgactgcgaaggtctcaggggctactgtggatattatgggtaccccatacccacacggcatggttatccgactagttataggggataacttatatatatgaaatatgtaacatatcatgacttgggtattacgtttccctgtatattatggaacggcctaaagtcctggtttgataagattgtaaagtagatttaggaaaccgataccgtattggttatggtttctatcttgtaaccctgccccccaacctatataaggagggcagggaggccctctagggggcaggagacaacctgatcgtcagatctatactacacccggcggattcaaatccccaaacaggagtagggtattacctctcattgagagggcctgaacctgtctaaatcctttgtctccacatccatccacttttacgtctcgtgcgctaccccgttttattattgccgaatccatgtttcgacataaacccattcaaacaaagatccattactctcttacgtttcgagacgtatcttggtcgtttttttgttgcgttgttatcatctttcgttgtgatttatgaacagctcctgccagaaaccagagttgctggcttctagaatagcaaaggcagcggcacgcgcggaccaagcccccccccccccccccccggcgcgcgcgcgcatgtgctgacaattaagcgtcaaaatgaacgtgcgttggtgtgtgcgtggacaaatacctaactatcactgtgaattcagccagattggtgcgttatcgcacgcccaagttgcccaagttgccgagatcgatttggaacttgatcaaatccaaaacgaaaagtaggagatcgatgccgcagtgcagcccaaaactacgtacgctaggctacgtcctatatatatattcacctgctttaatttgcatcgatcccaacttaaactgagtgacgccgcgccaatatgcagccgcgctgtacgctcatccacgccgtcgccgtcgtcgcggcggcggcggcggccgcgctgctgcttcctccgctcgccgccggccagccgtggccaacgtgcgacaccagcgccggcacgtacaaggccgggagcgcctacgagtccaacctccgtgacctcgccgccgcgctccgcgcggacgccgccgcctcgccgtcggcgctcttcggcacgggcaaccgcggcggcgcgcccgacgccgtctacgggcttctcctctgccgcggcgacctcagcgtcttcgactgcttcgactgcggcacccgcgtcctcgccgacgtccgccgcgtctgcggcggccgccacggccgcgccaaggacgtggccctcgtgtacaaccagtgctacgcccgattctccaacaagggcgacttcctcgccgccaccgacaacgccgggggcgagacgctgctcatcagcggcaccaacatcaccgaaggcgccggcgtcgtggcggcgtacgaccgcgcggtgaccgagctgctcgcggccaccgtgcggtacgcggtggaggagaacccggcgaggctgttcgccacggggcagcgcgtgggggacgacgcccgcgacccggggttccgcaacatctactccatggcgcagtgctcgccggacctgccgccggcgtcgtgccgcaggtgcctcgacggcgtcttggcgcggtggtggcaggtgttcccgctcaacggcgagggcgcgagggtcgccggagcgaggtgctacctgaggtctgagctgggcgtcggcccgttctacaccggagctcccatggtggtgctgcgggcggacaaggtctagccagcgccgtcgccattggcacccgatggaagctgcggtagctacagcctacagttctacgcaccaaaatggtggaggtgcaccctacctatggccgacaaagtgcaagcaaatctctacacgtatacctatactattattaggacattccgacaaaatgtccacgttcacccgagaaattttagtgaataaatctggacatcgatccagttaaaaccaaatttacaacggttcaataactaaaataatcgacatgcagctcttcgccaacttcaggtagaggttcacaaataaaattcagtagttgtgggagctttatcttgtgttggtgtttattagtttgtgcttacttaatattttgttggtgcgcttctaaactcactgtgtgagattgcttttgtgtgaattctgtaataattggatatagctcattaagcaaaaaccgagatgttttattccatcacctataaaaaagctaaaataatcgacaacgctttcagttagacgtccaatcaaatagaaaagatagggcatcatattacccatgtctaagctacatggccgctatatgtgcatgcagtagcctatcttcctactcactagcattctcctcccttccgatgtcttttctacgtttttaaaatagcttgacatgagttttcttctaaattatttatattcaatttacaatccgattatatcttgaatttattgttattaaatatgtaaaaaaagatatcacataattatattcttatgaaagatatataaacttatgttttaaccatgaaaattcatgttcatacgcgatactgaaatgtttcaacatatgtttcacataatctttcagtatttcaatcactattttttttcaatgtttcacctgtggacaacttaaacatttcaccccccccccaaatttttttatggaaattaggtgcctggtatcaatttcatgttggtacttcctcccgtcccgaattccctgatgttttggataagattgagatccaccaattaaacctttaccatcaatcttcctctcatttacaatggtaggcattcttaacatttccacaatcataatgatgtttaagaatctagacatatttatttttcttgaatcctttacactcatataccatcaaatggatgggggaaatacttcgataacctacccttggaaaacgg

SEQ ID NO: 15827 - DNA, 966 bp, Oryza sativa
  unsure (1)..(966): unsure at all n locations
gcgccaccgggactaaggatcccggtgatctttagccccggttggtgctaccacccggaccaaaagtcccacccctatatatatgtcttcttcctcctccagctgcccgagcaagcttcaaaatttcttcaaaaaagagtggaggtcatgccaaaatttctattgaatttattttggtgattacatacaaatcggaggtgcctaaaaggtttgcaacttcatcctccaatgttttttttgtcatactacatttgcacctatgttttgcacactttttttgtctccaaaatttagttgtaagttgatgagagagaaaatgtgtgtggggaagaaagaatatatagaaatttagttcatttgctaaacaaggttttataaaatagttgagaaggaaaactctagtgaaagttaatcttaaataatagaaaacaaactaaaatgaaaattaaaagaagtaaaacacattaaaattagtttaaaactttacaaatagtttttaagaattatttggtgtaatattttatgatttttgtatgaataaagatatcttataattattgtatgactgtcattattgtaagaataattatttgtgtacggtttttttgactcatgtagatggatcggcaatggatgtacgctgaccggcggtccaaagagtttattgacggcgtgcactattttttgagagtggccgaagctaacaggcaaaggggttttatttgttgtccatgcaataagtgtaagaatcagaaggagtattctgcatccaggactattcatttccacttgtttgagtcggggtcatgccaagctataattgttggacatcccacggagagcaaggtgttgaaatggaagaagatgaagtggaagacgacaatattnnnnnnnnnnnnnnnnnnnnnnnnnnnnnnnnnnnnnnnnnnnnnnnnngtacatcgaattgcattcaaaanngagctg

SEQ ID NO: 15828 - DNA, 794 bp, Oryza sativa
ggccggactgaatacttctcgacacacgccctctgacagaggaattcggtaccccttcgtctccgttgtgcccgtctgtctccgccgcgcccgttcgtcgttgtttttcccgcgcctcgtcgcgtggtggtaaggatccgtcctctcgcttccccgccctcgtcctctcggtgtcgccccgtacccgttgtgcggtcgtcgaccccggtacccgtgtaccggtgtcggtagtcgttcacgtgtgcgggtggtgaccgtgtagtgtccgtgttagtgtgcccgctcggtagccgcgtggtttccacgtgtgcaacccgtgtggtgtctagtggagtccgtttgtcggccactcgcctcggttgacacacggggtccgcttccgtcgacccgtggaccgtctctgtgtacccggtctaccgtggtcctttaggttgacatgtggggtccgcatgtcaacggcgcagccttcctgtcttttccaggctagcgcttacacatgttttataattgcaaagcttaataatccgcaaatctccatataacagcattaaacctcggatgatcatattttggtcatacgaactccgaatcgacccgttcaagtctcctaatgtttgttataacctaaagaaccctgtgctttctttttatgtattgttattgcttctttataggcttgtagctttgcttgtgtgcttcgcgtagcttctgtcgttccggaggttcccgaagcgtggttcgtggtcgtcgccgtaggttcggaaggccgttctctctgagcaaggcaagtcaca

SEQ ID NO: 15829 - DNA, 2085 bp, Oryza sativa
  unsure (1)..(2085): unsure at all n locations
acgcgcaatagatacccgtcctnnnnnnnnnnnnnnnnnnnnnnnnnnnnnnnnnnnnnnnnnaaggatcccaagggcttacctccaaggaggaattgtgatcatgtgattacacttaagagtggagctgaaccacccaatttaagaccatacagagtacctcattatcagaaggaggcaatggagaagatcatagctgaactaattgaatcaaaggagattcaggtcagtgatatcccatactcatcacctgctgtgatggtgaggaagaaggatggatcatggaggttatgtgtcgactacagacaacttaatgcacaaacagtcaaaaacaaattccctatgccaattattgaggatctgttggatgaactcaatggggccaaagttttttctaagctagacctcaggtctggatatcatcaaatcagaatggccactcaagatataccaaagactgcattcagaactcacttagggcattatgagtatcaagtaatgccctttggcctgacaaatgccccaaccacttttcagtccctaatgaatcaggtactggctccattcttgaggaaatatgtgttggtgtttttcgatgatatcttgatctatagtaaggactgggcagaacacaaggagcacatcaggcaggttatgaaggtgttggaggaaaataaattagtagttaaacttaagaagtgtgcttttggcctccctagtgttacttatttggggcacatcatatcgcaagatggagtggcaacagatcctaagaaagttgaaaagatagctacttatccaactcctaagagtgtgacagatcttagaaaattcttggggatgacaggttactataggagatttataaagaactatgggatagtgtgcagaccactgcatgatatgctcaagaaggaaggctttcaatgggaaagggaacaaactgaagcttttgaaactctaaagacacatatgtgcactagtccagttttgagtctgcctgacttcaccaaagagtttgtgattgaggccgatgcttgtggcaatggtataggggctgtccttatgcagtctggtagacccttggcctatttcagcaaaactctgggacctaaagcagctgctcaatcgatttatgaaaaagaagcaatggcaattctagaagctttaaaaaaatggagacattatgtgttaggcagtagattaatcatcaaaacagatcagcaaagcctaaaatttatgatgaatcagaggctagttgaagggattcaacacaaattgttgctcaaactgatggagtatgactactcaattgagtacaaggcagggaaagaaaacctagtggctgatgccctgtcaaggattccaccagctgaacagtgccaggccataactactgtgatacctgaatgggtgagggacatacagaggagttatgaaggagatgtgcaggctcataagatccttagtttgattgggacagagggtgacacagatgggagctatagtcaggaagctggattattaaggtataaaggcagaatttatgtgggggagaatactgaaatcagggaggagctgataagatcatatcactcctctgcttttggtggacattctggaatgagggcgacatatcacaggatcaagtccttgttttactggccgggtctgaaaaagcagtggaagggttcatccgagagtgcccgatttgtcaggtaactaaggctgaacatatccacattcctggactgcttgatcctttagaagttcctgatatggcatgggctcatattaccatggatttcgttgaaggactaccaaaatccaatgggaaggatgtaattctggtagtggtggacaggctgacaaaatatgcccatttcatagcaatggcacacccctatacagtggagcaagtagtggaattgttcatgaacaacatacatagactacatggaatgcccatggccatcataactgacagagaccggatttttannnnnnnnnnnnnnnnnnnnnnnnnnnnnnnnnnnnnnnnnnnnnnnnnnnnngtgcatggggaagtgcatntcaaggagcggg

SEQ ID NO: 15830 - DNA, 896 bp, Oryza sativa
  unsure (1)..(896): unsure at all n locations
gtgtgnaatgataatgcctcgccnnnnnnnnnnnnnnnnnnnnnnnnnnnnnnnnnnnnnnttgcttaataattatttccggtgctctgaaaattcaagtaaaatttgaggactccttttagaccaaggagaatttaacaaaaattctccgggccacatttaaatttttcttgtacgtattttaatgtttgccaatttctttttcgaattttaattaattctattattccttttagcgaatgaattttaattttgggatgaatttatcaggacgtgacaacaattgatgttcccgcaactttcccaataccagacggagatggtgctgatggtcttcctctgattgtgagtataccagaatatcatcaatgaaaaccacaacaaacttatccaagtattccatgaacacttggttcattaagttcatgaaaaggcaggagcattggttaaaccgaacgacatcaccgtgaattcatacaatccgtatcgcgtggtgaatgcggtcttcggaatatcttcttcacgaatacgtaattggtgatatccggaacgaagatcgatcttggagaatacagtggcacctttaagctgatcgaacagatcatcgatccggggaagagggtacttggttttgatggtgacttcattgagagctctgtagtcaatgcacatcctcttcgtcttgtctttcttctccacaaaaatcacaggagcaccccagggggaagtactcggacgtatataccccttttctttcaactcttccaactgtttcttaacttcagccagttcatttgctgccatacggtagggtcgcttgtacagaggagtggtttcttgagcaagatctattcggaactcaatctctcgtttgggcggcataccccggtagtctt

SEQ ID NO: 15831 - DNA, 6483 bp, Oryza sativa
ttctaatatcctttaggggtaattttggtagggggtgttttgttcggtgcgcatcttcggttcgcatcggttcacatcgaggtgtggactccgtcgcgctattccttccccggcgtcaccgccttgcccgcatccgtccgtatcgctcgccgtcgccgccttgtccgcctcctcagtcgccgtccctctcctccgcccgcgtcgccttatccgcccctccgtcgcagtccgcctcccccgcccttcccgccctcaccgctgtctccagtccctccggcgccgtccgtcggcccggccatctccccctcccccttcggttcgcatctggtcggaggcaggcaccgcaggcggcagcgcgcccggcggctattcctcctggcaggcggcgtcacggctggtggcgcggtgcgtcgcgtctgttcgacgcaggcggcggcgtggcctgcggcgctggtagtggctgggtgcggcgaaatcatcaggtaggtagtggcaatcttgtttttcagttcaatagcagttgaacttgccgaaatgggactaatgtgttacctgaattgctgaatctaaatctgaaaattttcttctggattttaaaagctattgtttttgtaaataccatcggattgatttagtacaataaattaagcgctcaattgttaaatagtctttcaaaatgattatgcagtctcttttcttttccagacatgcatgaatctatggttggcttaaaaattatagttgaatgggcacaacattaatgttcactgtgtacaaaaaactgtggttgtattttgaattttgtacatgatccacgacaggtaatctgcattggttatttggtatatttgtggagcatattatagatcaagatatatgtgaactaatagcattttaaaattaaaatttgtccagatcaccatatttgcatgaatatttttccttcaaagttggtccattttgttcagacaggacaacattgcacttcattttttttttcatattatggttcaagtgcagatattgtggattgccataacactatcaccttccaagtgcaaattagcactgagatttctgggttgatcagtcgttgtgagtatggtattttgattctatgttcttctatgattaccaggctctggaaggatgtaatctatgatatatacaggtggtgatcatagcatgatagcaatcaaattccacagtgttggtaggaatgaaatttcaaaggttgtttgttcttgaatccattgtattgtatattgattatttgattgaatggttgggagcagggtcagtttgcaagacggtggcatgcgcgaagggtggcatgcgcgaaggggatccgcatgccggcgaaggggttatcggtgtcaaggtgcgacattgtagcagacgcacgtcggtgacgtcgacagctgactgcgctgagtcaccacgaagcgtaaggattcatataccgctccttctcaaatggattgaaatatgaactatgaatattatctcaaaaaggcatcaatgtttgggatccaaaaaatactcaagtagtatataaattatttaataagggtaagagagcatagtaaggtaattgtgataaatgtatgacagatgatccatttatgtcgtggttggtagcagtggacgatctttaatgttgttcagttcggagttgatcaaaattccggctaagtcctgtcgaaatgttttcacttccttctgcataatgtaaagggagtgcattttaaatggtttttcgtattgggaagcagtggtgcaaaatatgaatagaggttgttgtagttacctgtagttgaatttttgggagataagatccggtccaatgctccatgaacttaagggtgtacaggccgcacgagacgctacaagaatttagtcgttaggctaaaatgtttccgtaattgaataatgtgaatatcacgtggaagagtttgagtcacccaccagtctccttgctttggcaatttttggactttgttgtagtcccattcggtaattttgaaatcaggccaatcgtgttttaactgtgggtgctgattctctgtcccgtgtaatcccctctcgatagctagcagctgggaagttttgtgcaacgttggtacggttaaaatatagcaaaaccgatttgaattatacaagtggaagtgtatcgcttaccacacgccttagatcgggtcgatctttactgattggctttgcgagcgaatctagtatttgcacctcacgtcgcttggcgttaagaacggctaggtaccagtgtgtatctttaatattaattgggaggaaaatctgcagatggtcaacagtaagattgagtcataaattgaaatccccattacatagatagcttaaataagtattaccatgtcaaatgctagatagtcgcgtgccatatctctaatccatcgtttatctcgaggttcgcttgcttcgatatgcgctccctctacatttagtagacctgttttaatggccatctctaggaaggccttgccatctcccctgattcctttctctttatagcggaggcattggatgtatgcatccatgacctgaatttgagtttagttgagttacataacaaatatagttataaaagaatagtaggcttgttaaataggcgaacttacatcatcattcaagaaagctggttgtgttagtactttcattcttatccgtttaacctccacttcttcaatatgcaccatcactttgttatcctccgtgttattaatgtaggtaatgaacgggtcttctttttcagtcaactctacgaaggtaggacaaattagtaatagatgtatagaaatgttaaatggttagtcattaccttctgaattttttaacgttgtttggccattcgtttttttcttcttttgacctcgtaaggcgttctttggtgggcctttgtctatgtttttttgggtaagatcttccttctcgatgtacactagaaaagggtaagtcaaatcagtaacacataaacatagaatataagtaaaaaattaaggatgatgtagagagttcatacattcggatatttcattcggtgtttgattgtcttgtttcctcttcttttcaccccgtaattcgtttgtgtctggcaaagggtaagtcaaatcagtaacacacaaatgtagattataagtaaaaaattaaggatgatgtagagagttcatacattcggatatttcattcggtgtttgattgtcttgtttcctcttcttttcatcccgtaattcatctgtgtctggcatgtaagcttctttattcgtttgcgcttgaaaaggagtaaagttagtaccattgacatgagcatatgtaactatgaaatagcatagtacctattgttttctttgtctgtgcttgggttttgattatgtcctttttaccccttgtttcgtagatgaagtcagtccgattagttggtttgtatgttcttcctgtaggacctgtaagcctcttcctgctttgattgctctggttacttctgtcctgttaggtaataaagtgcacgttagtattatgataagttgtagtaacgttagcgagagaaataaaattctgtttaccttcgtttcacaagtcatgtttacattttggtttatataggtctcttcgttatgatttgatacatgctccctgggatcaatttgttcttgttcaacatcctgcaaaagcatcaacctttttttagcggtgttatgtaagtaataatgattaacagtgtagcatatgatctttacctcaaacacatgcgtactatcttttcgatctgggcattttgaaccattttccatgcaatctagtatcaatgatcgcatacgtggccaaaaatcctttgtgaaatcgttgaaattatcttgtaaagtttggatgctttcttgtaacctttcttgtaaagtgatgtcggctgattgttcagtggatgttatagagtgtacctgcatagcacaagtgagaaaatgatgtcgaacatttttttgttaaatagagttcgtattaaaaccccataatatatacctcttcagaagtgccttcaaaatcttcattgctacgtgtttctgagtcattgtcctgcgctttttcttcggggatttcattgcaatgtatagttcccctaatgtcgttgacaacctatttttagtgaaaaaggtgtattagagattttacagacagttgatataattagtacatagtattaaaaatgagatagttaccttcccttgtccaaaaaggtaagaaattcgctttttttctttttttttatcccagtactgaattagtggcctttgacggctagaatgatatattgtcgcagccaatttatctattcgcactttttcccaataccaaatctgcaagcatttgaacattagataatgagtattgctatgaaaatatgttcatgacaattttgtaaacatactaaattttgaaacgaacctgtaagaggcatacgttcccctcaatgtttgttgtcttctctctaaattttattatgcctttcagtaactgattcagtgttagactagaccagtttagttccctcattttgtcaacgtcgtcgacgagattgagatattctgagcgcacatatctttgagttgtaggacatatgaatgatccaattgagaaaagaataaatcttcgaatgaagtggtcatcgtagctcgaggagttgattattgcttcccgtaatgcttgtaaagtaattgttgtttggccttcctttttgtacaggttgaacaattctggtttattgatttttggtgcctcaaatatgtcatctccttttgatggcagtccaagcaaacaatcaacatcatcgagtgtcatcgttacgaaggtaccattaatattgaatgctttcttctccttgtcgtagcttcttgcaatctcattgcacaagtttcggtcaatatgtatgttgtcaatctttagcaagttgccaagacctgaaccctcgatagcttccttttgacgtggacttagatggagtattacctcgtacatggcatgtggagagcaaactagagttccctgattaacagaaaagataataaaagtttagtccttgtgaaaatttatgcaagtgctcatatatacagcagccataaatcctaatggtgcactgtattgcacatcataaggtactaatccatattaattttcttaacatgagaaccaatgtgattgaagtgaacaccttattaccatttggggtcatataaatcataatgtactatattcttgctgatgtgataattatgcaagcatatattttttttgtactatatctttcttagtggggatgggcgtgggggtggggtgggggtttggctcgacagggatttctgaacatataggatgaaggtgttagtcaatataagagtgcgtaattggagacaaagcattaattggttcacgggaaaatcagggttaaggttgtaaatgctttttgagctttcatatggtgttttcttttcttgtgtctgtggaaggagctttcattggaaggtattagcaatgtaaatgtatttcatatttatctctgcaagattaataaaagattttatatactaaagtacagttgcaaaatgggtataatcatagtatacttctgtcctgtttttgcagttccctctagtatgtatgtgtggaacaatacgaagaatggtagctgaatccaaggatccagatctctcaaagttggagcttgtacatgtaccagggggagctttagcatttcaacttgctgccaagttctgttatgggagctttagcatttgtttcattcactacacaattggttctatatacgctctgttaggtgggaaaatcagctatatgttgggtaacaaaagtgtatggtgctgtagtaggagttatacctgacccctttaaactgttgcctgtattatcccatgtagcaggcccgtattttttgggacatctagccatggtgttttgtctgtgaggctgctacgtcctctaaacatttgatacagaaactagccagagctcaaaagaggcacgcaaattcatcacgaaagagactatcttcctaaataatctagacatatctgctatacttatcatagcaccttagatcggatgtattttttgcttgaggagtgtatgatttgcagtagtgatgtttacaagagctgagagtgaaaatttcatgtaaaaagacgtacaccctttttcttctgatggcttgtgccctgcatcataggagcagagtgtttatgcatgctcctaatgggggtgctcagaatttggcctcatgttgtacagaaaccgaatactgtctcatatatccgacatatatatatacatatatgtatatatatttaaatccatttaatttgctgcattacggtagggtccattgaacagaatgaatggtttcttgacaaggaatattccgaactcaatctttaatttgggcgg

SEQ ID NO: 15832 - DNA, 4437 bp, Oryza sativa
  unsure (1)..(4437): unsure at all n locations
gctgtgnaacggttagagctgtnnnnnnnnnnnnnnnnnnnnnnnnnnnnnnnnnnnnatatatatatatatatatatatatatatatatatatatatatatatatatatatatatatatatatatatatatatgtatgttacacctgggattagcttgttacgaaaaaatagaagatcaatatgatatacagttattagctattgtaaatccgcggctacgagaaacataaatttcggcagggaaaaataacagataattcggtttaaaaaagaacagataattcggcataaaaacatctgagcaaaattctgcaggaaaaaaaacagataattatgcatgaaaaaaattcagttagagtacggaaattctgttatacttctactacctaatctcagccgagttcggtagtattagttttaaaaacctcgtgagtttaaaacggaataaaaagatatcgttaatataacacaggataagttccgacaattttttatagttgtgcaaaataatccgttccgctatattatacgagcgatcgaccggaaatccatgtttttaaaaaaagcgaccgtccggacggtgcgatttaattttttatttgtccaaatttaatccgtgccgctataatatacgagctatcgaccagaaatccatgtttttaaaaaagcgaccctccggacggtgctacttaatccgttccgctatattatacgagctatcgaccggaaatatttgttttattaaaaatcgaccgtcccggacgtaatagttattttgtccgaattaatccgttccgctatattatacgagcgatcgactggaaatccatgtttttaaaaaagcgaaccggtccggacggtgcgacttaatcttttatgtgtccaaaattatcagttgcgctttaatacactagctatcgaccggaaatgcatgtttttaaaaaagcgaaccggtacggacgtgtaacaccctgaaaattcgaccggcaaaatcaaaactctaaaaatacggattttcaaaaactttttaaattaattgcatcatgccgatcttattcgtctattttatctggatttgatctcaaagattattaatcgtgagtaaagaatagttaattaggaataaaccttaaaaacaaattggtaaaataaatacaaaataaagattaggtgggatagaaataaataaaatattatcgcgaccatatttggatcaattaaatttaaatacgatggaataagaattaaccctaattaaaactcaaataaattacataaaaataaaatatgagtaatattaatctagggtgaattcattagttgagataatacacatattgagtaaacttcatttatgcaagatttagaaattatagaatcaaatttatatagaaaataaactaaaattgggaaaaataggaaaaaggcactattcattagcctctaggtgttcgacgaggctccctagccccttcccctcccctgccatgcgcgcctcgcgccccgagccgtcgccgtcgccgcctgccgccgtgccgctgtcacctgccgcgctgtcgccgtcaccgtcgcatccctcctcgtgccgcgtgccaccgctgccgccccgtcaccgcccgccccgtcaccgctgccgcgccgtccccatcgccatcccgctgccgctcgtgtatgtgcacttggtatttcagctatgaattcgtgtgtaccagactacttgatccagggaaatggtactgtttacacgattgattcctgttataaaaacgggggtctacaggacggtgcgacttaattttttatgtgtccaaaataatccgttgcgctgtaatatactagctatcgaccggaaatccatgttttctaaaaaatcgaaccggtccggacggtgcgatttaattttttatgtctccaaaataatccgtgcagctatattctatgtgcgctcgaccggaaatcattgttttctaaaaattcgaccgtctcggacgttatagtagttattatgaccgaaataatccgttgcgttttacagcgtgcaggtacatatatatccacagaaaacggaacaacgaaaacattggaatgctcaacttgagtcgtgcacggtcacatgttgatccggccggatgtagcggcaacaatacaaatagatatagattccaggaaaataggtatttgttattctgcttttcttgttgtctcgccagattagtttcaatcaagaaacttgccgatcgccagcagtctccggtgacgacgtcggcaacgacgcacccgacggggtctccgatcacgatgtcggcagcgacggacccgacggggtctccgatcacgacgtctgcagcgacgcacccgacgaggtctccgatgacgacgtcggcagtgaaccatccgacgggggattcttcagcggcacggtctagggccagtaagacttcgaaggatgatagcacttgcaccgtttcagatgaccccgtcgttacgggtgttatcgatgctttccaatctccaccgattcttcaaaaaactgcggtatttttgctcacattcctgttgtcatagatatttatttttaataactgtcattgtgtactccaattttttttttggtacatagtccgcacatctatatccatttttttaatcataaacttgtcaattatataacattgcaaatccatgtctaccacctctgtgttgtatccaccatattagccggaagctataatgacgtactgacaatatgaagcaaatgattgtgattgtttttttagtacgtgattttgtatacgggaataaatgaatgtttgttttctggttttgtgcatgaataataaattaatgtttttatttgttcaggtcactggattgcaaacacagattttgctttcactgggggacctttcgagccaaatttgtgaaacgcaaaagatgttgataaagatggcccatgataacactgaatttcaggaaaatatgaatgatagaatgacaaacgttgaacacattcaacagctacaattacagcaagtcacggtacattttctgaacatttatgtttgttttttccacatggcaaaatgctttgacacatatctttcttttgtgcaggatataacgcatggagaacaacattttccaaggaaaagatacatcgaggtcgagtatcctagcactataggaaagagggttcgaggagtcaatggtagggccgttgtaagtaacaagaaatttgattgttacaaaagatgcttggtagacggtaacgatgacttcgattttgtttgcactacggacgaaacacgcattgcgttgcgtatattgtgtgcaaagcctactgagacgataatccatattgatgacgtcgttttgacgaaggccgatttggtatgtcttgtacagacttatccgtatgacaattatgaaaaaaacattagcacaaaggtacgcctatgcactatttttgcaaaaagtaaagcaaaatcatctctaagtaatgcttcataaattgtattgttgatgcagatcattaaggcgtttgtcaagcattttggacaaagtagatcaattaaacgacataaacatatgtaccatgcctacttagagaccccgtcagttgtgtcaatgcttatcaagtatggctattatgatggtgttgagctaggaaacactgatgaaaatatgtacaaatccgctggagtcagctatgtgaataatgatatggtaaaatcataccttacaaatttgaattcattatattatttaactattttgtaaattgtattgatttgacatacagatttttctaccaataagaacttcaatagaccattggtacgtagcggttctggactgtaccagaaaggaggtgtgtgtccttgactcaatggacacgactgaagatgacttgaaagaacttaagtttctggtactttttccccataaagtgttagcattatcagtgcaaccaagtttgtagaatattaattatcacatatttatttcatgtagatgaaaggcatccgcaaatgtgtccgacttgtcctcgatgataaaatagtagagaaccctctgtgggacgattacaatgttcaagcttggaaaatcaggattagatataacttgcctaacaaaaaagacaggttagatatttacaaccctgagagatgactttgtaaaaaaattcatttcggaataattttacatctactcgtactcgtacaggacatccagtgggctttactcaatcaagttcatggagttatggacaggagattcgctaagcaaacaattttatcaggtatatatgttgtacaattagcacggaagcattcctatttatttcacttaaaactaataatattgtnnnnnnnnnnnnnnnnnnnnnnnnnnnnnnnnnnnnnnnnnnnnnagatgtcgaactcaagggcgg

SEQ ID NO: 15833 - DNA, 844 bp, Oryza sativa
  unsure (1)..(844): unsure at all n locations
agctgggatcgttatatcattgcgccctgcaannnacnnnnnnnnnnnnnnnnnnnnnnnnnnnnnnnttcagtgactcactacgttggttgctgcgcatacccaacaagtatttcccatctgtataggcagctgcccatttctcccttagtcggtacatcagagcgatccattgtccatttcccgtgcctccattctccttaaaatcagcccaacgtctctcgaactcctcttcatccatactctcataaattaattttcttagctcgtcgagttttggcttacgaaggtgacgactcatattctcctctatatgccaagtacacaatctatggtaagcacccggcattaccttactgatagccttcgccattgctaggtcgccatcggtaattaatgattttggatgcacttgacgcattgcctccaaaaaagtctcaaggagccaacagtaagagttgacagactcatttgatagaattccgcacccaaaaattgttgtacttctgtggtggttaactcctatgaaaggaatgaaaggaagattgtacttgttcacacggtaagtgctatcgaaaataacaacaccaccaaaagcagcatagtctaaacgtgattcagcatctgcccaaaacacattcctaagacgcccttcctcatccgtggtgtatttgaagaaaaattctgcatcttcttcttgcttccttgttagatatttcaacacatcttcagcatcatgacccttgatattcttcatgtcgtannnnnnnnnnnnnnnnnnnnnnnnnnnnnnnnnnnnnnnnnnnnnnnnnnnnnnagccataggtncttcattggcacagct

SEQ ID NO: 15834 - DNA, 1082 bp, Oryza sativa
  unsure (1)..(1082): unsure at all n locations
ggagtttatccccattgactcctctcatttccccataattttccccttgaatggtgcccccaatcgccgggaacggccgcgccattcccggccgccttccattgccgcaggccggctttcccgccgccgttccgacctcccccgtggccggctccctcttctctcatataaaataggatccccgcactccgttctaccgttttaaccccatcccgagcctccccggggtctctagccccatccccgccgtcgccctctctctcccacgccgccggcgacctccagccgcctgtgccgcctcgctcgtgcgccggccggccgcgccatcgcctcctccagcgtcgccgccacctcctccacgccggcctgccctccgtttcgcgaggagacccccggaactacgttcccgccgtcgccctcctctttcattcgcgccggccacctccagccgccttcctctcctcgcccgagcgccgcccggccgcgccgtcttctccctcggcctcgcagctgcctcctctttcccgacttcgcctccgtttcgcggggaaatcaccggagacgcgtcctcaccgacgactagtggtgtcgccaccactccaccatctccagccgtcccggccgcctcgcctgagcgtcggccgacgtcaccgtctcctccctcggcgtcgccgcatcgccctccaccccggctgctcctcggttttcgccggaacgccgtcgccgcgccggtctctccatcctcttcgtcgccggcgtcctttcggccggcccttcctcctccccggctcgtcggcttgctgcaccactaccacctccggcatcgcagcggcaaggcccgcctcggcatcgtttcccctccatccaaacccctccgtggtccatcatcatcgtctccgaccgttctcatcgtcgacgtcccgtcggtcgctcggctcgtcgtctcgcggcgccgccttcgtcatcgtcatcgtagcggcgtgttcctcgtcgtcctcgtccccgtgcagccgctgccggctgtcctcgtcaccttctcgccggtcccggacgtcgacgtcctcgtcctctcgtcngtcccg

SEQ ID NO: 15835 - DNA, 4713 bp, Oryza sativa
  unsure (1)..(4713): unsure at all n locations
cgccgtgnnaacgtanagtcgtgtnnnnnnnnnnnnnnnnnnnnnnnnnnnnnnnnnnnnnnnatcatattttggtcatacgaactcccaatcgacccgttcaagtctcctaatgtttgttataacctaaagaaccctgggctttctttttatgtattggtattgcttctttataggcttgtagctttgcttgtgtgcttcgcgtagcttctgtcgttccggaggttcccgaagcgtggttcggggtcgtcgccgtaggttcggaaggccgttctctctgagcaaggcaagtcacatcatccttgagcatattgaatcccagtttacaaaattatttttaatttaaattaatgcattatcgctttgtttaaattcccgcgttatcactgttttatttagccatgcctatttacctttgttatgaccttattattgctattgttattattattaccttgttcaccctagattaaacaaaacctcaactagtgggtactctattcatggttccactagtatgaatttaggtagatgcttcgcggtttgaattagacaacattaggtggttttacaactttagacttgggaaattctcatatcatttggacactatggaatggttggcttatgttggaattggacacacacctctcttcctctttcaaaacccctaaaacctgttttcggtggggtttgggtgcatgccagttgtgggaagtagcaccccggccactataaggattaagctcgggcctctgttgcaaagcactaccgtacttccacatgtctaatgggtaaggcttagtttgtggctcagtctagtcataaacaaaagtacacggattggagatggatgaagtcgggtgtcgatggacattctccagggcaaatgaaggctacacgagctgcggcccggtagtcgagatgtcatacggcagagggttggtgccctgctgctaggggctcagttctgcctgcctgtcccgggtatcccggccgtaggtgggattgggtcggtactcttgtctaaggctaggatgggttgggaactatgtcacatctttacgacgggttccaaggccatggaatgcggagtaaagatgtgtcttgtgggtaaagatgtacacctctgatcagagtaaatctattcgaatagccgagccctcggatatgggcaagccgagcaatgtacccaagtcagtgttttaattcttaaaatttgctcaacaactaaaatatggaatggttggcctgggttggcttgggaggagctgggacccaggtcgggttgccagttcggtccgaatcatcgcaggccttgggttaaggcaggttcgtgagggttcacggccttgtttaataatactgtgtagctctaggatcgtctttacaaaatggctttgggtaactaagtggcttttaaatgctgtttactgcaaaacttaatccctatattattattcccttgtacctcccttgcattaattatgcatccccggtgtggcttgctgagtactgtggttgtactcattcttgctcaatctttccccccttcagtaagagaagctttggagaagatgtcttaggtggagtcctggcttataccccagttgagcgcctgtgaagatggagccgtaggccgctagtccgctgctgtttatttttgcttgtcaggcctgaagtgcctttgtaataatgtaaatattatcgatataataaagatgtgtcttttatatcatgtttgtgtggtgtaccccggcttttcctgggacggggattaatacactagcgttcgggaaaaggcaattttcccggtcgcgacaagctggtatcagagccaggttgactgtaggataagccaagtggataaaacccaaggacatattttataaataaaaattatttgcgaaagttcatttttctccttcccctaatgctgtttgcaaaaggtttactccgttcttccttcttcggattttcaactagtactagatggtcaggtcagtgaagaagaggacatcgtcagttgtttgccgaagctccagaagactgcaggatctgctagtgaagtggaggaagcagtgaagccagctgtgaagcaggagtgaagatcttggagaacccgtcgcagaacctaagccaccctctagtgtttcgtttgtagtgtgtttccttgcttgtgtgtgtagcgcatggtttgcatcggtgggttgtgatgtgaccatgctaggttgtttgtttaatcaacttgcagaataagcaaaacaaacaacacatcaacaaaaagagttagttcctttaaggtcttgtcccaagctctggtctattctttccttgtaggcttcctctctcaacccctaccttgtgacagatggataacattggtaacaaaggctatgggaatgatggatccgatgactcaagaacccaagccaatgggaatgagaaaagcctcaacgaaacctcaccagagctaatccaaattgtggttaaccaaaccaacatgttggcaacagcctttcatctattacagaatcggaacatcccagcaggggcaaccaacgttcaagtacctacagtcccgcaacagtgcaagttatcagaatttctcaaaacggggcctccaacctttgccatggccgtcgatcctatggaagccagtgattggttgcgcacagtcgagaagaagctagggttgattcagtgcaccgaccaggagcgggttggcttcgcaactcatcagttggttggaccggcttcagagtggtgggatagctacgaagcatcacggccagaaggacataccatcacctggaacgagttttcatctgtattcaagagatcacatgttcccacaggaatgatcacactaagaaaacgagagtttcgctacctgaagcaaggagatttgaccgtcacagagtacctgcatgagttctatcgtttggctcactatgcaccagaagatgtggaaacggatgaagacaaacaagagaagtttctccaggggttaaaagatgagcttgcagtgcaactacttctagaggattatgaagattttgagaaacttgtggacaaagccatgccactcgaaagtgagcataatcggatgacgaactgcaagagaaggattgtcaacatcccagtatttccaggtagtaaccaaagacagcgcactgagccacttcagatcaccggatcttctgttgtgcatcaagagttcctgccccaagaagatgaatgcaatgcagacatcaacactagcaatactaataatgatgacacctccaacaaccaaggttctggccccattagtgaccactcgaataaagcgtgcaatgtcagtagcattcaccaagatgtcaacgatagtatcaatgttggaacccagaatgacaaccttagcaattttgacactgagaaagactccaatggtgatagcaactatggtaccactgatgccaatgttagcaaggatttccaaccaccaattccaactccaagtcacaatgatcatccccagatggacagctcagcaaagaagacgttgatttgttacaactgcaaagaaccaggtcatttctctagagattgtccacagccgaagcgtaacttgcgccatcactccggccattatgcaagaagaagacaggtcactcgccttgtggtcactggagcaaacgccgtacctgtgaggcctcatgttaattctaacccatagaggaaacaatgtaccgatgttaagcacctccctttttgtttaagacagtgccttgtattcatgtaatatgggagagatttgtaataaaaccaagttctaagaggattcttttggaagatgcggatatgtgatcatgtgtataattgtttactgacaaaggagactagggtctcgtgccagaggaactatattctaacctcgagctaataaccaacctgaggatggaaaagaaaatcaagcgattaccaaagagacatttgtggggattaagagtttcagatgtgtcttttcggatcaaagacaaagacagtcagtacagctttgggcaaaacacttgaaggtttcactgaaaggcagcagaccaaaggaccacatcgtcaccaaaagcatccacaactcttggagtgaagagtacttggttgacaaagttcaaaaggttattgatagaagataccagcaaaggtgtttattatcgggcaaagaagtaggtcgaaaggtgattgataagagaaatctgaaaagaacacatcaagggttaaatgtgtaaaggaatactttgaatgctaaatgatgacaacatgaagagaagattccatctgcaacagtggatcgagccaagcagtccagagtgaagaagttttgttaggcaagtttgttatagaagacggagcggaagaagtcagacaagaagagaagaccgcccaacctatcttcttgctagcctcctcgaatctcggggacgagattcttgtaaggggggtggatttgtcacgtcctgataaattcatcccaaaattaaaattcattcgctaaaaggaataatagaattaattaaaattcgaaaaagaaattggcaaacattaaaatacgtacaagaaaaatttaaatgtggcccggagactttttgttaaattctccttggtctaaaaggagtcctcaaattttannnnnnnnnnnnnnnnnnnnnnnnnnttacaatgcgtctctccgtt

SEQ ID NO: 15836 - DNA, 856 bp, Oryza sativa
  unsure (1)..(856): unsure at all n locations
attcatgcatttccattccgccactgaaaaggttgaaaagtccggcccggtcgttggtgctttgccttaaacgttggcacacatcacatagacccacaaactctgcaatttcccgcttcatgttgacccaccagtatttctccttcaagtctaaatacatctttgtactgcccgggtgaatgaaataagaactttcatgagcttcctaaagtatcacctgtttaagttctctgctatctggaacgcatacccgctttccgttccataaggttccgtgttcatcctctgtgaaaccagcggctttaccctgtttcatattcttgaggagtccatgcatgtccggatcattcttctgagcctcgcggatttgatcgagcaaaggtgggcttggcttccaacgcggccaaaaatccacgaccaactatgtttcttaactccagccagttcatttgctgccatacggtagggtcgcttgtacagaggagtggttcctgaagcaagatctatccggaactcaatctctcgcttgggcggcataccaggtagttcttccggaaacacgtctccgaactctctgacgatggggatttctgacagacttatctgatgcagttataaacttctgacaaaggttggaggtgcaaagaaaacaaccggttgttctggtcctcggtacagagtaacagtgcgtctcgggcaatccactactctttgaaattgtgccagccacttcatcccaaggatcacatccaagtaaatgagtctagaagaatcaggggttgaaatccaaaagctggntcgtaacgtaccgtncctgaaccaaccagnggtngtcattgcaaggcattcatgccgg

SEQ ID NO: 15837 - DNA, 912 bp, Oryza sativa
  unsure (1)..(912): unsure at all n locations
gcgttccagttagcnatgnnatgaacaacccctgcttttggtctnnnnnnnnnnnnnnnnnnnnnnnnnnnnnnnnnnnnnnnnnnnnnntaaagctgcagccatacagacaaacagcttttggaattcgcggtgcacttaaattacgatccaagttctatggacctttcaagatcatggagaaagtaggaagagtggcatataaactgcaattaccagaagggagtaacattcatcctgtgtttcatgtaagccaattgaagaagcacattggttctagagctgtaccaatggcgaatttgccttcagttggtccggacggacagatcaaaactgaaccggtggctgtgttgaaaagaagaatgattcccaggggaggagttgcagtaacacagtggcttgttttgtggcacaatctaagtccatcagaggcaacatgggaagatgcttcgatgatacaaagtatgtttccgtcttttaatccttgaggacaaggatcagctcaaggggaaggtaatgtcaggaattggacaggagaaatggagattctgaaggatgcagaagttaactaaacttttattcagtaaatttcgtttagtgttactggaaggactgatctgatgaagattggacggcccaggagacacttgaagcgttatgaaggcaaatcccaccgtccatgtttcccatgggaccactgtagacgtcatcattggcgttttctctgaattttactctgtttttccgctggaatgcaagctgtcatcgcaactcatgtaaacctttaataatccgggggaatgagagaggaatatattgaggaccatattatactttgtctagacttattgtgagggggaccccacaagtttgtcgccgtcactaaatgagagctttcttcgtgagaacaat

SEQ ID NO: 15838 - DNA, 8657 bp, Oryza sativa
cgtcctcgtggtttgttggtgatgcggctgacgacccgcgattaatgccaacggtgggcctcctgttttggtctgtcaccttgggccattattttttttgcaaaatagaacatatgaacttgtgtgttttttttcttgtgggttcgttttatttaaggggccaccggggccgatgggtagtgatcagattcagagtcttttatccctatgccattaagaaagttggaggttacgtgtgtgccacaaaaaatttttgagtcacttgtatgccatgagacaaactttcttttacctgtgcaccactttggatggaatcagcactaacggagactaacggaggtttgaaagatctattttgcccttgctctatttcagccactttggatggaacatttggaagagaaatcggcggcggcggcagcggcgactagaggcgcgctgccggatagacgaggcgaggcatcggcggcggcgtgccggcgacggcgaggcgaggcggcgtgccggtgacggtgaggtgaggcggcgtgccggcgacggcgactaccgacggcggcggcggctagagaggcggcggcggcggatagacgaggcgaggcggcggcggcgacggcgacgactggcggtggcggcggcgtgccggcgacggcgtgctaggctagggcactggagaaattgcacgtgagaggagtagtgagatgaaaatgcttcaggggcaatttagtcattttcatacgtgggtcccatatgtcagagctcattctctaacagaaggtggatggaatggcacacgggtaaacgaaagtttgtgtcatggcatacaggtgactcaaaacttttttgtggcactcgcgtaacctccaactttcttaatggcataggggtaaaagactctcagattcaccccctccacttggtttccttttctggcaccgtattactttcttattttggtaaatttaagcaactaaagtttatacacctcaagtttacacatctaaagttgagagaccaaaagtagattcaaatttgaatttgaattcaaatattttttatatatagtatttctatacatctaaagtttatacacctaaagtttatatacccgtttcaaatttgaatttgaattatataaatttgaattcaaatattttctatatatagtatttctatacagctaaagtttatagatccaaagtttataagtcaaaagtttacatacccgattcaaatttgaatttgaattcaatttttttatatatagtatttctatacataaatttttctaacttttgttttttttaaaaaattttgtggtgtactgtagttgaaagagaaaggggaggaggaaggggggaagagggaggagtatagggggaggggagtgcgggtgatcacccgtgcattagcagttccaggtggcaactgtactgcttttggtctcttgatagcctaaaccagagacccaactattttcataactagtatctcttcctatgtggtaagtatacaagcatgcaacagcaaggaaatatagtttaatagttaaacttcaaatatactttttctttcaaattacatatcatcccatctacagtccgattataccattttattcgttgtaattaaatctttataacaagatcttatatgaatatattctgatgaaaagaaatatatatgttgtaaattacttttattatatatgtaagttacatttatcatatatacatatacttctaagtttgattaaattacatcactactagaaaaatgatttttcaggacggtaccctatttttttcgctggcggtgagtttagaaccgccagcgaaaatccgtttttgctggtggtaggttaaaagatccgcttgcaaaaataagcctattttagctggcaggcctcttaacctaccgtagagcccgtcaaaaaaatcatgcgcacttaaaaatatcatagcctattaaaaaatcgccacccatcactccttatccacctacccatccttatcctctcgttcctcctcctccctccagatccaccagacagcaccctctcctcctcccttcctggatggcagcagttgttccttttggtggctccggtggcggttctggtcctcgggcggcggcacgcggcggctccagcacctgtgtgtggcggcgacggcgacggaaggcgagcatctccagcggtgccgcccaacctcggttgtcttgttggaagctaataaggaggccttcttgacaagcctccctcccctcccccttctctttccttatccaacggaagcaagtgcccccgtctgatagtggaaaaaaacggaccgagctagctatcctgaccggcctcgctcccactcccccttctctttccctatccagcagcggcaagtgcccccatcccatagtccccctcccctcccctttctcttttcttatccagcgatggtgagtgcccctgtcccatagttgaaaaaatcagaccgggtcgtcagttcgactggaaaagtacggaaccagaagtctccatagttcggttacgcttaaagatcagacatgcattcgacccagattgaaccagccgagtttagactaaaccgcgcaataaggtttagactaaacggagcattaaaccgtcttggtcggacccggcattaaaacaccttggtcggaccgggcattaagcccctttggtcgaaccaggcagaggagataaatgggccaaattaaggcccattccattgcctttagccccgtactactgtttttggttttcaaaaatcatagaaaaggcttgtggcatggggactcaaaccgggatctatgcgttgagagcggttagctctagccatcctacccttgttcccttatgttttagagaaaatacacattatatatttggaaccaagggtcgcctgggtcaatcaccggttcccttttttctctacggcacatcccaccatctttcccatgtcctaaccacaaagctctggtttgcccccgccgcgcaccattgctggccagtcgcgttgctccatccccacggctctaactgctcaccgcctataggaacgctgcctcccacaactatccctctaagccctcttccctctcccttgcctccattcctacctccaccccaacccgggatcctaaaccctaactcaacatgccggcgccgggtgccgaagattctatagagctagaggagaacgagttggaattgtcggagcacaaattgtgacacaaatcccaaggtctgattgtgacacaaatcccacaattttctatcaacagccatttaggttgtgttcgtttgtactgattgggaaccttcccttccagcatagaaaatggaaaagcacattagcacatgtttaattaagtattagctcttgtacattctttccccatttttttaatatagcgcagtagaagcctctcctgctgtttaaccgtaaaaaaattaagtattagctaaaactaacttgaaaagtgaattaatatgatttttaaaagcaactttccaatagaatttttttgcagaaaacaaaccatataatagtttgaaaagcatgcacgcggaaaacaagaggatggagttgggaaccattgcaaaagaacgcagccttattaattccattttgtttagtaattccattcacggtgctcacagcggcccaattagattcacgggtattgaaatggagacccaattttttttggtatatgtatgtttataaaaaagttaaaaatatatataattagtaaataaacctgtctttctaggcttggctccctctcctatgagggtccaattcacacaacttttatggcctaataatgtgattcgtgaaacaacatacaaactgtcaaagataaatttcttttacccctttctactttgagtacgcttatacgcaacctcaaaatcgtgggccctcccctgcatgacgtgatttttttgctgcttgcattgtaatgattttccctgggaaaactaattaagaggcagataaacaaacacacacttctctaattaaacaacactgatacactcttttcccttcattttatgacaagtgtgcttcaatggggcaaaaagttataagacaacaacttgtgttaccacatgtgtactctagtacgttttaagtggatggtttctagctacgaaaagaattggctatagttttaaggcagccagagattattaatggctgagatgcatgttgctagcttctacacaatccgtttcagaatgtttgaagcgttgactttttagtatgtatttaacgatttgtcttattcaaaaaatttaagtaattatttattctttttatatcatttgattcattgttaaatatattttcatgtacacatatagttttacatatttcacaatttttttaaataaaacgaacggtcaaatatatgctaaaaagttaacagtgtcaaatattttgaaacggagggagtatatatttgttggaagtgaagcatttccacttatgattcactcggtcattgcatccatcctaccatacattctatatatctatgtttggactgggaggtcccaggaattgttgtgctgcagtgacgccacgaaatctgtcagttttcttctgatagtttacaaagttctgtggtttcaccactccgccaatgagaatgttgacttaagggcagggtttgcaatttcgttttgaaatttcggtaattttgtcccctactggaaagctcacatctcgcccgaaattttcggttttattttttttttgcaaatttttctgattttggtcaaatttaattaaaattcattaagacagtcaaaatttcaaataatttcagctaaaaaaattcaacatttccaaaattttggtaatttcggtcccccgggaaagaatttcgaaattgaaagctccgacggcaccggcgggaaagaagtcgcagtctactccagctgctttgtgcaactctgccgtgtactagctagttgcacattttgttgctgcgctgcatagttgctttttacaacaaagatagacctcaaattaattgacatgattcagtgtacatactcgaagtaagaactgatgaatttatattttcggaagagtatttttttacccagcatatacatgtggatatatgcagccatatgcagccatttaagttaggaacttagtccttcaaataacccaatctgaaattcactcttacgtagatttgaactcaatatcctggggtgctacgcaggtcattacgactactcaaaattaatatacatgtatgtatatattgtactatatctgtgcctgtttggagcaatgaactagggtagtatatatgctgggaaggttgtgcatgtacttaaatcaaacggttgaaatgattgttagtaaaagtttaacaagaaaaaaaattagtacatgtagcattgctctttgtataataagtccgaaatatatatctaaaataaatttgtcttatgttacctttttgtttatactggttttatttagagcaagggacatcgacatagtaaacatacttatcttgatttcatatatccagttattctaatgcagctcagctggttaggttccgtgcctatacaggtttaggtcatagacttagtacgagttcttgcattttatgactatttgttgtttcaatgataggcaacctaccaatctttatcagttcaaatatatgcctaacggcctagtcttaaaaagtgccagtgtgtatatttataggagtgagtaatatacgcgcgtgcatataagcatctataactatattgagtttcacaaacaaaaaatatagcaaaattattgtctttacttacccatgttccaaaataaatagattcctagtatctagaaaaagtataatgtgaggattataaaagaaaaacaaaatgctccgaattaataggaaagtagtgctgaacttgtcggttaacagagaatacatatctgttcatctaatttcactttttattctttccattctatagaaatttaggtattaattttccttgtttgaagtaaacattctagattgtatttatctagagactttcgattgtcctaacgcaatccttgttgctgctatattttttttccatttaatttcactatttttttttctaattttctagaaacacatgatgctaacatgaagtgacttttcctcgttctgagtaattgtagttgaatatttatctctatcccaaaaattcacgaatatttgccttgggcccgttcagaacaaaataattcaatattaatattccaatataaaaaatatatattgcccttcaacctataatttcatgatatatatccttcgggcttcagccaaactttccttgctacgaacctttgagaaaaaacccttgaatattgttctccatgccatatttcacaacaaccagcattggcatcattgcggataaaattcacgaatgtacacattaggacaaaaaattcatgatttttaaacatttctccgacccaaaatttcaatagtattagccttgaaacatttctacataaaattcgtgaatgctaaccttaggacgaagaaaattcaatatttttttagcctttggcctaatatttcatgatcttttggggaaaatgcataaatatttttttcactccaatatttcatgagtatttgcactgggatcgacgcacataaaattcatgaatattaaccttagagtaaatttcacaaaactacaggtactttggtcaaattatcacaaaactacagatttaaggtgatgtatcacagaactacagatttaacaataaatttatcacaaaactacaggtttaaggctaagtatcacaaaactacagatttaataataaaattatcacaaaactacagattttgaggctgaaatccttagcactaatgttatgttggacttataattgatcaagtaatgtgattaaattgtcattaaacctgtagttttgtgataactttgttactaaatctgtagttttgtgatattacatcttaaatctgtagttttatgataaatttagcgttaaatctgtagttttgtgatatatcatgttaaatctgtacttttgcgataaattgatcaaattacctgtagttttgtgaaatttactcttaaccttatatcttataattttgtgatttttagccttcagcctataatttggtgagttatagccttcgaaaaaaattgatgaatatcaaacttctgaaaaaaaaagaaaatcttaaaaaataccgctgaaaaaataaccaccttattttttaaaataaaattggtagactcattactttataccaacttaattgttcagtggcgaaccaataaaaaattatgttggcactacgcatacaaattatttaattattgattgatatattaattaacatgacatgaattatctattattatatactaaaatttcattaaatgtcctataaactctaaacattcctaagccaccacatgatgctctaataaactaaagtaaatataagagattctgagaaaaaaaatcgtattacccaaacctatgtaccttattttaaactattagatctatatattaaaaagattattgatcgataagaccgtcagatttcatatgtacaatgcacatatctacttccctcctcacggacgagcatgtatccactttcttcctcacggacgagacgagcccataggttgtcgcctctttttctccatacggcaattaagttaaccgctgaataaaagaaaatcctaaaaattactgctgacaaaataaccacctttttttaaaaatacaattggtggacacattactatgtaccactaaacatgtgacgtttttctaccatcttaattatatctctcaacgtgtatatgaggtctatttaactatagaaataggtaaagctaaatcaatccacaaagatacaaataaatccttctacgaattaagctctttttaattactatcttctgcctaaaatggatcatataattttataggaaataaggaggaatgaaaaaaatactaagaagcccaacaagggatattttgccctcattcaataagtctcattaaatagggtagttggcgaattataaggtggttaaagtaatattggataaaaattaaatgagagatggttggatggtacgagtagtatttataatcccttataatttaccataaaatttaaatatttcgatttatggatggaggtaggagaagcaaacaagagtacgtgggtatgtcttaatttaataaattagataaagaaatcatattaccacatttttaataaaaaatttcttaaacttatatatcataaaatctaaaaaacatttttagtataaaaaatatattacgggtttaattaatatgatattttttttaaaaaaattaaacacatgttatataaattatagtttcatatggaaccaagtggttcatttcttgggacatattacgacatgaattaaagtaatttaagttaacaatttgtaacaacctattatattagaaccccacaagcttacttaatcaactaaggccgccactttaaaaaataacccacttacattttggtcttacttggggtaaaaaatt

SEQ ID NO: 15839 - DNA, 8075 bp, Oryza sativa
  unsure (1)..(8075): unsure at all n locations
agagactttnnatggagttgcacatccacatgcnccnnnnnnnnnnnnnnnnnnnnnnnnnnnnnnnnnnnnnnnnnnnnnnnnnnnnttgccagaactttgtggaacatattgtgaattgttgctaatgatcgctcaaatctgtcctcaacttgcctaaccgactgggagccccagccatccaaagaaacaatcctaacgcctcaatacttttagatttcatgctagacttgagctcatacttgtcgaccaatagatcatgaagactaaagaacatatcagaggtcattctaaacatgttgtaacaccgcttcctgtctgcaagcttcttctctacccattccaacgcactcattgttgtgctaacatctctatattccgactggttgcagtacctgtcaatgtggtttgcaagatgtaacgtaccgcacagaaacccggtggatgcataatcgtccataaagtactccatcataactctgccgaactctttgacggaatcttcatcctttgtatccacaggttggagccgcgcattctcctgtaataaaagtaaaacaacaacggtaactttcaaacatcctcatattaagaaatgaatttggaaagacagccttactacaacttatatttaattgccaacattacgcatgacatatttcgcaacacaacagtagccaacataccataaatgacatagctaacagacatagcacctcatagcttccgaagcgtacataacccaaaagatataactaaggctgatacattaacatgttaagcaagcattagaaggtctagttgtcgacccgtgcgaggtgctcaaggagggcctttctttcttcatgattggacagctcaaagacattgatggcatctcgatccttgagcatcttgaacatggcaacccacaagtgtggagtcgcctctgtgacccagcactccctactgagtgccatgatacgctcagccttttcccccgcgcgagcgtcatcatcatccctcctcttctcacgctgtgccgaatagctgtccgttgctatcgctttctccttctgcagctcgtgtgcaccttcaattcgttcaccacggcgcggacggctaggctcttcaacttcttgcttggactagtagccctactccgcgtgcttggtgtgctcctcatgctgtgcgacctcttcgtcccaacactgatggggcttagggggtcaaagtcgtcatcgtcagattcttcgtcatcctcgctgtcctccacatccacaatgggggtggccggctgggttgtgggctatgtaagaacaaatgaagtcgatccgttgacaaccacccccatgaacatgcggtccatttcttcgcgatagtcgggcatcccattcttcaacttcctaaattcagggtggtcctgcacaaaatgaatgcatcggtcagatgcataggaacgatcatgtgtaaaactgcgcaacgaaaaagtgaagtttttgtaccttagtgttgtcatcccaccacttgtctgaagcaaccatggtgccgtcaggtcttcggcccaaaccagtgtctgtacgcaacctcaatatgaaggtccacatatttttcaaacccctgtatttaaatccgaattgctcattgtcgtggaccaaatcagtggtggcataaaaaccctttctgatctccttccaacctgctttactcatgcttccccttatgtagttgccattatctatttgcttgcaatacagctcacaaaaaagtttggtgttctcatttgtccacgtagctgtaatacatttcgcaagtattgtactagctgtacttgacaagttacaacaactgtagtatgtagcaactaatcagatgaaccacttgttaacctcaaatgaaatgggaatccacacattgcaaaacctaaaaacgttcttacctctgtcagccggcgccatgcgctgcgacccctacctcggcctcgaccctgagatgcggctcgagcttgaggccggatgggaggcacgaatacgcctccatggcctgaacctccaaatggcggtgccattggcgcttggaacccagctccaatcgcatgcggcccgtcgactcctgccgccgacatccgaccgccccgtcgcggcccagatccggaagctccttgagcacttggccggcccctcaacccgagcgtgcgatgcacggtacggggagggacgcctacgccaggagggcattgactgccatcccctccgccactgcgaagaaggtcttggtagccgtgcatggccgaccacttgtcgccgtagttgaggtcaagagccccgaagtcgaaccgggagggttctggctgctggaagaaccctcgccgaagctacccgagttgtaggacgtgaggccgccatcacgggagagatggagaggctgcgcgaggaagtcgcgcgtagggatgctggcgccgaatcgatgctcggccccgtacaggaggatggtgctcccgccgccgtatccgccaaggttgttgccgtcgccgaacacgcgcccggcattggcgtctccgtagccgtggccgctgtcgccgttgccgtacccgccgccatcatggccgtcgccgtagccgcccccgttgttgctgtcgccctcgtacgaatccattgcgtgctcccgtcgattccgctgcacgcgccgccacggatgtgctggatctggacgaggaacccttcgattcacccagggtagggttggattacagcggcggggaggacagatgcgacgccgacgagttcgagagagagcggacgtgagggagaagaaccttagggttagcgcgtgtgaagaggcgatgaggaatggataggatcggcggcgtcggcgcctcccaggggtataatgggacaccctaaccctaggctactgttgggccttaaatgtgcaatatggccgaatttcaggtcgctacccgtttagttccaaagtccagactgcaccccttgtaccgatttttttggcactttggccctatctaaacacggcctcaatgtagcacgaggaagcaagagaggctcgagaaactaggttctagttatttgctggtttgtgctttgatgtgtccatcggaagccattgatgcttttccaccatgaaggattctggttcatcgagggactgaatgtattcctttttttttcttatagcacattaggaatatgggacaattgatcgattgaacacttcattctccgcggtttcttttgtttgaaatcacaagtttctccatctacaaatgaaagagacataggttttgtagatatgcaggatttaatttgcaacatcagctcaatcatgtagacagggcatgatttcctcatatggcatgatgactacctgtgtacaaattgttagagtatatatatggtacttagaaatgtatgaggatagtattgatttgtgtaaacttatttcttatatgtaatcttttcttatctctaccacgtatattttgtatatatcggtccctgagcttaatacgtacatgtctaatatttcgtagtatttttctccatttactattctacacaaatatattatttccataggccttttgttagatgtcatttagcgaactgtctcttgaaacgtcatttagccgtgtgtaagagggcttttacagggcatcgaagaaagtcttcaatgattttcgtggcagtgacagtccgaatcgcataagaccagaggagctttgctctgctagttttcttttgttgcacacggctattttcgactcgacacctctgattcatggcagcgttcgtgctgcatacagttcgctcaagcgtcttgcctccttttctatcatgtggttacttttccagatgaatacagagacatttagagaccataggaaaaaagtacgaattacccctaacaatcgggacagtacgaattaccccccccccctccgaatctcaaaaccggacatttgataccctaaactattgaaaccggacaaattacccccttggctcaacacagagtggttttttttttttttttttttggggtcttttccccctaaaccgttggcaacaatacatgggcgccacgtggcaatccaataaaaaaaatattaaaaaactgtgggcccacttgtcatgtactcctacctcacccctctcttttttctctctctcatcagctagggggcacggccgggcatgccgggagggcgagcggcgatggcgaacgcgaagcacggtgtcggcgaccgcatccgtggcggcgacgcgtgagttgcgcgagatggagcttttgcaggaggcggatggctgcagtgtggtggtggtggtggcccgggcagagaaggcagcaacggcggtagagtgggggtggcggtgaggggagggagagacggggagcgacggcgagggagggggtggcgcgagcttgtaggggcaacagcagcagacgacgacgacgagacaaccttccccgccgagccgaggtcgtcctcggccaccgccggggtgccgtgctcgccgagagaggggaagaggagagagaggtgcgggaggacctccgccgccggccgcggtcgattccttcacgtgagcttcatcatgggccacgccgcacgccctgaacgccccctccacacccaccgccggcctcggggtccgctctcccgacggcgctacggagagacagagagaggggggaggccacttgccgtagtcgccgtcgtgggccgcgccgcgtgccatcaccgcctccgcaacgcccgccgccggcctggggtccgctctcccgacggtgccagagagaaagaggggaagagccttgcttggcgccctgccgcagttgccgccgctcgccatagtcaccacagcttgacagacgacggcggcgccacccttcttagctcgcgggatggaggatcggcgtagcctgctcagcccaccgccagcctcgcctcctggcccgcccgccggcctcggtctctgcgcccgcccgcctccggccgcggctcctcgcccgccgcctgtagccatccccgccgccggccgccagtcggtgtccactcctcgcccgcccgccattagcagtcacctttgtgctcgtccgccgcctgcagccgcctccgcgcatgtctgctgcccccagccatcccctccgccggctgccagtcggcgtcggcctccgtgcccgcccgcctctggcctcggctcatcacccgtccgccgcccgcagccatccccgccgctggccgcccgtcggcgtcggctcctcacccgccgccgcccgccagccgcaagatctgtcaaccgagagagagaaggagtgaaaaaaaacgctaaaaggtgggccccacctgtttttatttgtttttgctgactgtatcgccacgtgtgtgccacgtaggctgaaaaccgcttcaaagcgagttaggggggtaatttattccgttttaagtgtttggggtgttaaatgtccggtattatagtttcgggaggtaaatcgtactaccgcaatagttcaggggataattcgtactttttccaattaccatatgtttgatgcatcgatgcaggctgatcgtgcatgcatgtttaatttcttacatgcctgtggttgatcatcaggataccaagtctccgaccacaacgtgttctttatgggaaaactgataaacaaatttcatcacttcagttaaacggaagaaactggatatataaatatggatgtctatgcctgattctggaagccatacagatatacagacaaaaacatctcgagcgagcacctgacaggcatgcacagaacctcccaaatggtatactattggtgcctagaccgatctctgcacgctcttgtaaccacagatcaatctgtagcccgaggtattgtgccgccgactcctgcaaccataggatcgatggtgcaccattcaatctactattcaatatttaatatactaactaagtcacttgggcatagttttagatcttggacccatggtaaatttaaaatttttacgttaaattatagcggtgcaaagttttaaattttatctaaatcgggaattaaatgatttatctaaatgttatcaacgtaatcgtagatctagattcattgatttgtaaagctagaaatacccatctctaataaatcttaatttgatccaaaaatgtaccaaaaagatctaagtacattgtcagatttatacaaacgtattggtattgagttgcacatttgcataatataatttagttggatttctcaccacacaacgcaacttactattgctttcatgatatgccacgttgataaggtaaggatcctgctgcattatagggactatagctagtctagagattccgtgaacgaggtggaaacaaacaagcacacagattcacaatattgacagaaaggtattggaaaaatacttgcggcaatctattcgtcaagcgaataaatttttcatagatattaataaataatgttggaaaaatgctcgtggcaatctattcgtcaacttgttttccacattggagtatgccgtgggaaaacttagattcaaaaccacctaaaaatgtccgcatgtgattaaatgtccggatttaaccgatgaggtgtgtgttgtcttttttttttcatagttgagggcggtataaatcatattaattttttcctatagtagatatggaaaatctagttattaaccctatacaaagctgtgttgtttcacattttatacaagtttaggctatatgtattgtaactatagtcggttaattaagaaacaagaaaaatcgcataatttgatttggttactttacaatgaggagatacccttctattgtttgaaaaattcctaagagggtaaaacaaatatctaataaataaactgtggatattatgggtaccccatacccacacggcatggttatccgactagttataggggataacttatatatatgaaatatgtaacatatcatgacttgggtattacgtttccctgtatattatggaacggcctaaagtcctggtttgataagattgtaaagtagatttaggaaaccgataccgtattggttatggtttctatcttgtaaccctgccccccaacctatataaggagggcagggaggccctctagggggcaggagacaacctgatcgtcagatctatactacacccggcggattcaaatccccaaacaggagtagggtattacctctcattgagagggcctgaacctgtctaaatcctttgtctccacatccatccacttttaggtctcgtgcgctaccccgttttattattgccgaatccatgtttcgacagttggcgcgccaggtaggggttgcgtcgagtttcctatcaacgagcgcgatggaatcaatttcatgagtcgccgacttcgttttcgctttgggagttttcacttcctttccgtcgaccacttcttcaagctcctcttctctgacttgatccaaatcagtcagggggaaactcaatctgatttttatcattatttatcatattgatttttaatctcagattaatctcttgctattttttgttgttgttcgcatataattacgcggcactattgaggcgattgatgctggtcatggactcgaggcgtctcagctttccggtcgatcggccgcgagtccactctgccggcttgtcttcgccaccaccactgctgataacaacaacgacttcaccgccggcctgcctccgtcgccgccgactggtgtctccgcctatatggttggttggtcacaccaccgttgttgggcgtctacgtcttcaccaccggcctgcctccgtcgccgccgactggtgcctccgcctacacggctggcctattatgccgctgctgttgggcgtntacgacttcaccgccggcctgccttcgtcggcgccgagtggtgcctccgcctacacggctggcctattatgcccgtgcttgtgggcgtctacgttttacccgccggcttggctccgtcgccgccgattggtgccctccgtctacaccgcttgcctattattgccgcgttgttggcgtttacaatttcaccgcg

SEQ ID NO: 15840 - DNA, 712 bp, Oryza sativa
  unsure (1)..(712): unsure at all n locations
ttgcccgccaagtggtgcctccgcatacacggtgggcctattatgccgccgttgtgggggtccagaacttcaccgcgggcccgcctccgtcgccgcngattgaagtcctcgcctatacggtcggttggtcacaccaccgttgatgggcatcgtcatttacaccgccggcctgcttccgtcgccgccgactagtgtcatcgcctatacggttggtcggtcacaccaccgttcatgggcgtccatgtcttcaccgatcggctggccttcgtccgccgccgactggtgcttccgcctgcacggctggcctattatgctgccgttgttgggcgtctacgtcttcaccgaccggcttgccttcgccgccgccgactggtgtttccgcctgcacggctggcctttatgccgccgttgttgggcgtctacgtcttcaccgaccggcttgccttcaccgctgccgactggtgtttccgcctgcacggctggcctattatgctgccgttgttgggcgtctacgtcttcaccgaccggcccgccttcgccgccgccgactggtgtccacacctgcacggctggcctattatcacaccgctgttgggcgcctacgtctacaccgccggcctgcctccgtcgccgccgactggtgtcatnnnnnnnnnnnnnnnnnnnnnnnnnnnnnnnngggtcggtcggacgcnatatccaaannncacac

SEQ ID NO: 15841 - DNA, 724 bp, Oryza sativa
  unsure (1)..(724): unsure at all n locations
cactggctttgtttgcatntccnattgaagaacctctgctatgcactgagagatcccctcataatttccccaaagcgtaaccatgtgtgaataaattttgagctagtagggttgcagccacgagtaagtcttcccttggtattgggtagccagaatgccgcaaaacttccatgcctaagcgaactgttgagagtacgtttcgatttctgactgtgttagcctggaagtgcttgtcccaaccttgtttctgagcatgaacgcccgcaagccaacatgttagttgaagcatcagggcgattagcagcatgatatcaaaacgctctgagctgctcgttcggctatggcgtaggcctagtccgtaggcaggacttttcaagtctcggaaggtttcttcaatctgcattcgcttcgaatagatattaacaagttgtttgggtgttcgaatttcaacaggtaagttagttgctagaacccatggctcctttgccgacgctgagtagattttaggtgacgggtggtgacaatgagtccgtgtcgagcgctgattttttcggcctttagagcgagatttatacaatagaatttggcatgagattggattgcttttagtcagcctcttatagcctaaagtctttgagtgactagatgacatatcatgtaagttgctgataggtttccagttttccgctcctaggtctgcatattgtacttttcctcttactcg

SEQ ID NO: 15842 - DNA, 6481 bp, Oryza sativa
taatctattcgaatagccgcgccctcggttatgggcaagccgagcaatgtacccaagttagtgttttaattcttaaaacctgcttaacaattaaatatggaatggttggcctgggttggcttgggacgagctgggacccagggtcgggttgccagttcggtctgaatcatcataggccttgggttaaggcaggttcgtgtgggttcacggccttgattaataatattggatagttctaggatcgtgtttacaaaatggccttgagcaactaaatgtctttaaatgctgtttactgcaaccctaaccctttatattataattcccttgtactcccttgcatttattctgcatttgtgggtgtgtcttgttgagtacggtggttgtactcagtcttgctcaattttcccaagcccagatgaggagttcctggaagatgaaggctttggtgtctagctcgtgcctgccgtcaagtgcctgtggtcgtcgccctagtcttccgctgtttttcgttgtctttgagtgtgctgggccttcgttgcccgtgtaataatttttatttacgcttccgcttgttaaactctgaattgtatcaacttttggtgtaccttgcctctgggacaaggattaatgcacgcacgtcaggaaagcccgttgggttatttccggtcgtgacatgcagtgatcctcgctggctctcccgagcggacttcgctggcagtcaccgcgggtggagattctttccccgccgcttgcaaaacgccgcttttctcgccatcggcactcttcaccagcgctacccggacgagttgcagcactcgccctaccgctaccaccctcgtcgcggaggagcccgcgactacgccaccttccgggatgctagctcggaggatgacgctaccatcatgcacctggcgcgcatggtggaggcgtacgacgcggctcgtatcgacttccatcagatggtgcgccgtgggatggtcgagaacaacatgaagatcctggagctgcgtcaggagaacctgcagctcaagaaggacctagacgcggtggaggcgcagctgcatcagctcaagatcgcccagggagaggtctgccgccccaagcgtcgccgcgtctgccgcagccagaagatcaccgcccgcaagagcacctccaggcccgagcttgttcgtcagtccctggcgtggacttgcttcgtcgagacccctcgtgccgagcccgcgcccgtggttcctcaggagggggaagcctccggcgttggtagcacggaggatgcgctgttgctcaccttccgtcctggcccgtcgcagcggtagacgagcagttagtaggcttgcgcgtgtgttctttctcgtttgtcttcttgttgggttgtgtggggcatggttatgccggtgtgtggtataactgtgtcggagcctgtctttattttatttgcctaagcaacttgaactttaatgaacccatttaatagcagtaataaattcaagaattatggtagtcgtggatggttagctttaattgtcagctctccctctgtttgctggttctgtgtggggttttcagatggtgacgaccaggagaagtgctgccaccggtgatggcaaccaacctgaaggcagcaaccaccaccagggcagcccacctccacctcctcctccgcctccaccaccaccgccagataccaacgccattctcacccaaatcctcgcccagcaggccaacatgatgactgctttcctccaccacctccaaaatccgccacaacataatgctccaccaccacctccccaacactctaaactcgccgagttcctccgcatccgcccacctaccttctctagctccaacaaccccgtggatgcgttggattggttgcatgccgtgggaaaaaagctagacactgtgcagtgcagcgatgaggagaaagtcatcttcgccgcccaccagctgcaggggcccgcatctctatggtgggaccatttccaggctacgcagccagaggggcagcctattacttgggcccgtttcaccgccgctttccggaggacccatgtgcccgccggagtcgtggcccttaagaaaagagaattccgagagttgaagcaaggcaaccgctccgtgatggagtatttgcatgagttcaacaacctggcccgttacgccccggaggatgtgcgggaagatgaggagaagcaagagaagttcttggcaggaatggaccctgagctgtccgtccgtctagtctccggggactatctggatttccaacgtctggtggacaaaagcatccgcttggaagccaagcacaaggaactggagtcgcacaagcgccgcttggcgaatttccgcaatcaacagggtgctaaccaaagggtccgctacaccaatccctatccagggggatcctcctcgcagcagcaacaacagcagcagcaacctcgctccgcgcctcgacctcaattcgtggtgcgcgtcccacagccgcagcagcagcagaatcaacaagggactcgtgcgccccgtcctcctacgccaactgtgcagcctggtcaaggccgcagggacgctcaaggtccgcagcgtctgtgcttcaactgcttcgagcccgggcactttgcggataaatgcccaaagccgaggcgtcagcaaggccaagcgcctccccgctccaacaacggtgggaaggatgtcattcggggtcgggtgaaccacgtgacggccgaggacgtgctgacaactccagacgtcatcgttggtacgttcctcattcattccatccctgctaccattctgttcgactctggagcttcccactcgtttatgtctgtgccattcgtggggagaaatcagttgggggtagaaaggcttaggaaccctctgctcatcaccacccctggaggggttatgacagcaaagtattatagtcctgccgtccctatagaaattcaggggattccttttccctcggatctgattctgctagacaccaagaacttggatgtgatccttgggatgaattggttggctcaattccaaggagtagtggattgtgcgagacgcactgtcactctgtaccgagggccggaacaaccggttgttttctttgcacccccaacctctgtcagtagttccgaacttcatcagataggactgtcagaaatccccatcgtcagagagttcggagacgtgtttccggaagaactacccggtatgccgcccaaacgagagattgagttccggatagatcttgctccaggaaccactcctctgtacaagcgaccctaccgtatggcagcaaatgaactggctgaagttaagaaacagttggaagagttgaaagaaaaggggtatatacgtccgagtacttccccctggggtgctcctgtgatttttgtggagaagaaagacaagacgaagaggatgtgcgttgactacagagctctcaatgaagtcaccatcaaaaacaagtaccctcttccccggatcgatgatctgttcgatcagcttaaaggtgccactgtattctccaagatcgatcttcgttccggatatcaccaattacgtattcgtgaagaagatattccgaagaccgcattcaccacgcgatacggattgtatgaattcacggtgatgtcgttcggtttaaccaatgctcctgcctttttcatgaacttaatgaaccaagtgttcatggaatacttggataagtttgttgtggttttcattgatgatattctggtatactcacaatcagaggaagaccatcagcaccatctccgtctggtattgggaaagttgcgggaacatcaattgtatgccaaacttagcaagtgtgagttatggttgtccgaagtcaaattcttagggcacgtgatatctgctaaaggagttgctgtggaccccgaaacagtgaccgccgtcactgaatggaagcaacccaagacagtcactcaaattcgcagtttcttaggtttggcaggatactaccggaggttcatcgagaacttctccaaagtcgctcgacccatgacacagttgttgaagaaagaagagaaatttgtgtggagcccgcaatgcgagaaggcgtttcaaactctcaaagaaaagctggtttcctcgccagtgttaatcttgccgaatactcgcaaggatttcatggtgtattgtgacgcttcgcgccaaggattggggtgcgtgctcatgcaggatggtcatgtggtggcctatgcctcatgccagctacggcctcatgaaggcaactaccccacccatgatttggagttagctgcggtggttcatgctctaaaaatctggcggcactatctcattgggaatcgctgtgaaatatatactgatcataagagtttgaaatacatcttcactcagtcggacctgaatcttcggcagaggagatggttagaactcatcaaggattatgatgtgggaattcactatcatcctggtaaggccaacgtggttgccgacgctctaagtcgaaaaagccattgcaacactcttaacatccgtggcattccaccagaacttaaccaacagatggcagccctgaacctaagcatagttagtcgtggattcttggctgcgttggaagccaagcctaccttgctcgatcaaatccgcgaggctcagaagaatgatccggacatgcatggactcctcaagaatatgaaacagggtaaagccgctggtttcacagaggatgaacacggaaccctatggaacggaaatcgggtatgcgttccagataacagagaacttaaacagctgatacttcaggaagcccacgaaagtccttattccatccaccctggcagtacgaaaatgtacttagacttgaaggagaaatactggtgggtcagtatgaagcgggaaattgcagagttcgtggccctttgtgatgtgtgccagcgtgtcaaggcagagcaccaacgaccggccggacttctccaacctctccaagtaccagaatggaaatgggatgaaattgggatggatttcatcaccggacttccaaaaacccaaggttgatatgattctatatgggtagttgtggatcgattaaccaaggtggctcgatttattcctgtgaagaccacctatggagggaacaaactagccgagctctacttcgctaggatcgtgagtctccatggcgttcccaagaaaatcgtatctgataggggaagccaattcacctctcacttttggaagaagctccaagaagagctgggtacccgattaaacttcagcaccgcatatcacccgcagacagatgggcagaccgagcgtctaaatcagatcctagaagatatgcttcgcgcatgtgtcctggatttcgggaagacctgggataagagtctcccctatgccgagttctcctacaataacagctatcaagccagcatacaaatggcaccttatgaagcgttgtatgggcgcaaatgccggacaccgctcttgtgggatcaagttggggaaagccaagtgttcgggactgatatcctgagagaagctgaagctaaagtcagaaccattcgggataatctaaaggtggcacagtcccggcagaaaagttatgcagataaccgtcgccataacctggaattcgcagtggacgattttgtgtaccttcgggtcacgccattgcggggtgtacacaggtttcggacaaaagggaagctcgcacgtcggtatgtgggtcctttccgtatcgttgcccgacgcggagaagtcgcttaccaattggagctgcccgcctccttgggcaacgtgcatgatgtgttccatgtgtcgcaactcaagaaatgccttcgagtgccatccgagcaggccgactcagagcaaattgaagttcgcgaagacttgacctacgtggagaggccagtaaaaatcctggacaccatggagcgcaggaccaggaactgggtaatccgtttttgcaaggtccagtggagcaaccacgccgaggaagaagctacttgggagcgtgaagacgagctgaaggcagcccatcctgatctcttcgccagttcttccgaatctcggggtcgagattccgtttaaggggggtaggtttgtcgcgtcccaaaacgactctaaaatacatcctcaaaattatgcatagaataagtaaaatccatgtgaaagcctccaacaattaaaatgtgcaaagttaaaagtcgaataaggcttggaggatttttgtatatttcctaaaagcctaaaatgcgtaaataaattttagtggaattttcagagcacaaataataattaagaagaaataaacaaagttaaaatggttttataaaaagaaaacccttaaagaaggcatttccccctccttcctcctttttggggcgggtttgacccatttccttcctctttttttatttttcccccccggaccattggttcccaaggcttgggcccggttgaaagcggcccccccgccgtcttgttg

SEQ ID NO: 15843 - DNA, 1554 bp, Oryza sativa
  unsure (1)..(1554): unsure at all n locations
ggcgcggctccnccgcgccggtggtcgccggcggcgaccatcggggcccgggcgcgccgcctcccgtcggctgtgccggggtgaccgccttcgggcgcgccccgcggctgccatgtggggcccggccgtcagccgcccgcgccctcgggtgcggctgacgcgcgggacccacggcgccggccggcgtaagccgcgtgcacccggtccaccgtggaccgagaggctgccgtgtgggccccactcccgtggacccggtccgcgcgctcctctctcccggctgacgcaataaatatgttttttaaattaaaatttaaatgaagaaattcgcaaatattcaattaaagagcatataaacttcaaatggccataacttggccatttgaactcggaattggaccgttcaagtctctaatttttccttaagaagtcaagaactcatttttgtgctttgtttctgcttgttatatggagtttagtagagtaaaagccgtttcttttccgttggtcgtgtagacgctgcagcttcggaagatccgctcttcgtggaagttgaagccggcgtttgggaaagcgagcaaggcaagtcacatcatccttgaacatattgaatcccagtttataaaattatgttgctttaaaattattgcattatcgctttatttaaattcccgcgttatcactgttttatctagccaggcctatttacctttgttatgaccttattattgttattgttattatttccttgttcaccctagaataaacaaaaccccaactagtggacactctactcatggtaccactagtatgattttaggtagatgcttcgctgattaattaggtaacattaggtgattttacaactctagactttgggttattcatatcacctggacactatggaatggtttggttattgtggaattggcttcacaccgctccttctattcaaaatccccaaaatggttttaggctgggctcggggtgcatggttttgatggtagcacctcggccatataaggaccggtcttcgggcctctgttgcaaagcactaccgtacttccacatgtctagtgggtaaggcttagtttgtggctcagtctagttataaacaaaagtacacggatggagatggaagaagtcgggggtcgatggacatctccagggcaaatgaaggctacacgagctgcggcccggtagtcgagatgtcatggcacagggccggtgtcctgctgctaggggctcagtcctgcctgcctgtcccgggggttccggccgtaagtgggattgggtcggtactcttgtctatggctaggatgggttggaaactatgtcacgtctttcgtctgtataccggggtggtatgtggcacgttggtacacgtgaagaagatgtgtcttgggggtaaagatgtacacctctgatcaagagtataaattctttattttttcccgcaaaaaatttttaaaggggggcccccccgcgccctggttttgggcaagccgagcaatgtacccaagttagtgttttaattcttaaaacctgctcaccact

SEQ ID NO: 15844 - DNA, 2324 bp, Oryza sativa
tttttaattgaaaattaaatgaagaaattcgcaaatatccatttaaagagcatataaacttcaaatggccatatcttggccatttgaactcggaattggaccgttcaagtctctaatttttccttaagatgtaaagaacccatttttgtgctttgtttctgctgttatgtggagttatttagtgttaaagcctttttcttttccgttggtcgtgtagacgctgcagcttcggaagatccgctcttcgtggaagtcgaagccgtcgattgggaaaacgagcaaggcaagacacatcatcttgatcatattgaatcccagtttataaaattatgttgatttaaattattgcattatcgctttatttaaattcccgcgttatcactgttttacttagccatgcctatttacctttgttatgaccatattattattgttattgttattactattaccttgttcaccctagacaagcaaaacctcaactagtggacactttactcatggtatccctagtataaattttaggtagatgcttcgctttaattaggtaaccttaggtggttttacaactttagactttgggaaatattcatatcacttggatactctggaattgttggtttattgtggaattggcttcacaccgcccctctattcaaaatcccctaaaatggttttaggctgggctcggggtgcgtggttttgatggtagcacctcggccgtataaggaccggtcttcgggcctctgttgcaaagcactaccgtacttccacatgtctagtgggtaaggcttagtttgtggctcagtctagtcataaacaaaagtacacggattggagatggatgaagtcgggggtcgatggacatgctccagggcaaatgaaggctacacgagctgcggcccggtagtcgagatgtcaaaaagcacagggttggtgccctgctgcgaggggctcagttccgtctgcctgtcccgggggttccggccgtaggcgggattgggtcggtactcttgtctaaggctaggatgggttgtaaactatgtcacgtctttcgtctgtataccgtggtggtatgtggcacgtggttacacgtgaggaagatgtgtcttgtgggtaaagatgtacacctctgatcagagtataatctattcgaatagccgagccctcggttatgggcaagccgagcaatgtacccaagttagtgttttaattcttaaaacttgcttaacaactaaaatatggaatggttggcctgggttggcttaggacgagctgggacccagggtcgggttgccagttcggtctgaatcatcataggccttgggttaaggcaggttcgtgtgggttcacggccttgattaataatattggatagttctaggatcgtgtttacaaaatggccttgagcaactaaatgtctttaaatgctgtttactgcaaccctaaccctttatattataattcccttgtactcccttgcatttattctgcatttgtgggtgtgtcttgttgagtacggtggttgtactcagtcttgctcaattttcccaagcccagatgaggagttcctggaagatgaaggctttggtgtctagctcgtgcctgccgtcaagtgcctgtggtcgtcgccctagtcttccgctgtttttcgttgtctttgagtgtgctgggccttcgttgcccgtgtaataatttttatttacgcttccgcttgttaaactctgaattgtatcaacttttggtgtaccttgcctcctgggacaaggattaatgcacgcacgtcaggaaagcccgttgggttatttccggtcgtgacaagttggtatcagagccttccttgaccctaggacgagccgtagatcccaagccttagctatattttcaaaaataaaaatcctttattatttgtgaaaacccgctattctctctttgtcttgctgcttcatttatcgtcaaaatctgatcttttaaatgttgcttttcttttgtttttgtttgtagatggccggcagcgttacccgtcgtggtttggacatgactggcttcgtcttggagctgcggggcatgtgcgtggtcttggggtatccacatggagtggattaccaggccaggccgctcccggagcaggagggtgaggatgcagagcctcacgctggttgggaggtcactgcagtgatcctctccggctctcccgagcggacttcgctggcagtcaccgcgggcggagattccttccccgccgcttgccagaacgccgcttttcttcgcatcggaaccctttaccagcgcttcccggacgaggtgcagcactcgcctaacgt

SEQ ID NO: 15845 - DNA, 1683 bp, Oryza sativa
  unsure (1)..(1683): unsure at all n locations
gcgtttccaaagntcattgnagngccnnccgcgnggtgggtataggcccccccccancgannacaacccctaatgaaccaatttaatagcagngatttttttattaataatagcagncgcgggggggggggtttaatcgtcagctctctttctctgcttgctggttctgtgtgggggtttcagatggtgacgaccaggagaaatgttaacaccggggaaggcaaccaacccgagggcagcaaccccaacccccaagggaatccacctccaccaccaccaccagacaccaacgccattctcacccagatcctcgcccaacaagccaacatgatgaatactttcctccaccacctccaaaacccgccacaacagaatgctccaccaccaccaccccaacactctaaactcgccgagttcctccgcatccgcccacctaccttctctagctccaacaaccccgtggatgcgttggattggttgcatgccgtggggaagaagctggacactgtgcagtgcagtgatgaagagaaagtcatcttcgccgctcaccagctgcaggggcccgcatctctatggtgggaccacttccaggctacgcagccagaggggcaaccgattacttgggctcgcttcaccgccgctttccggagaacccatgtgcccgctggagtcgtggctcttaagaaaagggaattccgggagttgaagcaaggcaaccgctccgtgatggagtatttgcacgagttcaacaatctggcccgttatgccccggaggatgtgcgggaagatgaggagaagcaagagaagttcttggcaggaatggaccctgagctgtctgttcgtctagtctctggagactatccggatttccaacgtctggtggacaagagcatccgcttggaagccaagcacaaggagctggaatcgcacaagcgccgcttggcgaatttccgcaatcaacagggtgctaaccagagggtccgctacaccaatccctacccagggggatcctcctcgcaacagcagcagcagcagcaacctcgcccagcgcctcgacctcaattcgtggtgcgcgtcccacagccgcagcagcagcagaatcagcaagggactcgtgcaccccgtcctcctacgccaactgtgcagcccgttcaaggccgcagggacgcttcaggtccgcagcggctgtgcttcaactgcttcgagcccgggcactttgcggataaatgcccaaagccaaggcgtcagcaaggccaagcgcctccccgctccaacaacggcgggaaggatgtcattcggggccgtgtgaaccacgtgacggccgaggacgtgctgacgactccagacgtcatcgttggtacgttcctcgttcattccatccctgctacaattttgttcgactcgggagcttcccactcgtttatatctgtgccattcgtggggagaaatcagttgggggtagaaaggcttagaaaccctctgctcatcaccacccctggcggggttatgacagcaaagtattatagccctgccgttcctatagaaattcaggggattccttttccctcggacctgattcttctagacacaaagaacttggatnnnnnnnnnnnnnnnnnnnnnnnnnnnnnnnnnnnnnnnnnnnnnnnnnnnnnnnnnagaggttgacagcaaanaacgtcg

SEQ ID NO: 15846 - DNA, 1602 bp, Oryza sativa
  unsure (1)..(1602): unsure at all n locations
aaccatatggacgaaaatcgggtatgcgttccagataacagagaacttaacaagctgatactcaggaagcccgccccccggaaaaaaaaaaaaaaagggtttccccctttttattttccatccacccctggcagtacgaagatgtacttagacttgaaggagaaatactggtgggtcagtatgaagcgggaaattgcagagttcgtggccctttgtgatgtgtgccagcgtgtcaaggcagagcaccaacgaccggccggacttctccaacctctccaagtaccagaatggaaatgggatgaaattgggatggatttcatcaccggacttccaaaaacccaaggtggatatgattctatatgggtaattgtggatcgactaaccaaggtagctcgatttattcctgtgaagaccacctatggaggaaataaactagccgagctctacttcgctaggatcgtgagtctccatggcgttcccaagaaaatcgtatctgataggggaagccaattcacctctcacttttggaagaagctccaagaagagcttggtacccgactaaatttcagcaccgcctatcacccgcagacagatggacagaccgagcgtctaaatcagatcctagaagatatgctccgcgcatgtgtcctagatttcgggaagacttgggataagagtctcccctatgccgagttctcctacaataacagctatcaagccagcatacaaatggcaccctatgaagcgctgtacgggcgcaaatgccggacaccgctattgtgggaccaagttggagaaagccaagtgttcgggactgatatcctgagagaagctgaagctaaagtcagaatcattcgggataatctaaaggtggcacagtctcggcagaaaagttatgcagataaccgtcgccgtgatctggaattcgcagtggatgactttgtgtatcttcgggtcacgccattgcgaggtgtgcacaggtttcagacaaaagggaagctcgcacctcggtatgtgggtcccttccgtatcatcgctcgacgtggagaggttgcttaccagctggagttgcccgcttccttgggtaacgtgcatgatgtgttccatgtgtcgcaactcaagaaatgtcttcgagtgccatccgagcaggccgactcagagcaaattgaagttcgcgaagacttgacctatgtggagaggccagtgaaaatcctggacaccatggagcgcaggaccaggaaccgggtaatccgtttttgcaaggtccagtggagcaaccacgccgaagaagaagctacttgggagcgcgaagacgagctgaaggcagcccatcccgatctcttcgccagttcttccgaatctcggggtcgagattccgtttaaggggggtaggtttgtcgcgtcccaaaacgactctaaaattcatcctcgaaattgtgcaaagaataattaaaattcatgtgaaagcctccaacaattaaaatgtgcaaagataaaagtcaaatgaggcttggagnnnnnnnnnnnnnnnnnnnnnnnnnnnnnnnnnnnnnnnnnnnnnnnnnnnngggcatatcgtncatcattaaannnnttctcacc

SEQ ID NO: 15847 - DNA, 9802 bp, Oryza sativa
  unsure (1)..(9802): unsure at all n locations
gtgtatatatggatgagggagcgaaatatttagtggagcgcccgagaaaatgtagagtaagccacagcccatgcaggtgagagagaaatgatcacaactttaacagcgatgcgacaaagagaagcaaccacctccttatataattcggcgtatcaagagtaacgagcgcggtatcaagaatagaaagaaagatttactaaggtgggagaccacataaaagagagcacgcgttgaacaagatgttcctgacacatagaaaaatttggagcgttatatatagcccgcttagaccaaaaaccaatccatcttataagaggggctaataaaaagttggatattagttaacccggaaaggcccaagacgcaggtaaattttgaacagagttaaggtaatttgtataattacgtaccctctaaaaggctgatatagggcgcgcttataaaagcaggccctattaggacaacttaaagagggtgatattgaaaagggcactttggtacaccatcattcctaaggttggtaaaatgtacaaaatttcggccaaataacgcagaccccgatgtagaggccataaccgtttttccctgtccaagaggtactcaagcaagaagtccaaattgtgcactgggggatcatcaagcccacaaaagtgtgtcaaagtgggtacagcaggcaggattctgattcatccaccgaatcaatgtccggaaaatgcggaaccatgacccagctttagcgaaggaccacagaagcaaccccatgctgtttttctaaaggtgatctcaggtgaaatcagcgtggaaccggtgccacaaattaaggatatagctggagaacagtacccattcaatgattgaaatcacgccatacctggttaccgccgtcaaggcctaacacgacaaggcattccatgtcctcaaattttgggtatttaaganttnttttacnncccccccccccccccaacacccgcatccatccacaccacccgcacgcgcagccgcacccgcaggaaggacggggacgcggatcagaccgaccgtgccaaacgccaacgccatactccacctgacctcacactcgcaccgcaccgcaccacctcctcatcgagccttgttttttttttctctttcctctcctttccgtcgcgctgttcgctgcctacaaatcgcaattccccaatccatattcccttcccttcctttcctcctcctccatctccaccctcccgccgccgccgccgccgccgtcgccgcggcacactccccgggaccagcagaggccgccgccaacgccgcgggggcaggtaaaaaggcgcgcgagacgcccgcctctgcccgctgacctagatcggtagggtttactcgggcgcccgggtcgttcgtgtatgggggcgtgggcggtgggggattaggctttcggggtcggggggtcgggaaggtgtctgatcggatgatgggtggctctgttctccttctggggtgcggggttagagctagggctgtcgcggcgattttattttattttattttagttgaatttgaccggaatttccacgatttggatgggtttgtattggttggattgtggtaggagtgtttttataggggggttgggagtgagggggggtagggtttgttaatggtttttgagtgatataatctatttgattcctgttagggtcttctcctgggagatttcccggcgcggattttgttagcatttattaagtgtgcgcgtgttgttgttcatgcatgcagctgcggataaggttgcttgaagcagtggaagatttcctggatggcttgtgctgcagcaactgatgattctgctgcgagcacggctgggatgagggacgaggatcgtagcctgtctggcgagtcgttgtccgagtggcggtcctgcgagcaggtggagagcgagagcccttcgacgtccccgcccttttgggacactgacggtgatgacgatgatcctggtgagtaaatgcacttgcttcgcgttacgcgtgttaataatgactaaattatttggtccgtgtcgttgcaacgccatttgagcttaacatgattggttcggacttggaggaaatagcacaaattctcgagtagttagttgacgtagcacctgtatgcatgatgcgtcttgttcagttgcaagtgttagggtcatctaccttacagctgccagcccagacttcacaaaagatctcgatcagaaactggaaatggtcctcgttgcagagtagcttcagagtccagaagacagtatacacgtgtgctctcataaatgagacggttttgtagccttaatgcatagcgtccagtcaggtcatttatggaaatccgtgaattgtcaactgaagttgcttctggttagcaccctccatttcacaattttaatccagctactctgtactcaagtgtgcgttgaccggagaagcagacaatttaagaaataattaatgagggcaatacttaccccatacgttgctacctccattcccggaacataattaacgagggcaatacttaaatatacaatcttgtttcatccagaattcccggaacattctgtttcttcgaaaaaaaacataatacagtcaataatcctatttcatctgttatgctgttcatgttcgcatttaaattctggctggaatttgcgcttctaggcatttaggtacctgtgcttcaacctgaatagcaggagaatcgcatgctgcaaaccaacattactaattgcacagaaccgcagttcttgtattaatcttgtgaacaactactacacagctaggaggcaacctgcaatatagagaattgtgatatgcagacaatcatgatttcttgtaatgctcctttatcatagcttcgtacttgtttctctatttttaactcgcaccaaaatatgtttgcaaacacagtcatggctagataaatgttgtgtatactccaatatgtacaaaaaagatagctgtatgcctgccggtacatttttaattaaaatcaatcaatctacactggtatggtccatgggtccagtgcaaaatgtttcattccaataggcaaaacggaatgtccaccggaaaagtattgacatgtacgcctaataccatgcttaatatgtgttaatccattatttcttctctttccatgctgccttcaagtgtcatcttgactttcctctacaaactcaaattttgaattaatatttgctctatcaacaaggaatccagattcatttaccatctcttttcacgctacttcacaatgttatttggtctcattgtcattgatgcagtttatgttttgtgtacagtagtaaatatgattagggcatttaaataggtggcatgcttgccgggctgttctcacctgaattacgttcatgctagcgtcaacatttgctattgctgcatgaataagtttaactctctttcctggttcaagtcccaattcctggcatgtctgtttttgaactattttagtatttatagagtaaaatgctcttttttcctttagaagttcttttttctttccctattttaacctcatctctgaactaccattacaggccccaaaccttcagatttatttgggcggtatacttggagaattgaaaatttttcaaaggagaagaagagagaaatgaaaagcgagccatttgaagctggtggttacaaatggtaaaaggcttggtgaccattgctatgcatgatttaccaatgctttgcaatttacctcctatgctatccttttgtctcccaaaataaaattccgcatgatagtttttttcttgaataacctttatcctgtagacattagtacttttttgcaaatatgccttctttttcctcttatgttggtgcctagagaatggtattgtcaattttcatctcaccatgtttcctttccatgcaatgcaatcatatacaaacaccgcataattctgtcttatatgcattttttgacataatgtttgttatgtaggaaatgtaaactcgcacgattttgggcattataaaattgttttctgtgatttcttaattgaaaaaagatctttaacaagttttggataacgatgctgctttctttgccctatgttcgccaccacaatattgtgaactgttaggtttacttttctttattgcagccatttatttcatttagatgattattgggtttgaacactgttatctctgctttagctattatgtaaaaaaaaaaagaaacaactgtaaacatagcatactgcatactggtcaacatgtgatatttatttagggatttggcttacatgaccaccaaatattgtttgcttcaggaatctttgctgagggccataggaacaaatctaagagcttcttgtctctttccagtttaaatttgttatttatatatgcctatttacttattccttactttgtctgcttgctattttacaggtatattcttgtataccctcaaggatgtgatgtttccaaccacctatcactttttctctgtgttgctaatcatgacaaacttctcccaggtttggtttttgtagtctttgctgctatctaatggtgcaccatggacctaatatctcatattagtattacactttcagggtggagtcattttgcgcagttcactatagctgtaggcaatatagatcctaagaaagtaaaatactccggtgagtggaatttggcttgttctcttcctaggaagctaccattcttatcttcttgagcttcaggtcttaagtaaattttgtagatactttgcataagttctggaagaaggagcatgattggggatggaaaaaatttatggagttgtcgaagattcaggatggctttcttgttgatgatgttcttgaaatcatagctcaagttcaagttatcaggtagctaatctgtcagtgcgaacaattggtagctaatctttgtatcatggtgcttccaattcgtgtctacttaatctattaggctggttcatttgagcatgtctgtctttattgcttcatgtcctaatcgcgggaacaatatttttgaattttctacaggtagtctgccaatttatctcaaagcattgtttctttattcaattgcattccttttgattctactgtgatgttcccatggtgggaatttatttaatctattccagtttctcatttttttgctctaatttcctagcgttttgtagctcatacagaccagcaagatcacttgtatacattagatagtttgcctacttctgtttcttgttgatatgaattgactacaaactatcatgtaacatcatactgctgtatttaatatgtaagggagaaggtggacaaaccatttcgttgcctcgatcgcccttatcgaagagaattgctccgtgtttatacgacaaacatcgagtcaatataccgccgttttgttgaggaacgaagaaataaacttagcaagctgattgaggacaaaatgagatggtccaggtttgactagcagctattccaatataatatgctgcaataaaaagcaaagtattttttctttaattactgcctattgaaatgagatctttattggattttcagtttttgtgctttctggtcagcaattgacccaagtactaggcatcggatgtctagagagaagactgatgtcatattaaaagtattagtgaagcatttttttgtggagaaagaggttacttcaacattagtgatggattctctgtatacgggcctgaaggtgcttgaataccagagcaagggcaagaaagggagaacgatagctgatttggatgaactgcctgcacccatgatccatgttgacatggacatgtttgttttggccagtgatgttatagatttgcttgagagagcagccttagaaccactgccttgtcaacctgtgtctccaaaggatgacaaatgttcccagagtcgcatgaaggtagggattgctttgatgattgaagcatgatttttttccctgtttaataatctcagtataaatctttatgctcctagatatattatattgggaatattttttgttgtgagtttcttgtattgtatctgtgcatagttgtttggtgatcggtttattgcagagtagaggtttttctactggatttgcagtctgtcttactattctcactgtcataggatggtgcttctggtgaggttaacaaaatttccatggagcgcgaggaaagacgcctaactgagcttggtcggaagatacttgaaacatttgtgctatctcatatattcaggtaaaaagaattatttaggctgattttcttttggttaccgatgtagtgttggccagtaccaatagtcgatccctaggctttgtgggtggtttatgttgagccttgggcatttgaatgaaattatttgacctctaaaattcgaagacttctctaacagacaaactaccgaaattttagaaagctgcgtgtacgaattttgcattaagctaatgcatatacatttttctaacttaaaacagaatagatttttagacaaattgttagctacctaatagtcctactgtgctctttatttgtcagtggaattgaagttgcgtaccaagaagctgttgctttgaagagacaagaagagttaattcgagaggaggaggaagaggcatggcttcttggaaatgagatgaaggggaagcgtgggggtggtgctaatgaaaaagataagcgtgcaaagaagaaacaggtcatattctttatagaccttagttttattatattgagtatcatattggctcttctatgtgcctcaatagtgaagcagaactatagctagaagcttcataagcgattatcgtacccaatagttattgaacttaaattgcttagcgatttttggagtcagcatttacaacttttgtgatttgatttaattaggttatgcatcacaaaagaaaatatttaatcctatatcttgcagtttcattagggtatattttccacatttccatccttccctgcttctactgccaagttgtggtgagcaattttccatgtagttgatgcttagaaccagcctctgggatgttttatttggtcaaattgcatctgctttctcctggatgctgtttagaaactttctgattgtatgtactctgatttttattttgaagttgatagaaattaaaaacacatgttgagttgtactgcacttggccagggtccaatgcaacctttcataaaactgtccaaactggacagatacttggccagggtccagcgtagcctgtaaggcatccattcttggtcatctcaatttactcaggaactatattctttatagtttcttctatcatggattcgtggttccatattactattgctgcactagcatatttctgttgcgagcttaatatcacgtgctaggattatttgggatgaaacgggtgaaggggaatagattggatcataatagaggaaagaacagggaatggccctgaacctaaacggcacgtcgctctccgttgcaccaagaaggcagggccgatgggcgctaataaatcttgatctaatgcctaactgacctgagataggatccctccttatatagatggaggactccttaacccaatcctaacagaccgtgactctatccaactaagctacgtacttatattgatggatatcgtttccattgggcctaggactcccggcccaaagcccatgacacttaataataattattggcttttattattctctgattttactgctgttgtgcgaccctagcatcgggtttcccttgtgacattccaaatgaaaaatgttattagctcctagtcctgagtaacattgaattatcttctgaagtcttgtgctagtgccattctcgaagaacagctcttattctggggttgaaaatatatttgggtgaacatttaatattagtgtgaattgctcaggtacaactgatgtgaagttttatggttttgaagacctcaacctactttatttagggtcactacatagcttcatttcatcatgtcagttgtgttctatttctataattttatatgcattttgatccttagctctccttaatagtttgatgcgatgtttctttctcttgtatcatcttgttttttccactaatgctgaatcattcttttcaggccaaacaaaagaagaacaatcgtaagattaaagacaaggaaagagacgaaaaatttgaagcaaagattctggaaagacttcatgatgaaactgcgattgatgatagtgatggcttatcatcaaagcaggccgaagaagtgacaacaaaggttgaaaacttggaagaaggtgcttcagataggcaaggtgatctagatagttcagaaattgctcaccgaccagactcaggtgacaagtatcctagacaaatgaatggactgagtgatgttactggcaatgcacaaaaggtaaagaaggcctcctctatggaggctaactcaccagtctttctggctgattctgttgctgcaagcggcactcatagcagaggaaataatttgtcagacagtaagaaccgcatgacaccaaataggtaggtgaactctagtttctaaggcttgcattgtgatgctagtaaaattggcatctgctctaactggaactatctgcagagggaaaaatcagcgtaacaagggcataagcattatcagcttttctgaggaaggtgagggtattccctcgagttctactggtggttcggctcgttgtagttctagttgcggcacatctgcaaagttggaccaagataccgttctactcaccttgaaggataaactccgtaagctggggcaacgtctacatgaggtgatacatcttcttgaaaagttaactgcctttgttttgttgtgatatgtgaagtccagctgctctgttttggtcatatgcacgaccttccacggattatattatgagcattgtttttaaatgggatgagtgtcacatatgttgattgtatggaatatttgttttcgacccattacccttgtgcaattcatatttaaaatttattacaaaaggtaaacaatataagtatgtcttccatatttcatgcctatggctaatgactggagtctatgaattttaatctcaattttttcgtcagactaaacagctcttccattttctttttattaatggatataacttgctttaatctgtgtgtttcagaaaaatatggaggggcgaaaacttctccaagctcattttgaagccatggaagcaaagacgagtggttcatctccctcatccagtcctttggatgaaacacctgatgttgtgaagagccctgagcagtctgcagaaggtacaacagatgcaaaagctaatggaacaccaaataaggatgaacccgtgacaaattgcgtggcagaggaatctgtttcagtcatgccaggcacaaagagtactgaagctttatctggcatggcccttgccaagacaaaagttgagccagtttcaaataaagatcatgttccaaaaccaacattgcaagccaatagagcatctgctaattgctcgaaatcaactccagttgatatggagaaagatgttcctcttccttcaagatcgccacaaattaataaacctgctccagttcctccaaaatctccacaagttggtaatgctactccagttcctccaaaatctccaccaattgaaaaagcttgtccagttccccccaaatcaccaccaagtgctaaagatacatcccttccttcagtgagatcacttcaaattgataaacctgtcccagtccctccaagattaccccaag

SEQ ID NO: 15848 - DNA, 1215 bp, Oryza sativa
atgatcctcccccttgtgcacaagtttacattccacaaacctaccgtaacgctatcatcggtaagcatggccggggtacaacctcaggaactactgcatatcagtcaacctctctgggccaaggtactgccctttcacagccattgtcgacatatgcaccaactatgtcagtgacgatgcctcctgctggaaggaatgatcagttttctggtaggcatggattggagtctgggttgggaaagccagaagcacgtgatagctggcaaccatggaatgctaacaggcatgttgacaaacatctctggagggatgactcgacataccaacaaacaaccaacggtcatgcatatccgcaaccttggaaggatgttaattttcttcaagcaaggggcacagaaacagaaatacccagcaggtttggaggaccgcaactacctaggcagttccaagctgagactcatgcggattatctcttgcaacaaccacaggggccagtggcagaagaatttccgcaccttgacatcataaacgatttgcttgaggaggaacagagcaatggcagtatgccagagtccattggtcatgattaccatacatttggtctgccgttgccgtttttgttaagaggcaatttggcagatcaggaaatggcttctgctagcagtcctgggcggtttaatttgactgagccatattacgacgagggatactcaagggcctatgacatgagtgctttccaggggacaagggaaagacaatttccctccttggatgcctattctaatggcctgtctgacatgagtccatcaaagccttggctgaatggctctcctaatccatcgatgaaccatgcagttggtacaaatggatacccccagcaaataccggactacaccaatttggctagtgagttgaatggagcctctctataccatcgccgctacgccaacggtcgctggtaacgtgatgacgcctgtatacagtcttgcaatcaaaaaaaataatgcttgttacctgtaatagatgttcagtctgggtctgagccgtgtcatggcctgtaattccaaacttttaattccaaaagggcaaagggttgcattctgtaaagcgttcgccgtgtttaggctggttaatgctaagtcgagtgcttttctgatcaactgtgtcccgttttcctaatggtcttttgagaagaaatactgggaaccgtgtcaa

SEQ ID NO: 15849 - DNA, 37921 bp, Oryza sativa
  unsure (1)..(37921): unsure at all n locations
aaacaaaacctggaggttctaacccagaaacagtgtgaaagaacccccaaaacggaccacatggaaagattaagactcttaaacttgcgtaaacaggtcgtggaagtatagctaacaatttgaaccaaaaataacttgtcgtgaaaatttagtcggttaacgttaatgctgtatccaactttattcaaaagcaagggtgctttgtaaacgtcccgttttagctgtaatgttagcaagtctttctgatcaacttgtccgtttcctaagtcttttaaaagaaaactgaaccgtgtcaacacggggtcaccaagttgacgagtnccgtcaaaagtggtgcaggtggttggttttgggcctttaggtcagtctgccncaggtgccatccacctactaccaaatcgtatattaccgatctcgatattggtccagtctaccccatgttcacgtacttttagtctttgacctgactcctgagtatagtgggcaacaaacattagacctgctactgcatagcagtaggtatatgcaactccattccagtacttggttctcagcaaaaatctaccagtcgtaaaacataacgcaaacgtccatttacgtttccatcatactcgttctgcaagcaagttcgctatcagggcaatcagcgatgctgaccactactgtgtttttctctgtgttccaattcttagccctgtctttcagcttggtattattataatccagattattaggagtaagctgaaagaaatagacaacttattgaagtagcttattataatctggagtccagtttattataatctgataagctcatttaggtgagctttttccagattattggatgaaaaattacctaccatgccaccccactccctctttagacttgcaaacctaataatctagactctaataatttaggaaagaaacaactaaccgcttattctactatagattataataatttagcttatagtaatctgactcaataatctagattataataatcataaactgaaagaaacatggccttagccgttgcactggtgctattgtgctaatgatggtttggttttcttccttgagaatttcaagctctaataattttcttgacccaacgcatcattgacgctaagaacggttgcctttttattttccttccgaaactttgagacaaaatcatttctgggcccacccgacagggggcaaggtcagggacggaccagaaaccagaaatgccgggggtgccatggcccatggtaggtccaactccacagccactggccgttggcacatgccgccaccggccaccgctcgcgcgccgtcgcgctcgctcgctagtcgctaccctacctagctacttactcggtttcacaatgtaaattattgtaacatttctcatatttatatatatatatttattaataacaatatgaatatgtgatatgctagaatgatttagggtgtgtttgagaagaaggggattgaggagattgggaagataaccaaaacgaggtgagccatttaactcatgattaattgagtattaactattttaaattttaaaaatggattaatatgattttttaaagtaactttcatatagaaaatttttaaaaaaacacactgtttagtaatttagaaagcgtacgcgcggaaaatagtgtgcattctcactccctatcagctaaatgaacgcagccttacatcgtgaaacggatgaagtatagcattagcagtagcactatttctttggacatccacgcctcgatctcttcctgggtctagtagtcttctcttcttccacgcgcaggcgcagccatcgtcgtcatcgccatcgccgccgcggcgcgcgcgcgcgcgcccgtgactgacttccgtagggggggactgaggcacgccaccccgcgcgcgcgcgcgcgcgcgtgcgcccgcacaaccacgaacgcgctccgaagtcttccttccgggagggcacgtgtggttggggtataaagggggagagaggcacgatgccgcacggcgtcgcgctcgtcgtcgtcgtcgtcgtcgctcctggccggtagcggatgggcgtcgtggtggggttgcagcttgctcgcctcgccctcgccctcgccgtcgccgtcgcccccgggttgctcagcttttccgccgccgccaccgcagcttgaagcgcgccgggcgtcgaaacgaggatgagggagtacgggcccgcggcggcgccgcggctgctggtgtccgactccggccgcgtccatgagatggagaggttctcgcattacgtcggtacgcaacctcgctctactactacttagtaccttcgatcgataactttgtaacttggcttaagcattcaatggattttttttttgcgagagcaatattgcttccgattgattgaatggattgctctccgatgcagtacattgacttgcaagaactcaattccatccacgattttcggaggggatcgcatgctccagcgttggaatgtgtgatttatgttttttcaccttgtcttctttgtcgatttcgtaagggaaattgcgctacaaccatttccttttagtttgttcatcactttgtccaatccaaaaatccaggatacagcgcggaattcgagtgtgctcagcacacgcatctagataggcatattattaatggggtggcgtggagattgattagcggcaacttgggcatagaaaattttgagggggtggaaatggaagcgagacattagattatgctttccactccatgaaacaccactagcgagattccaaacaatggcatattctatgtggtttgagttgtagcacatcatcacatattattcttttgtccctttatgatcttgggaccagcactggtttccccccaccttgtgtccttcttgccttttctgttttctcacaaatatgtggcaattttcagctaggcaaattgggtttgaccatgtggatgaatgcccccacctatgtacgctggcctatgattatctgaggaagaacaagggttacgaagaaaacatattcgcgttcttccaaaacagccaggatcccgagactctgattgtaaagttcatcgaggaactcgacaaatgtatacttggctacttctcattccattggaactatgcaacctatataatttcccaggtaaaggagttaggaccttttgccttatggctttgtcctctattgcttccttatgaaactctcctccactgatattttacgtattgatacagtggtgattttcacaggttttgactgtagaaggtgctcctaaaagaaagctcaggaacatggtattagaggccactaggtaattaatcatccttgagctacatgcttggtagttcaaaatatttaatgcacagtcattgcctaatctctgccttttttttatgccaagtattagttgctttagcttgcagcatcttcttgctttactgcagcacaagtttttcttacttgacttggatgtactattaatcaactcgtatgatctcttgtttggagttctttttgtacaaatatttttgtaggagtatcatatatttacagaatctctcctcatttaatgttgtgttggatctgtctccttgaagtgcttattggttgagttgaattatttattctattgactggttattttcttcctatctgatcaaacctttcactggatcaacttcagagctcaaaatggatattttagcagaaacagcacatttgaagtcaaagcaattagatttagatgataggcatgtgcttaggctaaactatggtttctttatttactcctatagccctatgtttggcctgccatgttcctttgaaaagtacattggtaattacttaagtgcctaaccggagaagttcaagtggagaaaatgcttatagtttcgatccaatatggtctcttatatcttgaaaaacatgtttataaccagttacaattcaatccctgtatttaagtagatgaactctgtttctctgacatcaaaactcaaaatgaggtctagcttctgactctccactaaatacaggaaacagagatttgaaagggttacaagaaacttgaaggtgaccagactattctccacattggtggaggagctgaaggccataggactatcttcccatgttgaagcaccacggagtgatgtgatggtcccagcagcacattgtgatcgcagcccagttctactcttgatgggtggtgggatgggagctggcaagagcaccgtgcttaaggatatactcaaggagtaagttgatcacttccatgctcgacattctgttcgtgttttgtttcatctcccttttcgtgtatgtttctcatcctgtggttcaatattttgttaaagctaaaaacattgatctgatctgccaaccagcaggttaatgaggaggagaataggtgaatgagaaatggcaagatgtaataatcaattaggaggagaaaaacattgcttggactttttaatcaaagccagagcagctaaagaatataaaatacgccttttcagaaagcttatcgtgctgctacctgtttcttgatctgcagagcattctggtccggagcagctgcaaatgcagtagttgtagaggcagatgcattcaaggaaactgatgtaatctatcgagctatcagctcaagaggccaccacaatgacatgctgcagacggcagaactggtatttgttagcagctgttactatactatatatgttaataccagtataccagtcagtgagtaaaacggcacatgaccactacatgacaacccaaaatgtacaattgcaattatttacattttagtgtcttggagatgctgtcccacctcctaaatctccacccctatattcatctttactatacattgaaacaagaaactcaatctcctactccctccgtcccaaaaaaaggcaaactctgggtttccgtgtctaacgttgactgtccgtcttatatgaaatttttttataattcgtattttcattgttgttagatgataaaacatgattaatattttatgcgtgacttgtctttttaatttttttcataattttttcaaataagatggacggtcaaacgtttggcacggaaattaggatttgtctttttttgggacggagggagtatgtacatttcagacataccatggctcattgtcagtgacccctcgattccggtgcaggtacatcagtcatcgatggacgcagcctcgtcgctcctggtgactgccctcaacgaagggagggatgtgatcatggacggcaccatgtcgtgggagccgtttgtccagcagacgatcaccatggccagggctgtgcaccggcaacggtaccgcatgggtgttggctacaaggtcacggaggacgggtcaatcactgaggagtactgggagccagttgaggactccagtacagatgaagaaggcgagacgagaaacaggaagccatatcgcatcgagctcgtaggtgtggtctgtgatgcctatcttgcggttgtcaggggaatcaggtatgcttcagaacttaatcctactccactacatgtctacattactgatactatgcttgttcatattactcaaacaaattctgcttgatcttgcctgtttctgctcacgcttccattatgtcagcattgcgattgactcaactgcactattttccgtgtactaacaaagaggtataagcacaaaatttgacacggttaatcacattgtcaggagagctgtgatcaccgggagagcagtgagggtgaagtcccagctgaagtcccacaagcggttcgccaccgcgttccacagctactgcaacctcgtcgacaatgcgaggctctactgcaccaactccacgggcgccgccaaggtgagcttaccaatgcattccgtgttcggttaccgatgttgttatcggggccggttttataacatcaggcacattgagaaatgagaattcaccatcgctcgctggctctctctacagctgataggatggaaggacggcgagagcaaccttctagtggaccctgaagaaatcggctgcttggagagggtgagccacctcaacgacgaggccgactgcgtccacgagatctatccggacggctcggcggcggcggcctgggaggccctggtcacgtcgccgtcgagggcgccggcgcagcgggagatcatggcggcggtccagaggagcgaggcgcgcttccggaccacgtccacgccctcgtagctgcagcacacgatcactcgtgtcaggttggaattttcttttcttttgacacgatttcaggtaggattgggggtatttgggtgttggttgtgtgtggtggctgccaaatggctcgtgggacacagttcgtgttatgtacgtatcatactgtacattgtatcaactgatcctgactccgttaccacccggcatattgtttcgttttgccgggcgatcgagctgcatcgaatggagctcgtcggagtcatcggtcatgtacacatgtgtcttgtacgatgtattccggatctagacaagaaccaacacatacttttcatggtcacttcagtgaaagaaatgatgaaaaaaactcaatgacacttcccatcgaaacacttgtgtcaagatatatagtttgttcgttgagccaatgtccatgttggcatgtcggacgccgtgcaacctcctggcacatatatatactactacgttctgatactctgattggtacatgctcacctgggtggctggttcttcaggatttggatctgtggtcctgtacctgacacccaccgttacatttctgaatctaagatagtggcaggagttgcacttcaccggtgcaaacgcccgcttacttttcaacggaaatctaccgcgttcaggtggcggacgcccattcgctcagaggtgatagaccacgacaccacgccacgcatggataaccagaccagaagaactaaacacgattcgcgagccacactcctgctgtcactcgttgcatctcacctagagaccagcagagtgtagtgtgctgtgtgcctcttgctagctaagcaaggagatagccggagccatggcgaccatcgccgctgccgccgccgcccgcaccgccgtcgttggccggccgtcaggtaagttcacaaagctatcaacagtgctatagtatacttcctgtgtccctaaatatttgacgtagttgattttttagcacatgtttaactatttatcttattcaaaaacttttgtgaaatatataaaactatatgtatacataaaggtatatttaacaatgaatcggatgattagaaaagaattaataattatttaattttttttaataagacgaacggtcaaatatgttttaaaagtcaacggcgtcaaatgtttagcgacggagcgagtaagaattttggtaaaagaatcggagatcattcagttcactgatggaagctgccattgcccattgcgtgcaggggtggctcagctgagagcgaggaggggtgagagggtgaggtgcggctactcctccagggacggcaaggaggcgacgcccgccgccgccgtgaaaggcgcgacgtcgatgctcgcggcggcggtgacggcgtcgtcgtcgtcggcgccggcggcgatggcgctggtggacgagcggatgtcgacggaggggaccgggctgagcctggggctgagcaacaacctgctggggtggatcctcctcggcgtgttcggcctcatctggtcgctctacaccgtctacacctccacgctcgacgacgacgacgagtccggcggcctctccctctgaggccttgttcggttaatccgagaaagagattggagaggggattgagagaataattctacactataataggagtaaaataaatcctctctaaatcctccgctcgcgcgttactcgacacgaggcggcagttaattattttgcattcttagttggtgtagagaccaattgaagttaccacttcgatgagtccgtctactgatcctgcctctatctttttttttttttactgttctgcaaataggcggggcctgcctatgcttgagtgtgcatgtcgaatttggtgtaattaattggagacgtgcatggatattttgtaactaattaagttggtgtttaccttgagtagtagctggctaagtttttcatgaaagtttcaagccagttatgcgttccactatatatagaaaaggttgccacatgcatattcctcttcttttgcttggatactagatgatgaaaggaatggtacacctgcagttgcaaggatggttcccaggttaattgctttcaactctctgtaaagttaaatataaaccagcactaataatgttatgaaataaattaagcaacaacacgaaaaaaaaaagaactagcactatgttcaattgctgcagctaaattgctaatggtataaaactgtcgatgtgtttgtcatgcctagagatcactagaggtttggattggctcaacactgacaaaaaaaaattgacaatttgacccatttccgaaaacttatttcgcaaatgaaccgcgcctaaaattacttatttcaaaaatgaaccggaggttcaacgccaaatgctccggcgttgagcttagccacctcagtgccaggtcaaccagtgctaaatgtcgtgtcaccgtggatggcaggccgactcggtgtgccgacgtgtcaaagtttagcgccacctgactcggcgctgaggtgtctaagctcagcgtcattcaatctggcgctgagcttcgagacattaaggcccacctgccccggccgagagagcgagctctctcatttctctcccttccccgctccatgaaaactacgacggcgatggcggcgttcctctccgagccctaatccccctctaacccatgggaaatcaaggggatttggaggggatttcatgtggaggttgtggagtaaggtaaccttctcaaaatcctcctatattttcttcatttggtgatttgttttggagaagagcatgaaccctaggtttgtcgtttttgtgagacaaggaagatcgacttcatttatcggttaggtgagttctataggttaattttgaggggatttcattcatcggtactgaaccctagttggtaggatggatttggtaggttccaatgtagggtttgggaagaatttttattctcattggcgatgtagtatgtagtgaatcgaatgaatgtgatggtatgaagtttgtgccacattgtctagtttggtttacttgtgtaagttagtcttttagtacccttgtcgttgtttaattgaaatagatgtactaatagtattacttactttgaaaggtggtcggactttgtagatggagagagttgttcatgtgcactatggtggaagtgtcctagagtcgagtaatggtggtagtcagttcgatgggatgtcggtgaagatgattgtttttcaatctaagcctaccttcgaggagcttttgtgtcgtacgaaggatattctgggttggtcggacaaggtggtatccattcaagatagatatgatatggggggagagcctatttcacataagcaaatgctagagttgaatggagagaccgaatgggaggcatatgttgagatagtgaaggaatcacggttcactatgtgcacttagttgtcgtggaactacgaacctattttgttaaatgtgcttctgcttggaaactggtttgggatgcttctgcatgggtgtagggatgtttgaaagtttaaatgctaatttctgaatatacctcctccactctcttgcgagcttttccctccttgccgttgttgcgtgatgtggagaacggcaacacctggtcggtgctctggagagcacctttccctttgcgctggggtggtgggtggttcaagctgcccgctccgacgaaattggccatggcagatggaccaagaggtggagggaagccaaggggacgacgcggtagcgttgcgactcagaacaacggcgctagcggcggagatgaggtgatacgggtgggacgcgtctggaactctggatctgatgggtaaagtgaagtggtgtgtgtttcttacttgttgctgaagaagggaaggtaaatgggcttaggcctaaactacagtgcagctcgccactgtatacttaacaagttctagtgattcgtcgaggggcttaacaactcatgtttaccatgagtagatcgatgttatataagtatgtgttacgatgctaaaacaatttctgaaagttgaaatgttaatttctgaatagaaagaatctgtccatgcaaagatcaaaataaattacaattggtacaatcatatatttcaatggaaagggatgaaattcaagttgaggtgatacataccattggaattgttgcaagatatgaattaatttcccttcttcatatatagatagcctacctttgatgtgtttgttatcctgttcttttcttgcatgtactgttcacttttcaatttcaattgcatctaggaattgaacagtacgatgttttatgatctttttagtttcttggcattacttcattacaatctataactaaactatttcctcattggcgtttgctccatacatgcacattacttaaatatcccgcgtccagtccgttgcaggtaccgtgacgcatttcgctaacctagctaaccgcaacgaggaattggaggcccagcttcaacaacttcgctccagcttcaacatcctccaagcctttgccactcccttcgtcgctgtcctgatttgtatcatcgccatcgctgcgtggcgtttcgcttaatccgaccggctacaagttagccacaagtatacttttgtgtagcatatggtgctaatgccaatatggtagtactataaagacaactagaggtgaacgcgcgcttcgcgcgttgcaccagtggtgccaggagaggaaaatcattgattacatctgttggttctggtaggtaactgaaacaaatgctatttgcaaggtctgtgaaggtcaagtataggctaacgacatggtgtgagatttaggtttagtgtagtgcaaaaaatgaagttttgtgacgtgagcatttatattgaaagttgttatagaggctaaaagctaatcacaacatatatgcagattgtggacagtcctaaatagcaaaatgtgccacatgtttgatggcaggatagacagtacatagtagttttatagtggtagcattgaaacagttctgctagatgagcacataggagtataggactataaaactatattacacatggctaaattctactaatatggtttggatgccttcaccgaattcacacaggggcccttttgttgatgtgcaaatggaagtgcaatatgttttgctatgatgaattgcttcccccgtgtacatagctgcctgagaagtgatgcaaaaatacaattttttttatcaatactggcagtcaataatcttatggcattgaactactcaacaatattagaacaattaagcatccttgtttcctagtaatgttctttttctgaatgtgaaaaaagcaagttaacatagttgttttttggtatatattcagattgtaagaatcaaagaagcaattgccgatgtcaagtaatctgtgaatgaattaactgaaggaccaccagcaggtacaaatttagcccaatatgaggaaattaattaaacatctcaaatagcagggggggggggggcacaaaaaggtaccaaccaaaagcaaagtaatgatttatccatactaaaaaaacaaacaggtaaacaatccaaactgttttcagtaattttctaataatcaggtatgtgaaccaaataatgcacacagcagcatatttatttagcaaagaaagttggaatggacggtattgtaggattgtaaaggtcaattctgtcaagttaacctattggtttctggttgtacatcttttacatagattataaaaggtatgtgattttaatacctaaatcatagcaagcacaataattttatgagcagatactatcagtatgtttaaaggaagagggtgaaagtgcaagctagtcaaataatacataacttagttaaaatgggattttaacctacagggcagcactcatcgtcctaaactgaagctttatcatcccaaaccaatagttatattatcaagagtcctgaaaaaccacttctatggcaagagcaaataataacattagtcgtttcaaagaaaacttcaattttagaaccctaatcaagccaatcttttatatgctagtctaagcattacctaatcatcacatattaaataaaaaagggcataaatattagaagcattaggtagaagattcaaagtgagctgcaataaaaactggatgcatccaatgtagaacatgagaagcatctgaaggacaagtcagttacatttgtaaaatatcataggcattactgaatgcaaattagaaaacaatgtaacatcacttttttttatatcaagttaaattctgttgcacatcgtggggatgtcatgataatttaatatgttcagagttaatgtctattatgtcatgataattaattttttttatagagttaccaatcttcagctataacttgcaacagaattcttgttcacaaacaaccaaattatagaactaatatatgcctatttggtaaacagataatcaactaaattttcacttccgtaaagaacatgtcaaatataatttaaacggtgaactcaaggtaggcaacgaacaacgatcagccaaactggttgccagtggtgccatttctcctcctggaggatggcaccaatgcaggcatcctttgttctgatctactatgttgtgtgcacctggagtcttggcgtgttaaggcaggcatcagcctatcatagcctagttttgctactgaaaccattgcaccagctaaagcctacaagaataagagaagtggacagctatgccagtcctttgatcttgcaccaatccatcatgttttctttggttcttctaatattattcgcaaagcaataatgtaatccattgtaatgcagcagctgattggcgttgggaagattagatagcttagaatagaattgaagctatagatggattgtgcaacaaattgagataaattgattttctattgttaggcgccggccctaagtggcatagcgcgtagctgtgctcgaacgggagggcgaggacgcacgcctcacctccccggagccgtggtggaaactaacaggaactgggattaacttctttcttgattaatcacttaaaccgaatggcctatataggcttacaatggaaaaccaaacagctactaaccaggaactaacaacttaatcttcctaacaaacttaatcactgaaactaatcctaacaacttgatccaacatcacggcgcctgctctggctgttggcgtcggttccggcgctgatactgaatgccccacataacatctatagtgcaaaaagagcagacacatagcgagctttagtaatcacatccaaaaataatacagagaaaattacagttcattaatttatttttggtgcaacagtaatatacagttctgatccagacctgtataacctttatcaaatgcacttgtatatttttggtacaacagtaatatatagcagcagtagtagtgattagtgtgattagtgtatatgtttagtctcagattctgcatgtaaaaggtcatctaatgtcaagttacaaacatgctcgttataaattaattttatagaagtcactaccttcaaggggcataattagtaatgaacaaactaaaaatgcaaagccacagtctattttgatgaagatgcatgactacatttggatggagcattatcaaattattatccacaaaaaatattgtacattgctatattttgctggaacaaatcagcatactcatacttcaacaaaagatatatcaatttcttatacttggaaacaaagaatcttatgcattaactcatttgtaatttaaagtcatcagcatgctacaatggatcgtagatgaaccccttaaagaaatgcacagccaaattgacagcaacactaccaaagcaaagctcgccgccatcaaagtggggtcacattcggtggagatgcaacctggttgtggtggcagatgaccttagatgctgtgccagaggaccagtagggcagcacggccgtgacgcaaggggatggaggtggcagcatcctctaggagccccgcgccgatgcccttctctgctttgcgtaagctcaacaaagcttcactacaagctgcattcacacgctcacattcatagtgttacactgatttaaacttgcaaagaaaaattcaatacacatatcttcatcggtccaaattaatcacagtatcacactaagaccaccaacttggcaaagatataacatgcagtatgaaattccagaggaaactttcctctcctcacctccttccaaaaaggcagaagaagaggtaggacggagctgacgaggagccctccatgcggcagatccagcagcacccgccgtactggagaccgccgctgtccgaaacggtacaccaatgccacagatcatgcagctccctctccaaatcggttcaccgacctcctggatccagtgattccccgtctcctcgacgtcccacacgcacgtccgtggccgcctaatcgcaggcatccgctgatccggaaatgaacaggatggagagggagagggagagggagagaggggcagtgccgggcatagaggtagaagagtagaaggcggctcctggcttcccctcacttcagggcggccggatctgccggcgaggaggccggagtcaccggatccgacagtcccggcctcctcgttggcggatgcggcgcgggagcgagaggatggcgatggcaggacgacggcgcggcgacagcaacagctcgcagtagggagtgcgcgggggaggtcgccaactgcgggaagaagaggatgaggggacggcacgcggcggcggccgtcgcttgggcaggagagagagcggagcgagaggagaggaggcagaggaatggtggcggctagggtttggggaaaggggtgagggttgcaaaaacaacccctaaacttctagttttcagagcgcggttcaattttccgttttttcgcttcttcatatagaatattgttttcttaagaggtcctctaagtaagagtgcacaacgttagaactaaggaccagggatctataacaaattatcaagtaaatgaagggtgtttttgcaaaatcaccaacgacgacacggacgtgcgagagctcacgaaaaccacccgccatccagcgcctcgctaacgcgtcggcacgcgcaggtggccacgccagctcaaaaatctccaggagccgcaaatctcggcaggtttgtatataagcgatggtaatggttcagttattgtaagtattgtcctggtatcctccaagttgatgtgcacaacttatgctgaatatgacttttgtatggacctcgtcatgtaaggctgtcagaattagcatcacttttgcacctatggctgttaggcacttctatggaccttttttttttgcggggttctatggaccttcttatgtatggctaagacttgttctctagttaagtactgcttctatatatgttaaatggtttgcttagttgtgactttcacttcgcaacattgctttggttgcgcactggttatcaaccgaatgactgcatattttttgctgtgttcacttaactccaaatgtgtcagaagtaaacatagttttaagcctgtcaaatatatctcagcgccaaaccacccggcacggaaccagccatactcagtgccaacctatttggcgctgagatctagcagagcagccagccataccataatgctcggcacagctactaagttccccccttcagtgccaaatacaatggcgctgagcttagccacctcagcgccgagtcgggtggcgctgaactttgacacgtcggcacactgagtcggcgtgccatccacggtggcacgacattcagtgccggttgacctggcactgaggtggctaagctcagtgccgaagcatttggcgctgaacctctggtttatttttgaaataagttttgtgcgcggtttatttgcgaaataagttttctgaaagggtcaaattgtcattttttttgcagctctgaagcatgtacaagcagtagagaattgtgccctgtgtcgtccctccagtaatcaccctacaaaagtgtaagtaatggtccaatggggaatttggatggataaaattatgagggccaattaatgtagttaccaatcagcgattcccaaccttaagcaagtttgagtttactcatctcacgatctcatgcatcctactatgggtgtgtttagttcacatcaaaattgaaaatttgattgaaatttgtctaaacaagatttccgcaatactaaaagggggtggctatcaagctggaaaagtggatggggttgagaaacaaagaattttatacaggttcaggccttcttaacaagaagtaataccctactcctgtccggggattgatccaccgagtgtattattgatcgtatgatctgggagcagatcgtgccccaagaggcacccggacccctccttatataggggaaggggtccgtattacaaaatacagtccatatccctaacggaataggtagttacagataagattcaatcgtaaccgactaagatcccgagtatttccttaacatacaagtttggaatttaacccaagtccctttaaagatattctatctatacatggcaccccatacctagtcggattatacatgccgtgtaggtatggggtatccataatctccacagtagcccctgagacctttacagtcaacaaaatagttttctctcgtaatcccaaacgataatccgagcactccaacttcttctgccttggtctcccgagtatcaaaatcaaagactgtgaatggctgaaaatagaaaaaatcaggtgcatcgactagatgcacctaattaggtgtagcccccgactaagtgattagttaaaaaaactaaacatatagtcaaggtgtaaataacatccaaccgagtggttttacaaccgaatcatccaaagtatcatacaactaagcatatgagacgtttgataaaatatccagccgactgctttagctttgatataccaaaaatggaaatataaagaaacccgagtaaaaaatactataaggtccataatccaacacatatgacaagaatccgagtaaaaactctcaaaaagatccatcaaatgtgatataaatcgatgagtctaaataacctaggccatgactcacgtcataatcaaaataagcatataacatgccgagagaatgactattcaaaaaccagtcacctcaacaaaacccaaatagtttttgcagcctaaaaaggcctacaaaatcagtataacacttttctgtcaggcacctttttatttgcattgtagtaattccacagaattatctaactgcgtcaaaaaggattttaacagcattgggctatattgtcgtgagcaagtgttgccaaagcaaaaacaaatgcctaagcccctaaggatcacaacttaaccacgctgatagcaaaactgggctgaagtactgtttaggcccaggcccattagtactcccgataccctaatgagataacaccgaaggcatagcgtcgttttgtcttccccgccgaaactcttgccactttccctactcactgctatagtgcgaaatcacttcggtgaagctagggttcacaaatcccctccaatccatcctccaaagttccacaaaaatcttccgcgcaaccaccgcatcgatctcctatccattcccggccatatttcaaaccaaatcgcatcatccaatttgcatccatggcagaggagagagaaagctttgaaagtcagtgggtgccctctgatgtgacagaggaaaacttgaaggagatggtggcgcacggcgttcttccggcaaaggagatcattgggtggcgtccggcgtgcggcgaagcatttccaacccctgacacacatgaggtcgtggtattttctcatttcttctatggaagattttctcttccaacctcaagattcttccgggggattttggaattttatgggattagtttgcatcacctaaaccccaattccatagtccacattgccaattttatccatgcttgcgaggctttcctgggtataagaccgcatttttccctgttccgtcgcatcttcttcctcaagcctcagccaaacaagagcaaaccatgtgttgtcgggggagccggtttccaactaaggggaaccttgagccaaaaatacttttccatgcccttcaaaacttcgaataagggttggcatgcaaattggttctatgtgcaaaatcccgagccagcgcttcccgagtattcttgtctacctccagtatatcaagacacctggaactcgcttcccatgggagatgaggtggcccaagcacttgccctgatcgatcgcatgctgaagctcaaagagcaaggtctgcaaggagagcagatcacccggcattttattaaaagccgactagcgccaattaaagagagatcccgcacaacctttgagtttgacggcaagcatgaccctaaccgtgaagatctagattctcttgagtttaaagtcatgaaggagagaatgtacaaaatcttctcgaatgctatcgtggtcagttattcgcacttgttgccagtggtgccatacaacgccttcaaccctcctccgcgggtatgtatcaaacatctcagcccttctcaaaagcatgcttttatcttctgcaaagttaattgaaagcttggaatatcatgcccaggaatttgccttgatgaagtcggatcctccaattgctcaacatcgctcgccccgtcggcagactagtcaggcgagtggagtacaaaaaattcggtccgatactcaaccaaacacctcgaaatcgactaaccagtcagactcccgtaagaggaaattggtcctgagcgatgatgaaggtgatgatgccggcaacaaaggggtgaccgaaaaacagccaaggcaagccaatccaaagaagaagacatccagtcgtcccataccaaaaatcaggaaatcatctaggtacaagtcgtttagcaatttcctttgtatcgccagtcactcactattgaagtagtactgatagcatatctcaaacttgcaggaagccatctgatatagatccttccggaaaagaccctgagccgaatggcgcggagactagtccttcaacagaaaccaggccgaccgccgaaggtcgcccgagtgataatcaaccagcaaccgataatgtagaggccagcaacgagcccccgactggaaaccagttggccgaagctgaagccaatgttgaacaggagcccccgactagagaccagtcgggtacagaacaaaataaggacatcccagaagtagaaactcaagctaacagccctcccaggaaggacgctggtgttgacccgggatccaactctcctgttaggataaaaggacctgctcatccccgaccggaaatcataacaggtaaacaagtcctccaaatccgttttgatccaacaaactttcttcaattgtctcaccattattcatgaatatataaggcccaatgattggtgacaaagaagaggtcctccggatacgatcggctgaagattctcgcccacccatattagtcaagtggtgagacgatgaaatgcatccacagggaatcgtgataaataaacagaaggaagacgaggaagtgtgtctgctgaaaaagacacttggacaagctacccgtcttgtaaatgtaagtctctttacatacagcttcaatcatcctgtcggccactttactgaataaagacgcacttgtaatgcagagaatccatcttagaaatgaggcaaaaactgcaatcctcgagaaattggttccccaccttggaaccctggaagcaaccagagatcaactgcgtgaagccaaggagcttgctaggaagactgagcatgaccttagagaccggatcgccgagctccaagactccaactttgagctaagtggttcatcaaaaggtaactctcatccttatctgatttgtttcatgctgctattcatgtgcgattaaccagtggaaagcaatatagtgaaagctgccaagatatccaagctagaaaggcgaatccaggctctggagaaagacaaggtcgaactggcaaaacagagggactcggctctgaaagatgtcgaaggtacttgtagctgaaacttcaaaaaccactctcatcttcatgcccagtcattgatgtgaatttatttgtacagatcgcaaaatcaaatcccaggctcaattcgacatcttggttaacaaaatcaagaagcttgaaggagctagagatgaagtcgccaatgccgctacgccactcgtccaggccatgtttttcaataacaatggtccgagttcaattgatgctgtcgaaatcttcgacaagcttagaactgctccggatacatattttaagaacatcaaagaagctggaagtatgggggcaagtctagagttggcgatgaccaagtccttgtacccgaagattgatattgatgttgttgacggcttcgcagacgggacaagtgaggaagccgcccttgacctcatcagtgatgcgcaaaaagctgccgacaagatagccgctgatgtagttgagaggttacaggacaacgatcttaagccgactgggtctgataactctaatgattaaaaaactgaatctgattgattgtgtattctgatgataatgatgatgatgatggaggcacaatttgtacaatactgatgaatttatgctgtgcttgatgatttaaactcagctctagatttcttaaaagtttttatcaaaccttattgagcctagaacccgcaaaagttgttaaaaactttcagtcctcattggctaagctaaaaaatcaaacaagacaatgataaatcaagtaagcaaattgaattgataaaaatcacactccattattattatagtagcccccgactggtaactcaaggaacaacttgatgttagtagtcaaagaggaagatacaaaagtaatgcctaagcataaaaacgacgaagatgctcaatattccaagagttgtcaacatgagtaccgtcttcacacatgagtcgataagaatctggccgagtaacttcagaaattatgaatggtccttcccataagggagatagcttatgccgatctcgtgtagtttgaattttcctcaaaaccaggtctccgactaagaaagctcgtgaaagaacgttgcgattgtgataacgtcgtatcccttgtaaataccgagccgactggattaaggctgcttcacgggcttcttccagtcggttgagatcatccactcggtcttctccgtagcgctcctccttgaagttacgaaatcgcaaagacttgtccataccattggtcgaaaactcgtacttttattccttaaagtaccataccattggcgcgttcgacttgtccattgctcatgggatgcgctacggaggcataacaaattttgatgccgaagtcttcaaaggaatctttaaatactccgccggtgaattgagtgccgttattagtgatgatccgattaggtaccccaaaccagtgcacaatgttgatgaaaaaaatctatagccttgtctgccgtgattgtgacgactggtttggcttcgatccacttggagaatttatcaacagctacaaagagatgagtataaccaccgatagcttttttgaatgggccaaccatgtcgagcccccaaaccgcgaacgaccaagataacgggatggtttgcaactcctgagccggtagatgagtctgtcgggtgaaaaattgataaccctcacatgttcgcacaattatgtcagcatcagatacagcggtggcccaaaaaaaaccctgccgataggccttgctaacaatggttcgtgtggcagcgtgattgccattgatgcctgaatgtatatctcttagcaattgccttccttcctccaaagacacatagcgttgcagaatccccgatggacttttcttgtacaattcggccttgtgtatgccataaagtttgctgcgcctggagattcgctcggcttcgtttttatctggagggagttcttgcttggttaaaaatttaatgaggggctctctccagtcggcttcaatcatgcttacttcttgagtgtccgtggcctcgactatttctttcctcggtacagttggttcataaaaatgttcaacaacacgtcggaaggagctgcttctcgttttgaaccaaaattagccagtctgtcggctgcctcattattatgtcgaagaacatgggtcagctcaaggccatcaaatttatcttctaacttgcgtacctcctgccgataggcggtcatattatcatcaaggcaggaccactctttcatgacttgattaacaaccaactgagaatctccacaaactatcagacgccgaattcccaaggagatcgcaatccttaatccgtgaagtagcgcctcatattccgccacgttatgggacgcagaaaaatgtatccacaatatgtagctcaacctctctccagtcggggagattagaacaacccccgctctggtgcctgaaagcctctttgacccataaaaatgcatagtccaatactcgatcttctctgcaggcgtgtcttcttggcacttggtccactcggcaacgaagtctgctaaagcttgggacttgatcgaagttcacggcttgaaggatagatccaaagacatcaactctaaggcccactttgtgatccgcccatatgcttcgtggttttgaagtatatccccgagtggaaacgatgtaaccaccgtaacgagtgatcttgaaaatagtgagataatttcctaacggtaatcaaaacaccatataacaacttttgaacctgaggatatcttgtcttggagtcggccaaaacctcgttgacgaaatagattggtcgttggactttttgaagatggccttcttcctcacactcgacaaccaggaccgtgctcacaaccttggaagtcgccgacacgtataacaacaacggctcttgcggatgtggtgaagctaagactggtggagtagtgagaagtttcttgaagttttcaaaggctttttgtgcttcaggtccccactggaagttgtcggttttctttaacaacttgaaaaagggcatcccccgctcgccgagtcgtgagacaaatcgagtgaacgccgccatacatccagttaacgtttgaacatctttctgggaactcgatggtttcatgttgatgatggcgttgattttctccgggttggctcgtatgcctctatgggacaccataaagccaagtagcttccctaactgtactccgaagatgcacttttcagggtttaatttcatcctgaaagcgcggatgctcgcaaaggtctcttctagatccgtaatcaaatcatccttctgcttggtcttgacaactacatcatcaacataagcttcaacgttgcgaccaatctgagttgaaaagcatctctgtatcatgcgttgataagttgctcctgcattctttaatccaaaaggcatggcgatgtagcagtaggccccgaagggcgtgatgaacgaagtcttcaagcagtcggactcctttagtcggatctgatgatatcctgagtagcaatccaaaaaactgagtaactcgcagccagccgttgaatcaactacctggtcaatgcgaggtaacccaaagggatctttgggacaagatttattgaggtcggtgtaatcaacacacatgcgccattgccccgtcttcttccgaaccaggactggattggccagccagtcaggatgtaggacttccttgatgaagcctgctgctaacagcttggtcaattcctccttgatcgcatccttcctatcctgtgcgaaatggcggagtcgttgctcgataggtttagcatcttccttaacatgtaaagagtgctcaatcacctctctaggaataccaggcatatcagatggtttccacgcaaagatatctttattattttgaagaaaggtgatgagcacgctttcctattgataatctaactaagcgcctattacagcagtcttagtagggtcagagggatctagaggaatcttctcgatcttggcatcgccttctccgccttttgacatcttggttgcagacacttctccttcggttgcagtgaacgcagccagtcggatttcttctcgagcgagcgcaatctcgcgggtctgagctatctcccaactttccttgtcgcaagtgacagcttgcttgatgtcactccgcagggatatgactcctcggggacctggcattttcatcatcatgtaggtgtagtgcgggacagccatgaacttggctaacgccgggcgtccgagtatggcatggtacgctgtctcaaaatcagcaacttcgaagcaaatattctctgtgcgaaagttctctcgagtgccgaaagtaaccgacagagtaatctagccgagtggagtagaagacagcccggggatgactccgtggaagggcgcattacttggcttcaattccgtgcgagggatttgcatgtcgtccagagtcttggcgaaaaggatattgagtgcagtgccaccatcgatcagggatcttcggagcttgatgttgcaaaccactgggtctagtaccagggggtaccgccctgggtggaccactcggtcagggtgatccgagcggtcaaacttgatagttgtttctgaccaccgaagatattggggcgtgtcgggctgaacagcattgatctcccgttcagtcagcttttgctttggcttggattcataagccaggggtccgccaaagatatggttgagctccttgcgggggtcttggaaaccagtcggggcatcatcttcatcatccttcttctttgatgtgctttgatctctgtaagtcgacttgcgtgcgttcttggcgtattgctctgcgaactgtttgtaaacgaagcagtctttggccgcatggttggaatttggatgatgcggacattgagagttcatgatcttgtcgaaagtgttgacgcgcgaacattgtcgggaggatggtgtagtggttgccacaagttcctcgggcttacgcttgcgatccttgtgattggtacttccactccctcctgtggtcggcgtatctttcttcggcttccaagtggtgcccgactgcttagatgcggtgacggcatcttcggcttttgcgtactcattggctttctcgaacatctgcttgactgtcctgggaggcttgcgtccaaacttgccaactaagagatcatggtgaatgcccttggtgaaggcggcgatgatgacgtcgtcggtgatatcggagatcttgttgcgttgctcggaaaaacgtcggatgtaatctcgaagggattctccggacttctggacaatgttgtaaagatcgaactgggtgccagggcgttcaaaggtgccttgaaaattggcaatgaagtggtcgcgaagttccgcccaagatccgatcgtgccacggggtagcccgtgaagccaggaccgggcagaatccgctagggccacgggcagatagtttgccatagctttgatgtctcctcctgctgcgcgaattgcgagactgtagacggtgagccaagtctcagggttagtggtgccgtcatacttctcgattccagtcggcttgaagccggctggccaatccactcgacgcaggtcgcttgtgaaggcagcaactccatccacgtcgtcgtcgtaacgatctggtgaatggtgggggatgtagcctcttgccgcacggcgctgattgatagtttcgcgaagatcgatgggacgcctgcgatgtggggagcggggacattcagctcgacgctccctgtgtcggtcaggaggcgagtgaacggattgctcgtcgtgatccctgctcctacgactggttccggcgccgacgacgctgaggctcggttggtgatagtcttgagattgaagaggcggaactcggctgccagttggcgtgcggacactcgcggagttaaccgggaccgaagctgcgatcatggtcttggtctggttcaagatgttgacgacgtgattggcctgattgagtgcgtcttccttgaggagggtgtcgaggagggtgatcgctgcaaccacgttctgttggggggtgcgaaaaaccgccgtcccctcgacatcttgttgcccgatgagttctcgtgctcgtcgcccggcctccaagcctcctttgcagctcgctcgcgctcctgttgctcacgctgcagccgttctcgctcttgtgcttggcgctcctcctccagtcggcgacgtttggcttcctgtcgcacgcgttgttcttcttcttctcgggcttgacgctgtttttccgtctcgttgtcggccatgaaaatgccgaagtagagggggcgtgtagtaatcttcatagccttcgtcgaagtcgtcgaggttgcggtagtcgtagcggtagccgaagtcgtcgtactctacgatctccgttggtcgtgagtcgacaccgggggagctgaggtagccgtccaactgtttcgtcgaaaccgtgccgagaggctggagtatgacaccgacttccctagagctagactggatcggggccagggcggatcccgcctagacctacggggagatgacgctcttgtggtgaaaacgacagccaaatcgttgaggagtttcatcaggattggcggataggctctattgtcttcatcgggtcgtgttggagtagattggatctcgtccgagtggtttggggccaactcggttgagatgatcttggggtagatctcggccaagtttggggtacgaacggggcggaaacctggtctcttcccgactggttcgaatccgagtcaagaagagaaatcttgccgaagtcgttggtgaagaagttgaggctgccgaaccggaacgcctgcccgggagggaagacgaagtcgtcgatgccggagacgaaacccatcgcactaatcggcgaagaacttgacgctacccctatctggcgcgccaattgtcgaaacaagattttggcaatactaaaagggggtggctatcaagctggaaaagtggatgggttgagaaacaaagaattttatactggttcaggccttcttaacaagaagtaataccctactcctgtccggggattgatttgccgagtgtattattgatcgtatgatctgggagcagatcgtgccctaagaggcacctggacccctccttatataggggaaggggtccgtattataaaatacagtccatatccctaacggaataggtagttacagataagattcaatcttaaccgactaagatcccgggtatttccttaacatacaagtttggaatttaacccaagtccctttaaagatattctatctatacatggcaccccatacccagtcggattataaatgccgtgttggtatggggtatccataatctccacaaaattggaataatgtgacggaaaagttgaaagtttgtgtgtaggaaagttttgatgtgatggaaaagttgaaagtttggaactaaactcggcctataatatataggacgattcattttgcttgaagattggtgatctaccggtatatttcctccgtactaaaataaacaatccagtatgaagtatgatatatcagaatcctattgttacgaaatccggacagtagatcgttataattgcccaaccaaaaaaaaaaagatcgttataattgccagtacacgaaggaattattactattgggccgattgggtcaataagcccatgagagcccactgggccggtgctgctgacgtcacgccgagctacttacctccgcgagcggccacaactccgctcccctcccccctcttcgcctgagtcgagtcgcctcccccaccgccggccaaccatgctgccgccggccgcccgcctcgcggcccgccgcctcctagggctcgcgacctcctccgcctcggaatcggccgcggcgcgacgcttgtcccgttctccggtcagtgcccccctccccctcctccaaatgcctctgtatctcctcgctgttcgtcggcggagctttgccgtcctgatctctccctccgggggcaacgtctcgttgcagatctcctacgccgccgcgggctgctcctccaggctgttctccacggcgcttaactacgtacgtgaggcgcctcccccttccctcggatccaccccctaccctcttccctgatctgtctgttttgtctgaggatgataatgagtcggatttgtgggtttgcttgttgtgcagcacctcgattcgccggaaaacaaccccgacatgccgtgggagttcacggaggccaacatgaagaaggtgctgttgttcgtctcgttcattcatttccctgtgatttatgttttggattggaacagtggctggttttggagtagttgtggcagaatttgttcagttttgttttcggatgttcagaaatggctgttagggtaccattttattcaggactattagataataatataatcttacgttggaactggttgctggttatttgagaaggggaaacgttatctgtcatgtaaaacctttagaaatgtgcaaatctgcaaatgtccaaatgtaatagagacgtggggtatagtgttctattcctttgacatgggatttaggttttgtgaatacggtttatatcaattgtatcagctattttggttatctggcctaaaatctctatttcaataactaattcaggttaatgagatattgtctcactatccaagcaactacaagcagtctggtattattccaatgcttgatcttgcccagcagcagcatggtggatgggtgccagttgcagcaatgaatgctgtaagtcccttttttatgagctttcgatgatcaactgttttccgcctttaatgtgctatatcctgttttcaatacttcaattttcagaaagtgatgtacctcaacatttgttagttgttacaacccacgttagctatagttatattggacttgcttagcagacattcataaatcaaaaccttattgcactggccttgtttctgttcacttcttcgtcctactgaagatgggtgacactaggaaattaggagccttaatagtaagaggcattggagaatgggggttggcaatcacaaaagaaaaagttcttgtcagcatatcagttgacatatttatataattataattacaattgagttaatctcctcaggactaggactattacaataacattgctactgggagtgttatagcttatgttacattttagatattttgtacatagacccaaccaccattccaccaccactgtgctcacaaaaagcatttctgacaatactattttcatgtcttggactttcagattgctaagatcgttgaagttgcaccaatcagagtatatgaagttgctacattttacacaatgtttaaccggactaaggtatctttgcatgacttagtattttgtacttgttaatccctccactagcatcttttcaccctattttgccatgtaggtgggtaaatatcaccttttggtgtgtggaaccacaccttgcatgattcgtggttcacgtgaaattgaagaagccttgttagaacatcttggagttaaacggaatggtttgtattattcacataacttatcctatcaactaagaataacacttcctgatttgttaccacaaacggtcttcgagcatgtgtttctcttgctatctctgtgatagcattaacatttttctttcatttgcagaggtgaccagtgatggtttattttctgttggagaaatggagtgcatggtaacttcgagatctataattttctgtcattttggatgcttgcaaataggtgttctagttgagttaagtgtttaactatagccaataggaatggtctgtaggattttgtcagtgaatgattcagtactctaatgaaaaaacataagtacaaggcaactttttattcagctttctgttatatgttcacagggctgctgtgtgaatgctcccatgattgctgtggccgattattctaaaggttcagagggttacacatacaactattatgtaagtatacacattgatgcatccgattatctattgttgatgacttatgctagtacacgcggtggaaattttagtagaaacatcacagcattagtaagaattagcagctggtgcccactcgtgttagttcatgtttatgcacaaaatgaaacattgtcaactgaagaatataaacttgcatgttataggatgctgggcccctgggtttctatacttcttagcaggcgtctttggagaaataatgctaacatagctacatttttttgctaaacttccatgctatagcagtactgtggcactgaaagcactaatgccaacagagtaacaaaagacgagtggataaaacttaacaaaacctgcctgccttttgctgagagaggaagaaaagacttatttgtgtactgtaactgagcatttccatttccccttttcaggaggacctcactcctaaacgagttgttgagatcgtcgagatgctgaaaagaggagaaacccctcctgtaagctttgctcttgaacgaaataattcttttgatatttctagcgacaagttttactcagtttgatgttatagatatcaagccccaccattggtttaggttgcgaactgattttgatgattgtgatgatttttgcagcgcggcacacaacacccagagcggaaaaactgtggccctgctggagggaataccaccttgcacggtgagccgaaacctcctccgtgcagggatctagatgcttgctaggtttgctttgaattacaggcacacaaataagttgggccacactatgattatatggtgtggaaactggaacaaagcaaggcgatgtgttgtttgtattttgatcttgttttgtttacctctgcccgcatcttttttctctccttttgcaccatcagagaaatggtacattgataatgacgatatgttattttgtcagctgacatgaggcggcagtggtaaaaagatttgtattcgtctttcggcaaagataaaactcttggacattctctttttgggcattccttttcagcttctgattagtgatgagtgcccattaaagcacgacatcatcgcgtgttacattgctaatctagctgtttgatcttttagcagccgttcatgatttgatcatgaacattacattcttctccaactaagttactctagaaaaggttagggcctgttctttgtctgctcggatgatggattaagtgtatgacaattattcaagaacatgaaccgatgaattaaatattacagggttgaaagttgtattttaaaaatgaagttctaatatatgttgatgaagatttttttaaaaaaaattatagcgtttaaaaacttggaagcgtctcctcgtaatccattactcgtaaacaaaaaaaagaatacgacctaaacagctaaggccatgtttaaatcccacccaaaaatttgttaccccgtcacattgaacgtttgaacacctgcataaagtattaaatataggctaaaaaataactaattacacagattgcgactaatttgtgagatgaatcttttaagtctaattgctccatgattagataatgtggtgctacgataaacatttgctaatgacggattaattaggcttaataaattcgtctcgcggtttcctgatagattctgtaattagtttttttattaatacccgaacaccccatgcgacactctatgtactacccgatataacacgccaaaatttacgaccctgtatcaaaaccaccccctaaacggctaaactaatttcggtgctttctctcagggaccattttgaatattacgcgttattatttggacctacctgcaaatatctccttgtctttccgccatcagctttcccctcctaaacctctccccattccctcgcaaaaccctcgtctcctccacactctgctcttctcgcaaaccctaatcccacgcgcggccacctcccatggcgcgctcgacctccctcaccgaggcggaggcggggatcacctgcttcgcctcctccctcccgggcttccgcggcgtcctcaagcaccgctactccgacttcatcgtccacgaggtcgcccgcgacggctccgtcgcccgcctcacctccttcgatctccccgacgaggtaagcttagccctctcgaccccgattccgcggctccctcccgggatccccgattttttttcatcgcgctagctcagctccgccgtgtatcgcagtgcgtggatgtgagtgaggaggacaaggcggcgccgtccgccgacgcggaccactcgcaggccctcgagtcgttccgtgcgctctgtggcgatgcggattgcgacgcgttgaaggggctcctcgagaaggcgtccgcgggggctgaggctgatgtatcgccggttattctctcgccggacgccgataaggctcatcgatcggttggtttgatcccccagttccagtttctggttgtttatgtggttgagattggtggaaatggtgtgatttgggcgtgtttttggctgtaggaggtgcataatttcttcaagaggagcttcaagtttttggtcaccgacacggtcgaacacaatgatggagttcagagatgcattagggtgcggctgggatcaggagctagggaagggcggggtgccggtggaaaaagtggtggtgggaggggaaggaagaggaagaacatgggtggttctgattggagagatgacaggccatttgatagcagaggatcaactagctggccaaatcatgttgggaagttcctaaggtggtggaattcagcttgaattgatagtttctattggcctggtatctttagctggcctttgtactcgaatgtgttcatctgacttgctgtgtattttacttggctaaacttaataaaaaacatctaatctatgtgtataaatttgtataagaaatattatgtttttgcttcgtctaattttgctgttaattagcgttataaccggagttgtcattctggtgtgctgaccaggtttcacctttgcaaagagaacaaggacacacaagaagcgttaggagtaattgggaaaatgttaggacttcaggtatacctcggttgctaactcataacattgtgttcttgtttctactgaatgctttgattcttcttttttaccttccttcgcattcctagttgatttctataccttttgcaatttgcagtcacgttcattcgggtttgcagggacaaaagataaacgtgctgttacaacacaacaggtacttattcctcatgtgcataccatctcactcaattttctttacataaatcgtgtttttgtacaatttgtttaaaagttcgcatacaagtatgcaagaaatactggtataattttaattaaggcataatttatggtattatgatgttacaaccagatgagataagtgaagctgctctggtttggaatactacatgtagtattgtcttggcaaaggagttttgtgaaatgaaactacaagatcatttttctttaactagtaccgttcatagtttttagtcttttcacctttagtttgtattgcttggctttgttctcatctctagcctacccagcttggttgagattaaaggctggtgttgttgctgtattttgcatagtgatttttagtctatttgacagatttgtttatgttatctcactcctttttcatggttgtgatcctctgcatgtaattacgttttcttgcaatggttacttttctgattgttttcccctggttaggtgactgttttcaagatatcagccaacagattggctgcacttaataatcgactatttggaattaaagttggaaactttaggtaggtgataaaatgcattatcctctttgttgatatcattgcaatgtaattattctaaatactaattatttttgcattcctttctagttatgtgaaggagggacttgttcttggtcaactaatgggaaatcgatttacaattactctgaggtacttgttttttatttctccttttagtttaatgtaaaaaactaaaaatgttctctagtgctctaaaaaatgatttgcactaatcttagagctcatggagggcctgatttgcagctacatattacttcactacaaacagtactatatttcacatgcaccaaacctcttcttttcttggttcaagaaaaccaaacaaatggagagctgatattttcctgcatttcttcaggggtgttgttgcagaatcagaagacataataaaggcttctgtggagggcttaggaaagaatggatttatcaactactatgggttgcaggtatgaagccagaaccttttcgttatgcttcaaaacctaactggtacgtgtttacttttgaagctcatcaagttcatcttttttgttggttagcgttttggaagtggttcagtacctactcaccttgttggagctgctttgcttagaggagagtggagaagttctgtaaatttgattcttgatccaagggaaggagatatccttgatttattttatccaatcagcagttgcatacttggatatatagctgtgccaacttttgttcaacataacttaatactccgaacagagagatgacataagggagatgcgtgaacattacaaggagcatggtgatattgatatggcactaagaaacttccctcgacatcttgtagccgagaaggctattgtaagtgtagttcttttccttcattacttaacctggaattatttaaaacattggctttttagtttttattcaagttatgtaatgtagatcacattatttggggaagttaaactgatattctttcatgcattgtttccagcttcaatgtttgaagaaatgccctggtaactatctgcaagcattaaagagtataccaagaacattacgaatgatgtatgttgtttaactttcttcgtcttttcatgtttctttacattgatgggttagtcaatttctgttacctcaaaagctaagtagattttataatatacaaaattgtattggaattattatagacattagtcatgaacagtagtagatctgttatatgtacctgtttttaaaattgttctctgctgctcaatatacataccgtttgatatattcaagcttttctgttaccctttttctctgttctgttttgttgaccaatttattaattctcatattttgcttatgcgtctttcttatttgctgttgcctcttttatgaaggtacgttcatagttaccaaagttacctctggaaccatgctgccagtgccagagttgaaaaatatggtcagtgcacttcatccttctacagctactcagttttagttgaatcatgatgcagtttgataattttctgataacggctaaccttgacctttttcttcaggcgtgttaccttttgtagttttatatggtgaacttctcttttcccattcctccttatgctaactggtgtacttgacaggcatttcgcaggctgtagaaggtgacttagtttatagcaaagagccccctcctggagaagcaacttcagttgatacttcagaaccttgcgatgaccaaataaattcatctgatattgatctatgttctgagacacttccagaagaaacaatccagtctgtgaaggtctgtaatttgcagcaaacaatgcggtgtacatgctcatgcacaaaaagttcctaatcatgcactgtcatttctcgtgtagatagttgattctgaagatttattgaagggtgtctacacatttgaagatgttgtccttcctttgcctgggtatttaccattccacatccataacttcaattttcatattgaatcacattgagaaatatatatggtgtgcttatttctgtaaacatgcagttcgcaagcattatttcctggaaacggaattgctgacatttatcatgaattggctaaaaaggtgctactatcctacaaaatttattttatagtttattcagaagtacttcctttgctttgccaggaacttgtgcattcttgaatttcctctataacccttctgttgctaaacgcaaaaaagaaaaacacatattgtaggttattggttgctagatatgtttactgtgaaatgtgtttagtttcccttttctttttgtggataaacgatacttctgtaatgtcacaggtttaattggctaatatattatgaatgaattacacaatattttttaaagtgaaagattaaatccaagaaataggaatcatattgttgatttgctttcatgtctcaggatggcattagcttgacagagaatgcacatggtgtcaagtaagtttctttattttactgtaaagatcaaaggcacctctaaaagtcaatacttagtatatgtgctatgacaagctttatatctttttgttctgatatcctactatattctcattctgttgtatatattaccttggcttgcatatttcaatttgctactttataccctaacttctatgctatatgatacaaactccatttttaagggagttttcaattacaagcatgaaaggaggttatcggcgggtgttccagcggcctattgattttgagtggtatgccttatcccattgacttttcacttcattagatgaccaaaatcatcaccttttctttcgtataaattctagccctgttccactaaaaaatgctttggtgtgactgtagggaactcatgacttatacagatgacacagcatttttagcagaaactgatttggatgttctgtccagaaacaaacctacaaaagccaaggaagtaaatgagactatatctagcgcgatttcaaatgctcaatcacatgattccaaggtggcaggaccattggatagctctatgccaggtagtgaaactggcttagtagaggaaaagtctgtcggtagctcagatatgttagcaaggaaattggccataaaattagcatttactctaccagcatcttcttatgctacaatggctattaggaagttgctgaagacttcaacctcggtatgtttctcaactaatattatattactattcttttactagaatttaaatgatgttaaatggactctgtttatggtgttatgcatagttaagaatgcatgcctacttgagaattcaaatacatttaattatggcagttgcccaacagtattgttaatattttaggacgtcaggagaaaatattgctgaatatttcaatatatatgctattgctctaacatgttaacaaataacaacattcatttcataattaccttctgctcgtctgcaggtcacgtatcagaaaacactcgattgttaattttgttattgacatcaattctttatggggaatcttccaagccgcatcttagaggagttgacatagttaagcaacatgagttggtatggtgtttgaattgtgtttgtgtaatttttatcgcgtggcactaagttattaacttataaatcctgatctgattattgcagtattgcatttaacagcccaaatgaatcggcattgagatataccatgctgctcggcctgctcccgttcggtgcatactgaattgctgatgcacgtttgtgctattgtgggggttaaaaacttgttttgccactagaatatgtg

SEQ ID NO: 15850 - DNA, 3500 bp, Oryza sativa
ggagaatggaccatctctccgcttacgaagaaaactgtttctgagcctgaggttaatgaaggtagaggatgatgaggaggattatgccctttttgtactgtgttcatgccctagctcaagggcggcgtccagggaagctattcttataggtggtaatctctacttataaaccaggtttatggtgctttgcatcccaaccgtagagaaagaagattggccccctctgaaggttcaaattcacaagcagaaggcttggttgttcgggccaggcaacaggagaagaacacaaacagcaaatcaagagataaaggtgcaagtagctaccgtgggagatcaaagtccagaggcaggtataagtcatgcaaatactacaagagagatggacatgatatctctgagtgttggaagctacaggataaagacaagagaaccggaaaatatgtaccaaaaggaaagaaagaagaggaaggtaaagccgcagttgttactgatgagaagtctgatgcagaattgcttgttgcttatgctggttgtgcacaaactagtgaccagtggattcttgatactgcatgcacctatcacatgtgcctgaatagggattggtttgccacctatgaagctgtgcaaggtggtactgttttgatgggtgatgatacaccatgcgaggttgcaggtgttgaaacagttcagatcaagatgtttgatggttgtatcaaaacattgtcagatgtgcggcatattccaaatttgaagagaagtctcatctctttatgtactcttgatcgcaaagtgtacaaatattccggtggagacggaattttgaaggtaactaaaggctcttttgttgtgatgaaagctgatataaattctgccaaccctgtcccatgtgcgagggacaactatattaggtaatattgctgcagtttctgattcattatataattccgatgctactaatctttggcatatgcgtcttgggcatatgagtgaaattggtttggcagaattaagcaagcgaggattgctagatggacaaagcatctggaagctcaaattttgtgagcattgcatctttggcaagcataagagggtgaagttcaacacatctacacatactactgaaagtattcttgattatgtgcattctgatttatggggcctgctcgtaagacatactttggaggtgctcgttacatgatgactatcgttgatgattattcgcgaaaagtttggccttatttcttgaagcacaaatatcaagcttttgatgtgtttaaagagtggaaaactatggttgaaagacaaactgaaagaaaggtgaaaatccttcgtactgacaatgggatggagttctgttctatgatatttaaatcatattgcaagtctgaaggcattgtgcgtcactacactgttcctcacacacctcaacaaaatggcgtagctgagcgtatgaacaggataattatatcaaaggcctgttgtatgttgtctaatgaaggtttgcctaaatagttttgggcggaagctggttccactgcttgttatcttatcaatcgatcacccagatataccattgataagaagactccaattgaggtatggtctggttccccagcaaattattcagacttaagagtatttggttgtactgcttatgctcatgttgataatggtaaattggagcctagagctattaagtgcatttttcttggttatccgtctggtgtgaaagactataagttatggtgtcctaaaaccaaaaaggttgtgattagtagaaatgttgtcttccatgaatcagttatgttacatgacaaaccttctactaatgttcctgttgagagtcaggagaaagcaagtgtgcaggtggagcacttgatcagttcagggcatgcaccagaaaaagaagatgttgctattaaccaagatgcatctgttattgaagattcagattcttctgctgttcagcagtctccaaaacgttctattgcaaaagataagcccaaaagaaatattaaacctcctcgaagatatattgaagaagcgaacatagttgcttatgctttgagcgtggcagaagaaattgaaggtaatgccgaaccttctacatattctgaggctattgtttctgatggttgcaatagatggataactgctatgcatgatgagatggagtcacttgaaaagaatcatacttgggaattggtgaagttgccaaaggagaagaaacctatccgttgtaagtggatcttcaaaagaaagaaaggtatgtctccaagtgatgaggcaaggtacaaagcaaggttagttgctaaaggttatagccagattccaggtattgatttcaatgatgtcttttcccctgttttgaagcatagttcaattcgcactttactcagtattgttgcagtgcatgattatgaactagagcaaatggatgttaagactgcatttttacatggggagttagaagaggacatttatatggagcaacctgaaggttttgttgttcctggaaaagagaacctagtatataggttaaagaaatctctttatgggttaaagcagtcacctagacagtggtataagagatttgactctttcatgttttctcagaagtttagaagatccaattatgatagctgtgtttatcttaaagttgttgatggttcatctatatatttgcttctttatgtcgatgatatgttgattgctgcaaaagataaatcagagatagaacagttgaaggcacaattgagtagtgaatttgagatgaaggatttgggtgcagcaaagaaaattctcggtatggaaattactagagaaagacattctggcaagttatatcttagtcagaaaggttatattgaaaaagttcttcgtcgtttcaatatgcatgatgcaaaaccagtgagtactcctttagctgcacatttcagattatcttcagatttatgtccacagtcagattatgatattgagtacatgtctagagttccttatttaagtgtagttggttcacttatgtatgctatggtatgttctcgtcttgacttatcacatgcattgagtgttgtcagtagatacatggctaatcctggcaaagagcattggaaagttgttcaatggattttcaaatacctacgtggtacatctagtgcttgtttgcagtttgggagatctagagatggacttgttggttatgtggattcagattttgctggagatttggataggagaagatcgctcacaggttatgttttcactattggaggatgtgctgttagttggaaggcaagtttgcaagcaactgttgccttatctactactgaagtagagtatatggctatttctgaagcttgtaaagaagctatttggcttagaggtttgtacactgagctttgtggagttacgtcttgcattaatatattttgtgatagtcaaagtgcaatatgctttacaaaggatcagatgttccatgagagaacaaagcacattga

SEQ ID NO: 15851 - DNA, 6862 bp, Oryza sativa
  unsure (1)..(6862): unsure at all n locations
ccgcttgattgcgantctnnnnnnnnnnnnnnnnnnnnnnnnnnnnnnnnnnnnnnnnnnnnntgtgactttattctatttgtttaattagaagaactttggcacaggccgagatgcaattcatctcccttttaattaaccctccaaaaaatgtctaaccaagtcgttttatatgttgcttgttgaacctataaatgaaaaatgcgtacagttgaaacatatactagataatgagttgcacttgtgatttgtcaacgagaaactgacaatcaccaaagagacacattccatattatcaagcaatcttaagttctcagcacttcacatcaacgatgaacactacattgtgtaagatcgtaaagagatttttccaccctaaaagctagccaatgaggtgagacacattggtgtccctcagctgttcaccgtacactaacagttccttaggtatacggatctcgcaggcacccacggtccatcgggccttcacatactgtgtcccttggaccagagatattgaactagccagtctctgataccaattgaaggatcgtaaaaggtttttctcatcctaaaaactagccaatgagatgagaggtccccccacttatatattagagcaattttatgtaggatcgaatcacaataactaagccaaccagaggggggtgaatggttggtatacccaaaaaccgaaaacttttagcggaaataaaagttactctcgaattcgacggaagtcggtctgaccgagattgatatgccggtctgaccgctcggatgccgccggtctgaccgctcggatgccgccagtctgaccggtatagatcaaccggtctgaccgccgaagtcgcctgccgcacctgctacctccgccagtctgaccgccttgctcccgccggtctgaccgccgtcttgccgtcggtatatcgccggttggaccgccgaaactcagtgaaacacaaatcgaagaactcttaaagtggatgacgactttattgattctatctgtgtttacaaagtgcaccaacagcactccttacaaaaatttcaactaaactcgaaaccctaactcaaaactcaactcaattgctctcaaaagcgataccgggaagcctcacgctcccccactatttatacccaaggtaggcagcctaaagccacgaaccaaactcatacttagagttctaaataccttaggaaaccctctagtacaagaaacaaactttacataaccaatcgtaccaaagttggactccttccaaatttaactccgcatcccatacgcacacaatacctccatcgtatgccatatggaatctccatcaaccacgtgcatcaactctagcctaagtatcccgcatgatctctgaccaccacgaacgtcgtcttatccccaagccgactcccggtccatcaccgcaaatactctcccgaggcatcgagtcacctacacatgaaataaacaaagaaaccatattccgagaacaagctatctccaacttgactcattagtagcaaacaacagtattacatatgtatagtatccatctagaagccataatcatgaaataatcacggatatccaaacaaacaacccgaaaccgaaaccgacacagagtcagccggtcagaccgcgggctggccggtctgaccgcgcgcataccgccggtctgaccagcacacaattcccggtctgaccggtcacataaaatgacagcacctgtaattcacctgtaaattcaatcatctccaaaaccacttcgtaaataaattccaaatatcaaaaccaataatctccaatgccaattgttcatcacagaataataatcaaaaacacctttgattttacattttatagtccttaatgaggtactatgaggtaccaaaaatttagtgtaagatttggtacctcatagtacttaggtaccaagaagtaccaaatttacaatagaaaaagtggtacctcctcaagaaccgtaaaattgttctatatattaactctcttactcttccacaactaatatgaaactattcaacacattgtaatacaattgaatgaatagcactaagttccaagtcacactcgatcactcaatattccaagtcacgctgatcgctcaatactcaaaattcgaaccctggtcatttctacgagaaatcagcgtaccggcggtggttcgacgacgagaagtgatagcatgcccttaagttaagaatgggattcatggggaattcaaggtgaactgcgtcgatctgagtatggtccagttcatgttagctgatcgcattccagtcctgtacaactcccttccgttctctagcaacgacaagggaagtgatcgttgctgcagtcccttctggtatgtgtgtcaggctgtgagccgatgagagtgacattgaccatctcagcagctcattggtaggaaaactcagcagagtacgtccgcattgtgtgcatatgcacttctgttatggccgaaatttaagtcctttctacgttgattatttggatttgccgatcggagatgcatgtctgaaaactttcgcatgtgctccatgtaaaaccttgggatgtgcttcggtcctgaagcttgaatagaaaattagtagtctgtcacttctgtcttctgagaaacattgttggtttattagcttatcagccacaccaaatttcaaacgcgatacttctcatccacggaagaaatgatgctgggcagatttatgtaattaagtggccataatagtttggttagtagtagcgttcatcgattatttcaccatcgattgaaccgatgatcgtatcaatagaacagatcgatttacagatcatttcgaggccacaacaagattactttcacatgcttggagagcacactagaaacaagaatggatcatgtcacagctgaatcaaattgaaaccactcaagttacaacatccatttttgggcagcaaaaagaaagcaaagacagggaaatttttccacctctcaactaggctgtgaagagatttgcttccattcagcaagtctcccgttaccaaatctcgggccttcaacctgcctgatcggacggtgggaaatatgcggtacctccagttacatactttccaatgagatggtaccggctgtgttgagagtggtggaagtgtaattttgtcttttcacatagataagttttctccagctgaaataaccctagtttcgattccccttgtgtgtggtagcagcggcggctgcgaggtagcgaggtcccatggccgcaacttggtgatgggcgtatgtggctgcgaggtagcgagggcccgtggccgcgaggtggtggcagcggcggcggcaggtgggtgaacgaccatggcggcgacttggtgacaagcacggtggtgccggccgcggtgacaaggtggtggtggtgccgccggtggttggtgcgtcggcggccgaagttgcaaggtggtggtggttccattgccgcagacggtaaaaggatgggggcgagtgcagggggaggaaaaatagtgacagatgagaaagaggcggcgcgcggaggggaaaaagagcaaacactctgaatagatgagaaagcggcgacgcgactccagagatgcatggtttcgcttctcttctatgttttccaatcataccccccttacgatggacggccggatttgtttctgtacctcccgatacaatctgctacacggcataaaacctcagctgtgaaatatgatatgtactttgattatactttatcgtatgagcaattttacggtccttaaggaggtaccatgagataccattttttctattgtaaatttagtacctagatactatggagtaccaaattttacactaaatttttgataccttatggtacctcctaaaggaccataaaattgctcttatcgtatacatgtgacaaattaaatcgtgtgttactgatgttcatgactaataatgttttcctttctcctcttggccggttggtgtagcactatagtgctagtactaacttatagggtcactccatgtatacccaaactgccaagtgccaatttataagcgtagtagctgctactcctttggaaaaaacccagcactcaaaaacagtaaaccctgaccatggtcttctccctctgtcagtgagaaatcggcagtgagaagagtagaacattgcatcggtggttcgacgatgaaatgcgattgacttgagaatgggaagcatgggtaattcggaaagaacggtgagcttaacacaatccagtcccgctcaagatcattcttggtgcacgaacaatgtagcgattggtgcttgttccactcatctgcctcagtgaagagccggttcgattggtttgtgcgatgatcctaacttggcgcagacctcaacaaagctagcatttcatacggctggtcacattgatgccaggacaatgctatttatctctagcctcaatttacttccgaagggactcgtgttaagctgtttgtatttgtttaattagaagagggctatgacgaacaagcgggatgcagttcatttaatttaatttgggctagagagcaaagcagtgccccttgtaataagatgatcggtttgtcaatcaatcggattgtatccggtagaaccatcaccacagggaacatatatccagtgatcttgctcgagtccaacgagcaagttgttctctacgctgcttcaggatttgcaattacaagaactttcaacatggtccatgtaaaacttagatgtgcttgagttccaagcctgtaatgaaaaattaaagtacctcgtggaaaatttgaaggtaccaaaatttcaaattaaactatgaggttaggtttacactagaaaatatagtactttaggaccataaaattaaagtacctcgtggaaaattttaaatttgaagattttctacgaggaaataccaaatttgaagtactaccaaattttgatgtagaaagtttgatgtactttaatttggtaaaccatgtatcttcaaattttgagtatgtcgcaataaacctcttgtggaaaattagatgtgcttgagatacctgatttattggcctaaatggtataatcataggttctgggaggtaacaaaaattttaatgtaaaatttagataccctgtgatactttctttctcaagaactgtaaaatttatcaccaccgtgtaccattataatagcccgtgatactttcataagttcataaactgtctatagatagcattatattatattatattatattatattgggcacttgaataaactgtacatgggttggtgtatcgcttaggccccggttagttcgcgaaatgaaaatttctggatgtcacatcggacgtttgactggatgtcggaaggggtttcggacacgaatgaaaaaactaatttcataacacgcatggaaaccgcgagacgaatcttttgagcctaattaatccgccattagcacatgtgggttactgtagcacttatggctaatcaaggactaattaggctcaaaagattcgtctcgcaatttcctccctaactgtgtaattagtttttgtttttatctatatttaatgcttcatgcatgtgttcaaagattcgatgtgatgttttttggaaaaactttctggaaactaaacagggccttcaagttccaagttaatacccggcattcaatttacctgcctacaccttcaccaataaccatctatatgccttactccatattaagggcagagttaacatataaaaaaaattgaagccaggcatccttcctttatttttctttcttctttcttttaggatgttttctttgtaagatgacaagagttgagtgttctattgggggtccgatgacaagatgctctgagaatgggatgctttgggaattttagtcatactgatttgtcaagttatgtacactggaagcttatttagttcgatgtgcttgagattggtttgtgcgattttcttgctcaaagtttgttgcccttgtcaatttttgttttagcactacgaggagaggcttaacgaaaacatggtgtaattaacatagtttctacaataactatatgtgtatcttcttttttttcagaataaattcataattaagtctcattcttgtaataatatgattgggtaccggatattgtctgtgtcatttacgaaggcccgactgaaatcacagaataaccagccgacctagttggcatggcacttaaagttcaccttgttattccacatgcctctgcaccttcatactccctccatattttaacgtatgacgccgttgacttttcgaacaacgtttgatcattcattttatttaaattttttgtgcaaatataaaaatatttgtgccatgcttaaagaatatttgatgataaatcaagtcacaataaaataaatgacaattacataaattttttaaataagacgaatggtcaaacgttgattaaaaagtcaacggcgtaatacattaaaatatagaggtagtagtatccataaaagaagctactacttgtcctcggaaaggatccaaattagtgacaaatttcaaaaacttgttcatatgtttctgtttgtgtatgatggtagaggtggtaagtgttaagcgctgcatcagtggtttaacgatgagatgttctaggaatgggacgtgttgggaattcacatccaacatggaactaaaatcaactctcaattcgagatgccatgcttacgggttgtcgcatttggtgtagatttcatcgatttcattcctctacgattctaccactgtcattgcttgtgtgacttggggagccaacccttttcccagcttctgggtgtatttcgatttatttcctagtcatga

SEQ ID NO: 15852 - DNA, 5855 bp, Oryza sativa
  unsure (1)..(5855): unsure at all n locations
tataggattgacgtttgatcatgccttatattacgggatagagggagtatatggcttgataacttgtaattaaatgttatttttacagtttttctctgtcctttaattgaaaattatcgtgggggcttcctccacttgttttctggtcaataacctagaatcgccacgtgtttagtatggtgtatattacacggtactaactactccctctgtccagatggagggagtaactagtaataaactaaattgtagtcactggtaccatttcttcagtgaattttcagccaacaaattttgtggatgctactagtttgattttgatttgaatagtaaaaaaaatgacttctgaatgggtgagccgcgtcactgcaaatctgaaatgccgttacgagacttggacctgtatagaagtacatgtcctcatcggttatccatatttactaataagtcacagcggtttattagaaaatgaaaataaatttataggtgttcttagcgatttaaatgtcaacgctgcaaaaaaattcattgaaaatattttgaagtcaaatctaaaataaaatttgaaaattcaaattttgattttggttttgacttattagggtaaccaatggcactcacagagcctcctcatctgccagactgctacagccactatgctgagcgcacgtgtaccacgctctggatttatcagcttctcggttcatccaaagagctgaatcacccctctctctctctctctctctctctctctctccacgtgagctacccatagcttccacccccgatcagggcttgaattaggaaattttagaatcagtctactttctatgaatttggttaaaattttattcaaactcatcaaaatttatttaaattttaaatatttctgttccgaaagtcccattagaaatgtgcaaaacgaaattgctaaccctgtttctaatccaatcaaataaaatagttgcgccgtagtcattgtcttgttggtgatatcatcaagacgagatttatcttctccattcttctttgacctgcaaagttcaatcttttgctcgccaaattgagaagaacgtgaatccggatgaatggggatatcatcgagacgagatttatcttctctgttcttctccaacctgcaaagttcaatcttttgcttgccaaattgagaagaacgaggctatccaaagtggtctaaaccaaaacctgacttttgttcctcgtcagtcttcggcggcccaagaacagctaattcagctccattccttacttcaacacacctcactaactttgtgcgaagacaagattgagtgtagtctaaaacacaagaacaatttgatttcttctttagccttataccagaagatgatggaaaatttccaggtttggccacactggacctacatctggacaagctcggcttcttcaagagtcaaattctttggatggcttctaacaatgaatagactgccgacacgagtcaaccttcacaaaaaaacaattctctcctcgccaacctgtgaactttgcaagagctgcccagaagatacagaccacctctttctcaactgtcccctggtctcagccttttgggatatgatccaggtagcaccctcgataacttctatggatctgcttcacaccaacaccatggtgggtcccattccggccctgcagagcaataccttcttcatcctccgttgctggcgcctgtggaatcatcgaaacgaggtcgtcttccagaaccagcccccctccatggctcggctcattagaagttgtatctaggatgctcagctctgggctcatcgctttaaacccctgcacaaagctgtcctgccactttggctttcgctgtttaattcttctctagcgcttctctaattcctgttccttagcacttttgtttccttttgtttctccttttggtttggcctctggctatgtacagttctttgtatttctcttactttgttttaatccaattcaggtggggtcttcccccccccccccccggtgttctataaaaaaaaattgagaagaacgtgaatccagatgaacgggtgagcagaagatattgtgaaactctatgtgtaattctagtacggtacactgtaccaattggagtcattatatattagcatttcttccctgaattttgatccttctcagaatgcaatgcttttttgtgtggattttgtgtgtgtttcatctattttcacatgattcatcgttttcatttttttttcaattattgtgaaagggtgagccatgtcgctgcatgtcatggaccgtggctagatgcagtacagccactatgttgtgcacaaatgtacacatctgtcttcgtacctctttgtcttcgcgagttgtccatggtttgtcagttccaaacttccaattaattatcggctatcccctctgtcttaaacaaaaataagttttgtggataaatttgaaaacatgcttatccaagttcaactccttgtcttgccaatgatatcgttcagagcctctcatctagttggtgtgtcattgtgaaagtgctagctagtgtacctcatcatcaagtgcctataaataaactagcggcacctacccctctttaaagaactactatagcactagtagatataaaccctggccatcgttcatctttctctgaacgtggaaaagcagcggtgagaaagaacaaaatgtttgtctcggcgattcgacaatgcgatgccctgagaataggatgcacggggaatttgagatgaagtccaaataggctccaatcggcacgctagagctcaagttagcatctcgcagattcgtgatgtcgtagacgactgtgatctagctcattctgtgtgtagagcatatgatgtggtcggcaccggcagtgttgcctgacacacggcgacagtgagcgcgtcctcgcgtgcgtgagacgatcgtgtccagcaaaacacgatcaaggcacgcatcatgtgataatatcctctccaatctagatttggtttcctacagtgattcgtgaagatatagcattataaaaaaaaagttaacggtgtcaaatcttaattgggatgtgcttcagttttgatcttgtacattgaaaatttgcgatagcgtgaaacatatgcatgtttcaccatgggtttgctactgatatggtacaagtacaacataaaataaaaaaaggagaattattaaaggtcgaacacgcctcctagatcactgtactctcttctcaacttgtgatctagtagaattattagaggtctaacacctcctagaatcaacaagttgttatatcctaggtggttgtgcatgccgagttcgagtattgccaatgttttttctttcacgtgcgtaggaaatgaaacgcgctggatggtagaaacgaagcaatctagggtaatgagaatatgggatgcatacacgcaggggtaagtagatccttgataaatagaaggagactaaaacataaaaaaaaaagtagaagtagtgttctatctccaaaatgccaataatattagtactgaagggagaagtatatgtcatggaaacataaaagtagcacttctccctaaaaattgaccaagatcattttataccggatcacatttgagctatttttttcgaaccctgctatacgtacgatgtgctattcgtacgatggtgtcattcaattactgtccgaccagtacaatgtaaacacagctaacagacgcagactcatcacgacatgaatcacatatactatctctatccaaaaatatattaattttttagctaatctggactagcttatatttttaggtcgtatggagtatctcattttcggtttctttaaggggcatttgcatctgaccctaatttaaagttcaactaccaatatgaccttactttttctagtttacttatttgaccctacttttctaaaacgaacctactatctgacctattccgttaagttagcaatgttaagtttggggtaaatagtcccttttacccttgcttatttgtccatattatatcttgcttatttggccctattatgtaagaacatgtatatattcggatatgttgacaaatttgtaataaatttgacatatgtttcacattcaagacaagtttgacagatttggattcaatttgataggtttttgacaaattgaagtgaaccgcagatctacccgcaagtcggcgcccgcagatcccctttctccacggcctaccgctgccgctggtgctccctccaccagccgacgccgctatatcatcctctcgtgcgtcggcgttgccaccggcgtcacccctgctccctcggcgaaccgacgccaccgttcctcttcctgttaaccggngccgccgtcaccgtcgcacgccagcacctccggttccttccctcagcacgccggcgccgccgcttcctccccccacgaaccagcgccgccactccctcccctcacggcgcctttgacccctcccctcaccgcgccggtgccgccgctcctccccctgcgagtcaacgccgctgccaccgccgcacgccggcgccgccgctccctccccttacggggcctccgctcctttcccctagcgtaccagcaccgccgcttcctccccccatgagccggcgttggcgctccctcccctcaccgcacggacgccgccaccaccgccacacgccgctaatcccctctgtgcacgagccgccactgccgccagcacaagccgagagagagacgggataagagtgtgatctgatctgtatggacagggtttggatgtggatatggtttcttcaagggtattttggtcattacgagaagtaattaaatttcttttctttttttaagtgaaaacttaacggtgcggtgaaaacagggacaggcggagctttcatttttgaaaaacagagttaaataagtaaactagaaaaagtagggtcagatcgatagtttggtttcaaaatatggtcaaataaacaattgtccctttctttaagaaaaagtacaatagcaggctataagccagctataaacatattttaaagagataaagaaagagagagaagagcagcgggctacagatctgaagccagctgcagcgcggaattcaagacgtaatgtgtgtatgataagtgggaccatgtattagtagtatagtaagcaactacttattatatgaattggctattatattgattataaataatttagagtcagtagtagtgggtcttgctctagctgaagaatcaggtgagtcgcgtcgctgcgtgccgtggcgagacgccggccgcgtacagaacctctctctgcttgctccccatctgctacagccactgtgttgtgcgcacgtgtagcacgcgctggacttatctgctttgctcgtttcatccaacgagccgagctaccccatcacctgccgagctgctgagctacccatcgttcgcgacaagttccaatcagattttcagctggtcactgtcttgctgctgctgatatcatcagcacgagatctttcgtcttctccgttcttctccgatctgcaaggttccatcggtttctgctcctcaaattccactacctctcttcttgattgggaggaagccaagaagaagtcaagaactgcccggttgctttcaggtctcttgaaccgtttatgcggctgccagcttgcgatagtggctggtttccgggcgtcgtttgttctggtcatcccatcaattggcaggtgtgtgcttcttgttttcttaataaacccatcctgtattagcagattggtaannnnnnnnnnnnnnnnnnnnnnnnnnnnnnnnnnnnnnnnnngnaggtgcntccnncagttccnnccccgtt

SEQ ID NO: 15853 - DNA, 1696 bp, Oryza sativa
  unsure (1)..(1696): unsure at all n locations
tagattccaatgatccattcatttttggactctgccccacctgtatgtttatttatcatcatgatgcctgctaaaaaaagatcttagaatccttttctcttataacttgggtgataaatcttgatgaaacctaagtgacttatgatgttttctttgaggacactgtttgtaatttcactgacttaaatttccaaaagcagtatcatcttccagtcagttgagtcttttcaagaacagatcgaagtccataaccataagatttgctatccttagaatgaagcaactatccctggtgtacgtacagtagaaacacacacacacacacacacacacacacacacacacacacacagagagagagagttgtgcctccagttccaacttccaaatgatattcttcattgtgcactaatgagatgttaaattaaagttccattgcttctgaacgaccttacaaatgaatttactgtttagagccagtttaaggcattcttcagattatgtgggaatctgtgtaagcttctactgccaaaacagctgtgcaagtgtttaaatatatcgttttagttgagccttgtgtctttgatagttatattgattcttttttttttgtaaaacagataagaatcctgatattaattattgttcttccagtactacagtgttcaacgttagggaattatcttaaactggtgctctggtaaaattcgaaaggtacatatggctatgtgcctcataagaaactcctcaggcaatagggatgattcttgggagaaacaaggattttgttcctaaaagtcactcatttggtcttgtatagttgtatctaggtcatgtttcctcttgtttaattccctcaggtttcctcttgtttaatgctttctacatgattcttgaaatacatttttcacttttaactgctggttctacctcattttcagtggtaaaaccatgccagtacttccagttaatgtggtttggattgttgtttaagtgcttgttggagcttctcagctacaggtgccatggagggaataaacaagatcaagacaggttctctgatcagcctttccgaacaggaactaatagactgtgatagatcctacaatagtggttgtggtggtgggctcatggattatgcttataagtttgtggttaaaaatggtggaattgacacggaagcggattacccatatcgtgaaacagatggaacatgtaacaagaacaaggtaaaattgaaatgtgtacattcaacaaatgttgagataacctctgcctgccatactagtacaataatttgtctgcttaaaatgcagctcaaaaggcgagtggtaacaattgatggctacaaagatgtgcctgccaacaatgaagatatgttacttcaggctgttgctcagcaacctgttagtgtaggaatatgcggtagcgctagagcatttcagttgtactccaaggtaaatagtgcataatttgttggtttatcctctcatgaacagatgtatgtattaccaattttaaacatttttgtacttgccttttaatattttgttatgcagggtatcttcgatggtccatgtcctacatctcttgatcatgctatattaattgtgggatatggttctgaaggtgggcaggattactggattgtggaaaatttttgtngtgaaaagtggngtatgaaaagctatatgtt

SEQ ID NO: 15854 - DNA, 10769 bp, Oryza sativa
  unsure (1)..(10769): unsure at all n locations
tgtctgtggcataaaccagatgccgtcattccctacgaaatcaagcccgaatcctcctcgttcaccagggccaggtccaaccaaatgcagccttcttacctattgccctgaaggatccacctgctgctgctcctggcgtgtcctggggctatgcctttcctggagttgttgtgaactggataacgcagtttgctgcaaggataatcgctattgctgccctcatgactacccggtttgtgatacggccagccaacgatgcttcaaggtacgtagaaaacgattttgtgcatccaatatgagctgcctcaaaatcttccatggttatgttttctgtacttctcttccatttcactttgattcatatcagattccagtttttgtttttttttactgactgtagagtagatctttaggatttatgaacaagttattgttcacgttatcagatgaactttgtgtattctgagaactgagtgttctttcttgtttcaggcaaataatggcaacttctctgtcatggagggagggagtaggaaacaacctttctccaaagttccttctttgggtggtttgttggaactgttggatcagtgagcctataattcgagccaactatcttcgagtgagtacagttgacatgagcatcgaatgcgatctcgccttatctttcttttagtacctcgttgctgaccatcccctttgacagatacactgatgtatggacaatgctaggctcagtcagtagtcagtggttgggttgctgctttcttcaagtttcctgccgccctgatgctcgtcttgcacggagatattcagatttactgtgtattttggtgaatggtaaatcataatttgccctgtaatgttgttgctgtacatgtcagactagcctggattatttcactcaatttgtgctagtgagaaccacttgctacgtatggtagattgataataaagagattgtgctgagtccatgcatctaaaactcggatactttttttttttactgaaaacagttggagagacttctgctgcgctatattaatagatatataataaaactcagatacttctcccttgaattattagttcgtttctgcatatatttaagcttaaaccaaacatctaaactattaaaatatcttccatcagattgagttgtatgaattctcttaccaatgcaatcccaaatgtgattaatgaggaaaagtttttttttcctctttctgaataaacccgagttcatactgtacaaagttcagctgtattgggcgttcagtccagcaaccggattcaaaagtcctgcttaagatatcatctgatcttccgcaaccagtctcaccaagattatgtaactaattcatagtctttaatctcttcgttccaaaataaataaatttaatacttaattctttatttcaaaataaataaatctaatacgagatatgacaatcctatccttttgagtagctgaatgtgttgtaagatttggaggctgtgttcagacctttgtttcttttttcttttggtttggattgccgctgaggctgaacctatgatcatttctagtaaaagaaatgggggttttgagtcttgctcaaaagaaaaaagatatgacacattctattatcatgaatctacagtaaccactaagaaaaacatcatgttaaacattaaggttccgttcttttctccaacaagagttggataaagattaagattttcgtggcacgcttttttaaactgttaaaaggtgtgtttcgtgcgaaaaactttttatataaaaattactctaaaatatcatattaatctatttttcaagtttgtaataattaaaactcaatcagtcatacgttaataccatctcgttttgtgtaaaaaacttcatcttaacaccgcctaagtgtaaaattacaaatgagggccggtgacgattaggggattggttttcgtcggatgtcgaaggacagagtagtggaggtgctcgtctccgccgagttcagtcggcggagctcaccggcggcgacgggacggggaccctaacttttacaaaatagcccctacttggatcctaccaactctaacttttgcacaatagcccatatatttacatagtagcccccctgtatgatcctaaatattacagcatagcccatactgacccgatcacaattcgcaacggacaatggctggtgccctacattttacaaagtagccccccttctgcttagatcctactagtaactttttttacaaaaatgaccctcctgtaaagtagactggctcgtcttcttccccttccatcctccccaaaatcgtcgccgcggatggagtcgtcggcgccgccgctcagccgcaagagggggaaacctatgggctatggcgccggatttacgccaccggtggcgtggcggcctctccgatcggttcacaccgtcgaccgccgctttgctttcgagcgcgcgattccgctgcggcgacgcccgcgccgatgtccaaatgtcctccagttcataaaggtgaggaacaaaaaaaaaaaaactcaccagattcgttttcgcatggttagcgtttgcgggctagaaggcatagaggtgtggttgcgatttgctaatgggggaggaagagtaaatttgatggcattgccaatttgccatggtgcgatgctatggattcgggaaacaaatctattctttggttccatttttcttttatttattttatgttcttagtgcggccacttagtaaaatcaagaaccgagtgaagtgacaatcgatcaccgcccacatctcataagaggaatcaagaatcctgcaagttattgtatttctgctaaagattctgcatttcttgtccacggccttgccccttaatctctcttcacgccggaccaattccatccacagacatacaatgagacacgcgtgaaaaaaaacgaggaaaataacatttctgatgtagaattgatattgtaaaatatgtttcttgttttattctatatcgattgcttctttaattctacatcgttaatgcagggaatcatgcaaagtcagtcaggcatgggaggtccggaaaaggagaatatcagtggttgggaaaagacttcttttcttttcatgtgcgtgaattgtgaattggatccagtaggtcagcgaatcgagttccctggttgctttcaagtctcttgaaccgtttatgcggctgccagcttgcgatagtggctggtttccgggcgtcgtttgttctggtcatcctataaattggcaggtgtgtgcttcttgttttcttaataaacccatcctgtattagcagattggtaatagcagaaggaggtggcccaatcttaaattcttaattcaagtgtctgggcctatttgggcagcgagatatggtacattcttgtttgctcatgatcttgtgtgcttagttgtgtgttaaattttataaacagatgtatgccggttgccaacaatgcaaaagtgaaattctaagaatgcatactatctgcagaaatgctatgatagaattgtccagaatagagctagcctaatactattgtgacaaataggacttggagtaattttcaagcttgcaaagcctcgggcagttgcttaatcatgggatcatagtgacatgtcgaacttttgtttacgaagtttgcaattggacaactctagattcctagagtttcttcggttcaagaacagaacccacacatcattgctatgatgctatctttttttaattgaaaactctgctatgtgaatttcatgacagtgttttggtttatctagcgatgaagtgcagaaatattattttcttgatgaactgtagtttctagaactcaaactcagatgtcatggtctaatgaaactttggtgtccatgtctaatagagtatcaaaagcagcgacgggaagagccccatagtggttggcccttggggtggcacaggaggatacccttgggatgatggtgtatactcaacggtacgccaggtcatcatcacccatggtgcagctattgactccataaggattgaatatgatctgaaaggaagttcagtctggtcagagacacatgggagcaccgatggaggttctgaaacagataaggtctagtttactatccctgctgcagcttttttaatttttttagcaagattgcaacactccgaaatttgcacaaatttaattggtactgtgcatgtctttagatctatataataaatataagagatttattacgttccttgaggagctaccacattttttagtgtaaattttggtagctcttggtggctcctatgtgttgagataccaggaaacagttgtacctcctcaagtaccataaaatcactacaagtataaacacctatatacaattctggtaaagttggaagatagttttaggccttagctttatgtatgaatctcatgtttattttggcgcataaaatcgatgacatgctgacttgtttttaatgaagttggtaaaagtttatatatcaaaggcctactttgatatccattctactttgaagaagcataatttagttttcatccctaaaacaaaattattgattttatatgtataatctgcaggtgaagctagatttccctgacgaaatccttgtgtctgtaagtggctattacgggtcagtctgtggaactccagttatcataagatcattgacatttcaaagcaatcgttccatatacgggcctttcggtactgaagatgggacacctttctcactcccagtaagcagtggtaaaattattggttttcatggaaggtcagggtcgtatctcaactcaataggcttttatctgaagcaagtgaatgtttcagatcgatcaaattctccagtcttgcctcagagtagaagtattacaagtgcatataacaaaaatggttatagctttcctgagggtgcttcaggatatgacatggtccttgcagtgagagataggggtgacagctatgctgtttatactagcaattaccctaatcagcagtatacaaatccatccccagattacaatgatggaatccgctggaataaggtgccacaaactagtccatcactgcagatggtatcttttcctagtggttacggagatagaggaggtgcagctctgagtagccacgagacctatggtccttggggtggaagtggtggcaccatgtttgatgatggcatgtacaccggtgtgtggcagatcaatttgactcgtgcagtgggaattacttctataaaggtactttatgatcgaaatggccaagcagtgtggggaaacaagcatggattcagtggagctgtttcaccagacaaggtaaatatgatttcagtactgcatttcttttaatttattgtgatgctgcatacatgattgtgatgaagtggaacttttgttcttcagatagtatttgattttccctcggaggtcttgactcatataaccggctactatggcacgacaatgatcatgggtccaacagtggtcagatcactcacattccacacaaacaagcggagatacggaccatatggggatgagtgtggcacgtatttctccaccagtttttctgatgggaggatagtaggattccatggtagggagggatggtacattgatggcatcggggtccatgttcaggaaggtaacttggctgcaccgcgagttagtagtagatcaacgattgagatgaacccctctttgcgctacgacatgcttgcacaatcaaggagtgaaacatacaatgaggtagctacaattcttgtctgaatcataacataagtatgtggctgcagagctaacttgtaaccgttttccaggttccttatagcatggtgaaagaaccagttccaatggggccagggccatggggtggcgaaggaggccggccatgggatgatggtgtctacactggtgtgaagcaagtctatgtgatgagaggcacctttatcggctcgatacagatcgagtacgacaggggtgaccaatccgtctggtctgcaaggcatggaaccagtggccacataacccatagggtgagtactgagtgctattatcaatcaagttccgttgtcaaggaataaaattcatgaaacatacaacaacaatataggatctgttcatcattcttcggtggcatgtcaaacaataacctctctccaaatgcacttgcagattaaactggactacccacacgaggtcctgacatgcgtatacggctactacaacaccaacagggaggaagggcccaaggttctgaggtcgatcaccttcatcagcaaccgagggaagtacgggccattccgagaggagttcggggcatacttctcgtcggcgaagaccgaagggaaagttgtgggcttccatggccggagcgggcaacacctggacgccattggggtgcatatgcagcactggatgggagacaggaggcctgctcccaagtacgtgctatcaaagtacctcttctgattgagctatggatgaaaacttgaattcctttgaaacaaaaagtgaatacttgaattacatgtagtttagccaatagtcatatagataacagatgggctggtttcgatttgagctttggaggctgtaacattttgggatatggaacagtttaagcctgcggatgagtccgttccttgtactcaggcaggcaggcatatacttaatgcatgacgatttatgagtaaattcaaatgaaattcacattttctgattcttttgcttgccgtggagaattggagacctgttttcaagacttgtgtcatttgtgtggtccactttctccgaatttgttgtggtcaccagattagctgcactgcatgtctgcatctctgcagatctcatgttcatgatttgagacctcccggccacttcaggacgggcatccaatgttgaattcagcaggaaagtataatgcagtaatgcacatgaaatgctttgaaatcaagtgctgtgcaaaactgaaaatgaggcaacatcaaacaagtggaaatgaaaatgttttcttttttattgaagtggaaatgaagttgacacgctgcttaggagctaactagagagtcttcttaggaaagctttagcttcgttttaatccatcaaaaaagctaaaatgtttatggtacttttaattctagaataagctgtagctaatcgaatcaaaaactccccaaacatacccattatcacatatcgcagccgcccatgtttaggaaggttgtcccttcccttggtacaagcaccgaaaaaatgcccatccgatccgaccgttcgttctagatcggttccagatcggacggccaaggacagagatatgggacaccgctcattacaacaagggtctaaattgtacggccgcattttttcgtttatgcttatgtttattattcaaaatttaaattttcaggcttaaatttgaaattgattttagagttttttcatcaaaatttatttttcagtctttgcttttagattgctaagaacacgtatataaaagttttattcacatattatttttcatttgtaaatataccgtttggccaattgggggccggtaatttcgcacagaatagaggggcatattcgaccattcgtcacgtcaccagctaggataaagtttcgattcctctcccaacgacaatatctttgggaaggcgagccatggccaaggggagcacatagtcagaacaccgcagagcaagtgtgtgtcctgcctcgcgtgaaagataagcggcgctctgctctgctcgccgaggagagagagaagagagagagagagagctagagatggcggcggcctcagcggcggcgcaggcggagggaacggtgatcgcgatccacagcctcgacgagtggaccatccagatcgaggaggccaacagcgccaagaagctggtaattcaaccgtcgctctcctcctctttgttctttcctgtccttttttctttttttgctaagttttttgagttttgtgatcaatggtgtgcgtagctggcctagggtttacttaattgagattatgctcatatccaattttgtgattggggtacctgaggagaaaattttgcgtaatcaaagttgggttttccgcgtctggtttttttttaggattagggtttctctcctccccttccggtggggatacggatctactgttctctcacccgttagaggataattgcagcataaacagttacttctcctttaaactaaccatgtttttaaaaaaacaaaaaaaaagaagaatcatagttattgtgagaggaaaacgaacaagttgttcatatgctcgtagttggattggtggaaagtagatgatggtagcagcaatgagaaatcgtgggtaactcattagtccttcgttgaggtgtgtaatgatgtttattttccttatgcccgctgattctgtagacggtagaggacacgactattacaaaatacttagcttatttcagaatttcaggtcggtgtttacttcgattataagaaataaattatcacaatttgggatcgacccttatctgtagtgcagtgttgctccaattgttcctgcaggaggtcaaatttgcatgattaacttaaccacactagagcctaaaatcatggcatactttaggagagtgctgaggtcaaatttgcatgattaacttaaccacactagagcctaaaatcatggcatactttaggagagtgctgaggtcaaatttgcatgattaacttaaccacactagagcctgaaatcatggcttactttatgagagccgtatcatgttgcttcagagatgcagatgtttgataagtgaagtttgcaattttgtgtagacttgctgtcctaaggttggtaatagagtccaaaggttgggaactattacagtcacttcatgtatataactatatatgtttttcgataacattttagttctgattgcagtcatttgaattgttgaaatgttgaattagcaataccacaaaagtgtgttaacctggttttcgtcataacaggttgtgattgacttcactgcatcatggtgcggaccatgccgcatcattgctccagtttttgccgatctagcaaagaagcacacaaatgctgtttttctgaaggttgacgtcgatgaactgaaggtattgctgttccccaaattttatatttttatgtagtacagtagtacggttgctgtgttggttttccccttatctggctttatcctaatgaagatttatgtaacaaacagcctattgctgagcaattcagtgttgaggctatgccaacattcctgtttatgaaggagggagatgttaaagacagggttgtcggtgctatgaaggatgaactggcgagcaagcttgagctacatatggccatgtagtgttatagtggattagtactgatatcctaaataaaacgggccttcaggctctgaaaggattagtgcctctgtctgtggtggttttcatatgcttctagtatcaagcattgttcttaccgttgtctagttcatggataatgccttgcttgatccaagtttgtgctttgaatattccaacaaaataatataacctgtgttttgcatatgatggttttctttcaggtgagatatcagaatgttggatccttgagagttgtttagctttcatcatgattagtgaagaaagttgcacatcaccattgtagtaatgtggcaaaccttgttaacttgtgaaaaaaaatgaaaagagtaattcatttggagtctcatttaaattgtttcggtaacaagagtagctcatgtcatcctcaaccatctcaagccactaaaccagtactccattactgggtggtccaaccctataagatcgtgactgtaatttgcacaattgattatttgtgttgattttgaaaccaatcttctctggttaaaatttactatttgcagtcttgcttctttgcctggtcacctccatcccatgcatcatacggtatgtagtatggggcatatccttttcttcactgggtgccgtttcactggtcatttggtcggcagtcttgaagctgctcctcactgatccaggcgtaaagataagctgatctgattgatatctgccaaactcacagacagaagaaaggttttagttctaccaagtactgtactagtagttttgtgcaaccatgagagattcttgtcttccatggagtgccaccgccaagcagcagctatcttgcatcctactccacatcccatttttgttcttgcttcaatccctatctcatcaccttctcgcatggatcaaattcgataagaaatggagtaatcaagatcagtgaaagctaggggagagcttgagcttcttggccggcaatggcgccggcgcgcgggttcgtggagaggctgagcacggtggaagggcggctgctgcggctggaggtggtcgtcctcgccagcgccgtcgtcctggcggcgctggtgctgtacggcgccacccgccgccggagcagcgacaagctcctccgcggcgtgatgtggatggcctactcgctgtcctacgtggtggtgtcctacgccgtggggctgatccaggacgggccgttccgcggcgagacgttcgtgctgtgggcggcggcgctgctgctgatccaggcgagcgcgtacgcggcgccggtgcacagccgccgcgagttcagccagcggaagnnnnnnnnnnnnnnnnnnnnnnnnnnnnnnnnnnnnnnnnnnnnnnnnnnnnnnnnnnnnnncgagtgct

SEQ ID NO: 15855 - DNA, 3606 bp, Oryza sativa
  unsure (1)..(3606): unsure at all n locations
cggagaaaaatgttgtggaganaatctcacagtgggtgtgttgttgggattataacgagacgcgccgcgcagaaagaagatacgggcgacggatgtgtgagtttgtgggcccagaattcccgagacgggggcgaaaattgtagagaatacaaaggctgatttacccgccatgtggttaaagtgttgcgnttaaattggcattaggatatcccccgcggtggggganggaaacccccgaccccacggaattaggggcaaggtactctctccagggcggggccccatggtgccgccgaccctgtcccattgttgaaggaaaaagccggcaattcgggggtcccataggccggggtgccgggtgatcgaccgacaggcccgggtcaagcgggttggagaagaaacgggcaagggccttttcccttggtgttccccctgttcaaagttttttaaacgccgtgtttccggttttgtcccgggggaaggccggccttcccaaggggcgggggacctcggttttaggtgggcctataccggccggcccgttagggggcccaaccccgcggttccgggtctcaaggggggagctcgtgttccttttcgaccaagttctacacccgcaacttgtgcttgtcggggccaggacctacgtttgcatcgccgccgccgtgccggggatcacaatgtggacggcgttcttcggcacgctcggcccggcctaccaccccctccgcatcggcgtgcgcggcttcgaccgctccgtcacggtgctgatcgtcgtgatcaccgccggcctcgagctctgccaggcggtggccggcttctccagcaactggaggtacgtcaagacggtgtaccgctgcgtgcgcgacgaccagccgtggacgaacaggcggcacggccacctctggtggaaggagagcatcacgccgccggcgacgaggtactgggacgacaaggtcggccagtacgtgctcctcaagcggttcggccaccggccatggaacatcctgtcgtggctgacgctctacctggtggagccgcggcggcaggggcagaagcgcggccggaggaagcgcctgccgcaggaggtccggcgagcggtgctcgtgtcgctcaaggcgagctacggccacctcaccaatggcgtctccacgctgcggaggcacggcctgacgccgcagctggagtgggcgtgcgcgttccccaagctcaccgaccagatcctggtgtggcacgtcgtcaccacccgcttagactggacgagcgccggcggccatggccggagccgccgccgcgacaacggcggcgacgtgaacagggtcgtggcgacgaagctgtcgaactactgcgcctacctggtcgcgttcgtgccggagatgctgccggacccgagctacaacgcggagcagatgttcgacacggcggtgcagcaggcgagggaccacctgggcggctgcaggacggagagcgccgtgctccagaggctgcaggagatcgaggacgaggagcggcgcggcgccgtgcgcgagagggcgggaagcgccaccgtcatcgagaaggcggcgctgctcggcgggcagctgaggcggnccgtgnacgaggcgcggcggtggcaggtgctgnccgagttctgggcggagttcatcctgttcctcgcgccgtcggacaacgtggacatccacgccgaggtgctcggcgccggcggcgagttcatgacgcagctgtgggcgctgctctcccacgccggcgtcctggaacggccggccgtcgccgcgacgccgtcgccaccgacggtgtgatcagattgatcgatggttatgttcgagatcgtgcaagctagataggggatgcaaatttagttgctccatccatgaattcattttatattttgaaacatcattgaacgatttagtaattagtttggaacaaagcgtctgaaaggaaaattttctggcttataagctaaaaaaagacctccgcgataaaaaaatttaagatatgacctttacaaatttattcttagcgattcaaaagctagagctagatattaaaaacagaaaacataatttaaattataaattcaaaactggttacggcttaacaagcatgatcatataaatattatttcaaacactaccaaaataataattctatgaataatttgtttcaaatgttaccttattacttccgccatattgctcgtttgaatcgttgtcgtccattcgcctctgacttgaatagttcagtgtacttaaaaaaaatgttgacacgtgtgcctaattattttttcgtacaagaccatccaaaagcttgaaatgcagcggcaagcaaaacaaaaagcaaataaaaaggtgaaataaaagtaaaacaggcaacctagttcaaaaaggaaaatgttcctactttatatagtttttttaagagtaaattgcgcccgcggtacacaaacttgtaaggtgggtgcaatttagtgtaaaaacttgaaaaactctcgtttcggtacacaaacttgcgtagtgcatgcgaaccaaggccaagacatgacttcatcactaatcttattgagttggcttgtgattaggataccacatcagcgcatacacacgttatgggagcgtgagctggctacacatatttgcaaataacccctcatacatctttcgattcctccgaatcttcttttgtgttgtagcccacgatgatgcccatgctagagatcagtttcatgatagcctaccaccaattgagttaccaccaaaaggagataaatcaggagattgatatatggatcaaggtggaaggccgcgaattggatccaggcggtagggctttgctgggagacaacacgccagccacgtttagggcagcggtggcaggacgttgccgccggcgctgaggcaacatggtgccagggctgcgaagtaaaggtgcacgatctcctgtatacagtgagtactttagtttatcatatcaaaaatgagattgtctttctcaattccaatttttgtggagatttcttcctcttattgtcgatttattaggtattgcaaacgagaaggactatcagttgttttaatttatgccaggagctagttcatggtacacaaaagctgtaatttttgttgacatttatggtatagaagtgatcatgggaaattagtatttttggagagcaatttgatcattaatgtgctgctagcttctgttgttaactatgctttcttcctggatatacccttaaacatctgaacctaaagtaaactgttctgaagatgaataattatctgtgcacaatatatgtagattccgaagatgaagaattcagcattgagatgcaccacggaggctttttttatgggaaatggtgtaaaccgggcttatgttgatggtagagtaagctggtttgaccattgtgagtcagattcttggtcactgttgtgggttgatgatttcattgaagaactaggatatgagaaatttgataacaccaaaatttactggttgcttncctgcacaccattaaatgatggggtgaagaggtttaatgtgatgcagacactaacaggatcgcccctcttgtacctaaggtcccatcatattgtttgg

SEQ ID NO: 15856 - DNA, 678 bp, Oryza sativa
  unsure (1)..(678): unsure at all n locations
cgtgtcctgatgaactctnnnnnnnnnnnnnnnnnnnnnnnnnnnnnnnnnnnnnnnnnnnnnnnnnnnnnnnnnnaaatgcttcgccgcacgccggacgccacccaatgatctcctttgccggaagaacgccgtgcgccaccatctccttcaagttttcctctgtcacatcagagggcacccactgactttcaaagctttctctctcctctgccatggatgcaaattggatgatgcgatttggtttgaaatatggccgggaatggataggagatcgatgcggtggttgcgcggaagatttttgtggaactttggaggatggattggaggggatttgtgaaccctagcttcaccgaagtgatttcgcactatagcagtgagtagggaaagtggcaagagtttcggcggggaagacaaaacgacgctatgccttcggtgttatctcattagggtatcgggagtactaatgggcctgggcctaaacagtacttcagcccagttttgctatcagcgtggttaagttgtgatccttaggggcttaggcatttgtttttgctttggcaacacttgctcacgacaatatagcccaatgctgttaaaatcctttttgacgcagttagataattctgtggaattactacaatgcaaataaaaaggtgcctgacagaaaagtgttat

SEQ ID NO: 15857 - DNA, 741 bp, Oryza sativa
  unsure (1)..(741): unsure at all n locations
gcggccatgaatgcaatganatcgcctgcgacgatgctccttagactcgagaattcgtacccccatttttgctgtgtattttaataagagtctgtgctttattatttgtagttgaatacattatgtgaattagtgcaccgaatcatgggcatgttttgtatgtatctattgtttgctatgaatgcactacccttctgtaaccggccaatgatcaggctaggactggtactagcgtcatagtggcgtctatgttagttccatttcgtgaaaccttgatttatgcttctgtcattgcttgaagtccaaccatgtaatttaatttttcaaacacccaaccgcaaccgctgacattttcatgaattgcttcggtgcttgctcaaaatcgatggcaaagttggacgaagagtcggaggagctgcaccagaagttcctggagaagacattgaccttccaacctttggtcaaaagtacaaaaagcttcgggccggctaccacaagcaagcgttgctccatcttgcccgcaagacctcacttcgttgaaatccattcgcggtctgtaggacgaacaccctgttgtatgagtttcccatttcttcatcattctatccttgtcgtggtgtctgtccacttggcttgttatcagtgccgctttaatattgtagggcttgtgaaaaccgcagggttgattgcatttgtaatatacgattgtattcgcatcatggaaatttatgtatgatcatt

SEQ ID NO: 15858 - DNA, 735 bp, Oryza sativa
  unsure (1)..(735): unsure at all n locations
cggcgtttgatgatanatcnnnnnnnnnnnnnnnnnnnnnnnnnnnnnnnnnnnnnnnnnnnnnnnnnnnnnnnnnnnnnnactaatccgaatatattgtgggcctaaaattcggatcacatatttaacaaaaatgattcctataagaagagaaatcttgccgaagtcgttggtgaagaagttgaggctgccgaaccggaacgcctgcccgggagggaagacgaagtcgtcgatgccggagacgaaacccatcgcactaatcggcgaagaacttgacgctacccctatctggcgcgccaattgtcgaaacaagattttggcaatactaaaagggggtggctatcaagctggaaaagtggatgggttgagaaacaaagaattttatactggttcaggccttcttaacaagaagtaataccctactcctgtccggggattgatttgccgagtgtattattgatcgtatgatctgggagcagatcgtgccctaagaggcacctggacccctccttatataggggaaggggtccgtattataaaatacagtccatatccctaacggaataggtagttacagataagattcaatcttaaccgactaagatcccgggtatttcctttaacatacaagtttggaatttaacccaagtccctttaaagatattcttatctatacatggcaccccatacccagtcggattataaatgccgtgttggtatggggtatccataatc

SEQ ID NO: 15859 - DNA, 1252 bp, Oryza sativa
agtgttgtcagtagatacatggctaatcctggcaaagagcattggaaagttgttcaatggattttcaaatacctacgtggtacatctagtgcttgtttgcagtttgggagatctagagatggacttgttggttatgtggattcagattttgctggagatttggataggagaagatcgctcacaggttatgttttcactattggaggatgtgctgttagttggaaggcaagtttgcaagcaactgttgccttatctactactgaagtagagtatatggctatttctgaagcttgtaaagaagctatttggcttagaggtttgtacactgagctttgtggagttacgtcttgcattaatatattttgtgatagtcaaagtgcaatatgctttacaaaggatcagatgttccatgagagaacaaagcacattgatgtgagatatcactttattcgaggtgtgattgctgaaggtgatgtcaaagtatgcaagataagtactcatgataacccagctgatatgatgacaaagccagttcctactactaagtttgagctttgctcaagcttggtgggtgttacagtatagtcctagagactatttggcgcgcggtgattttacctacatgaggtatttttggtgattgatatttttatgctacaagaggaaattcatctcaaggtggagattgttaaatatgtgatccgaattttgggtccacaatatattcggattagttttctagtaggagccctattaggtgcctttcttttatcccctatatatactcttgtaagtcatacgggaaggggtgacgttcccattgtgatttccctatgtttataatcaactcctctatagtgatcattgccggtcggcgcccgtggtttttttccgcaaggattttccacgtaaaattcgtgtctccattgtgcatctatttccataataattttgtcaaaaatatattgtttaacagtttgaaaagtatgctaacgaaaaaacgaaaaagttgaagtttggagttgatcagaaaaagaattgggcataggcaaacccgcatccgcagccgtgcatgtggtggcgcggcatcagggcaccacgccggcgcttaaaaagatcgtgttcagcaaatcatcgtcgcaagacacacatatgtgatcctctcgaaatttgggttgatcctcagatttgttgtgaggataaaaaaaaacatttcgacagtgaatatcttaattgggatgtgcttcgatta

SEQ ID NO: 15860 - DNA, 1160 bp, Oryza sativa
  unsure (1)..(1160): unsure at all n locations
aatatccttttcgccaagactctggacgacatgcaaatccctcgcacggaattgaagccaagtaatgcgcccttccacggagtcattcccgggctgtcttctactccactcggctagattactctgtcggttactttcggcactcgagagaactttcgcacagagaatatttgcttcgaagttgctgattttgagacagcgtaccatgccatactcggacgcccggcgttagccaagttcatggctgtcccgcactacacctacatgatgatgaaaatgccaggtccccgaggagtcatatccctgcggagtgacatcaagcaagctgtcacttgcgacaaggaaagctgcgagatagcccagacccgcgagattgcgctcgctcgagaagaaattcgactggctgcgttcacactggcccctgtggttgttgcaagagataatccgcatgagtctcagcttggaactgcctaggtagatgcgggtctccaaacctgctggggatttcttgtttctgtgccccttgctggaagaaaattaacatccttccaaagttgcggatatgcatgaccggtggttgtttggtggtatgtcgagtcattccctccagagatgattgtcaacatgcccggtagcaatccatggttgccagctattacgtgcttctggcttttccaaaccagactttcattcatggctaccagaaaactggtcattctttccgcaggagggagtggccctgacataattggggcatatgtcgaccaatggctgtgaaaagggagaccccttgcccacacgaggtgactgaattccagaattcctgaggttgtcacccgccctgcttacccaagaatacggtaccgaagtttgtgggaagtaaaccgggccacaagaggaaggaacatccctgaactcnggttggtccactattgaggccaaacaatgtgaaactctccttttatatgggccaagtgttttgggccggaaacagggcacctaaaggtttggtttggcagcactcaaaaatgggggaggccctcttggccgctcttttgggttaaatatgaggtgaatttgggcatttcaaaaagaaaactttcacctggtatttggggcggcgaggttacatttgggcccctgagagggatctttcctcg

SEQ ID NO: 15861 - DNA, 740 bp, Oryza sativa
  unsure (1)..(740): unsure at all n locations
cgcgtcccgggtgaagcannnnnnnnnnnnnnnnnnnnnnnnnnnnnnnnnnnnnnnnnnnnnnnnnnnnnnnnnnnnnnctaggatttagtgatcaataatctgccttcttgcaggtgcaaactgatgctgaagagttactcataatcaagactagagaatctcttctagatgccttgactgaacatgtcaaagctaaccatgaatacgagtaaacttcattcagtttattgatcttgctgtacaatctgtctgtttactatagtttacttgtaacttttctccctgaaatcttaatgtaatttggttggcctattctttcggccggcccgggagaaaaatgttcctgtcagatttactggtaacttgttcatgcagtgttcctgaagttatcgctcttcccataactggtggtaacaccaagtacctggagtggatcaagaacagcaccaaggcaaactgatctggcattcaccctgttgtatacgcgcgctgcagacccgcagctcaaaaatattcaacaacatgaagtaactgatcggatgttctctgtttggcctatgtatcacagtgacatttgctgcaaggaatatatgtgtggttgccatcttgtgaggtctgatgaagtactggngtctataattctgcttacaataaaaaatggattagtactcatacttgtgaattgctgcccttgattgggattctctatgaagtttttctagcgatgcaatgatgag

SEQ ID NO: 15862 - DNA, 746 bp, Oryza sativa
  unsure (1)..(746): unsure at all n locations
ccgcgcctttgttgttatacaaccntcnnnnnnnnnnnnnnnnnnnnnnnnnnnnnnnnnnnnnnnnnnnnnnnnnnnnnnnnnnatggcgctgctcttccaggccgggagcttgtacaatggcgtcttctcctactgccttccgggctacaggtcatactacttctccggctcgctccggctgggcgccggcggcgggcaaccgaggagcctccggtacacgccgatgctgaggaacccgcacaggtcgtctctctactacgtgaacgtgacggggctcagcgtggggcacgcgtgggtgaaggtccccgggggatcaggcaaacgaacaaaccaacagtcaacggtgcaggacgctactgaaattcagcacgaagatcgtcgtccatccgtggcaagcatcgttccccgccatggctatgtacaaggtttagccacttatcagcaaattaattagcaggagaagcaaggataaggaacatagacagatcttcctacatctattaatgcatctatctcgtgatcgaattgtcggtgagagtaagcccaaaaccctcccctgtttcctcctaacacaaacagaacaaatctatactccatatattaatctaacacatatctgctaatcttcgggaggccaactgtacgtcagtttgctactccattttatattacaagttatttcaggtttgtcctatgttaaatatcaactatatttgtagaaaaaaaagtagaatatctatagt

SEQ ID NO: 15863 - DNA, 746 bp, Oryza sativa
  unsure (1)..(746): unsure at all n locations
agggggccgtaatacttctcaatgccagtcgngtttaaagcggcttggcaatcccactcaacgcagttcgcttgtaaaggcaacaactccatccacgtcgtcgtcgtacgattctggtaaatggtggggattgtagcctcttcccgcacgccgttaattaatagtttcgcgaaagatcgatggaacgcctgcgatgtgggaagcgggaacattcagctcgacgctccctgtgtcggtcaggaggcgagtgaacgaattgctcgtcgtgatccctgctcctacgactggttccggcgccgacgacgctgaggctcggttggtgataaactgcatggttcatcgatggattagaagagccattcagccaaggctttgatggactcatgtcagacaggccattagaataggcatccaagaagggaaattgtctttcccttgtcccctggaaagcactcatgtcataggcccttaagtatccctcgtcgtaatatggctcagtcaaattaaaccgcccaggactgttagcagaagccatttcctgatctgccaaattgcctcttaacaaaaacggcaacgaaagaccaaatgtatggtaatcatgaccaatggactctggcatactgccattgctctgttcctcctcaagcaaatcgtttatgatgtcaaggtgcggaaattcttctgccactgnnnnnnnnnnnnnnnnnnnnnnnnnnnnnnnnnnnaggcgagtcgcattcaaggcg

SEQ ID NO: 15864 - DNA, 1275 bp, Oryza sativa
  unsure (1)..(1275): unsure at all n locations
agcgctttgattgccctgacgaccacnnnnnnnnnnnnnnnnnnnnnnnnnnnnnnnatttattttactcctattatagtgtagaattattctctcaatcccctctccaatctctttctcggattaaccgaacaaggcctcagagggagaggccgccggactcgtcgtcgtcgtcgagcgtggaggtgtagacggtgtagagcgaccagatgaggccgaacacgccgaggaggatccaccccagcaggttgttgctcagccccaggctcagcccggtcccctccgtcgacatccgctcgtccaccagcgccatcgccgccggcgccgacgacgacgacgccgtcaccgccgccgcgagcatcgacgtcgcgcctttcacggcggcggcgggcgtcgcctccttgccgtccctggaggagtagccgcacctcaccctctcacccctcctcgctctcagctgagccacccctgcacgcaatgggcaatggcagcttccatcagtgaactgaatgatctccgattcttttaccaaaattcttactcgctccgtcgctaaacatttgacgccgttgacttttaaaacatatttgaccgttcgtcttattaaaaaaaattaaataattattaattcttttctaatcatccgattcattgttaaatatacctttatgtatacatataggtttatatatttcacaaaagtttttgaataagataaaatggtaaacatgtgctaaaaaatcaactccgtcaaattttatgggcacaggaaggtttctattgcactgtggaaaggtttgtgaacttacctgacgggcggtcaactacggttgttccgtccggngcggcagcgcggataggcgcccaaggttcggctttttccttggtattttgggaggggggcacaggcccctccacttttgggggttttatggagaagcccccggggccaccggggaggggttccggcaaacgggttagattttctggggctgtgatacacaggcgggggggggggtgcggggctttacccctgtggaacatggggcgccgcccctctgacgcgcggagtttcttcttaaaaaaaaggggctgttttacgcggggaagacacccccgccctctatttataaataaaaaaaacnggggggggtaggtccggcaccccattcaactttctgtaaacacccccccgtgtgggttccccacgagttataagatgtgttttatatgtttgcgcggggtggggggtcgcaccaccatatatatttatca

SEQ ID NO: 15865 - DNA, 1232 bp, Oryza sativa
  unsure (1)..(1232): unsure at all n locations
cgccttgattgctaatctgcctgcgannnnnnnnnnnnnnnnnnnnnnnnnnnnnnnnnnnnatgtcgagggaagttccttagtgccatatcaatatcaccatgctccttgtaatgttcacccaattgttcgcactgacagattagctacctgataacttgaacttgagctatgatttcaagaacatcatcaacaagaaagccatcctgaatcttcgacaacttcataaattttttccatccccaatcatgctccttcttccagaacttatgcaaagtatctacaaaatttacttaagacctgaagctcaagaagataagaatggtagcttcctaggaagagaacaagccaaattccactcaccggagtattttactttcttaggatctatattgcctacagctatagtgaactgcgcaaaatgactccaccctgaaagtgtaatactaatatgagatattaggtccatggtgcaccattagatagcagcaaagactacaaaaaccaaacctgggagaagtttgtcatgattagcaacacagagaaaaagtgataggtggttggaaacatcacatncttggaggtatacaagaatatacctgaaaatagcagccggacaaagtagggataagtaattgggcgtatataattaccaaatttaactgggaagagacaaggagcttttagaattggtctatgggccttagcaagaatccttgagccaacaatatttggtggtcatgtaagccaaattcctatattaatattacatggttgaccaagatgccagatggtatgtgtacaggtggttcttttttttttacataaaagcttaggcgagataaccgtggtaaaccccaaaattatttaatgaaataaatggtggcaattagaaaagtgaacctacaggttcccaattgtggtggggaacataggcacagaaagcgacttgttttcaaaacttgggaaaactttttaatttgagaaaccgagaacaatttttatgcgccaaatggggggggttactttctccatatcaaaattttttgaaaaagtcttaacaaaattttcgggttgtttatttgtttgcgggaaagaaaccggggaggaaatggcaacccttctttggcccaccaagggaaaaagagttttgtaaaaactcgtgttcggaaaggttttaaaaaaacatcgggcntttttttgggaaagaggctcggggatttcccctttta

SEQ ID NO: 15866 - DNA, 1003 bp, Oryza sativa
  unsure (1)..(1003): unsure at all n locations
cggagtaagagcctcnnnnnnnnnnnnnnnnnnnnnnnnnnnnnnnnnnnnnnnnnnnnnnnnnnnnnnnnnncgatttggctgtcgttttcaccacaagagcgtcatctccccgtaggtctaggcgggatccgccctggccccgatccagtctagctctagggaagtcggtgtcatactccagcctctcggcacggtttcgacgaaacagttggacggctacctcagctcccccggtgtcgactcacgaccaacggagatcgtagagtacgacgacttcggctaccgctacgactaccgcaacctcgacgacttcgacgaaggctatgaagataactacacgccccctctacttcggcattttcatggccgacaacgagacggaaaaacagcgtcaagcccgagaagaagaagaacaacgcgtgcgacaggaagccaaacgtcgccgactggaggaggagcgccaagcacaagagcgagaacggctgcagcgtgagcaacaggagcgcgagcgagctgcaaaggaggcttggaggccgggcgacgagcacgagaactcatcgggcaacaagatgtcgaggggacggcggtttttcgcaccccgcttcaacatcctccaagcctttgccactcccttcgtcgctgtcctgatttgtatctattaatcaactcgtatgatctcttgtttggagttctttttgtacaaatatttttgtaggagtatcatatatttacagaatctctcctcatttaatgttgtgttggatctgtctccttgaagtgcttattggttgagttgaattatttattctattgactggttattttcttcctatctgatcaaacctttcactggatcaacttcagagctcaaaatggatattttagcagaaacagcacatttgaagtcaaagcaattagatttagatgataggcatgtgcttagnnnnnnnnnnnnnnnnnnnnnnnnnnnnnnnttcgaagcgatgagtcatcatgggcg

SEQ ID NO: 15867 - DNA, 725 bp, Oryza sativa
  unsure (1)..(725): unsure at all n locations
gcgcggtgaagaacctctnnnnnnnnnnnnnnnnnnnnnnnnnnnnnnnnnnnnnnnnnnnnnnnnnnnnnnnnnctgaatcattcactgacaaaatcctacagaccattcctattggctatagttaaacacttaactcaactagaacacctatttgcaagcatccaaaatgacagaaaattatagatctcgaagttaccatgcactgatatgctgacaagaactttttcttttgtgattgccaacccccattctccaatgcctcttactattaaggctcctaatttcctagtgtcacccatcttcagtaggacgaagaagtgaacagaaacaaggccagtgcaataaggttttgatttatgaatgtctgctaagcaagtccaatataactatagctaacgtgggttgtaacaactaacaaatgttgaggtacatcactttctgaaaattgaagtattgaaaacaggatatagcacattaaaggcggaaaacagttgatcatcgaaagctcataaaaaagggacttacagcattcattgctgcaactggcacccatccaccatgctgctgctgggcaagatcaagcattggaataataccagactgcttgtagttgcttggatagtgagacaatatctcattaacctgaattaagtattgaaatagagattttaggcccgataaccaaaatagctgataccattgatataaaccgtattcacaaa

SEQ ID NO: 15868 - DNA, 549 bp, Oryza sativa
cagcaggttgttgctcagccccaggctcagcccggtcccctccgtcgacatccgctcgtccaccagcgccatcgccgccggcgccgacgacgacgacgccgtcaccgccgccgcgagcatcgacgtcgcgcctttcacggcggcggggggcgtcgcctccttgccgtccctggaggagtagccgcacctcaccctctcacccctcctcgctctcagctgagccacccctgcacgcaatgggcaatggcagcttccatcagtgaactgaatgatctccgattcttttaccaaaattcttactcgctccgtcgctaaacatttgacgccgttgacttttaaaacatatttgaccgttcgtcttattaaaaaaaattaaataattattaattcttttctaatcatccgattcattgttaaatatacctttatgtatacatatagttttatatatttcacaaaagtttttgaataagataaatagttaaacatgtgctaaaaaatcaactacgtcaaatatttagggacacaggaagtatactatagcactgg

SEQ ID NO: 15869 - DNA, 528 bp, Oryza sativa
tcgtccaaaccgcaataaatgtggttaggtaagccccgctatgctcacctgccccatatacacggcgcaaaacccacaaggggtcggggcgcctcggccctcggggccgggacgggagcggcccgacccctcggggagacaaagagaagggcggccgtatcaccctcgggcccgaccccccccccccccgagggggttaggccacgtgggtgatcgtgtctgcctcaagtctctaagtcatgatactcccggtgccacgtgggtgatcgtgtctgcctcaagtctctaagtcatgatactcccggtcccatgtcaccgacaaccacctaacatctttgtcgtctcccttgccctgctctgccttctccctatctccagtggttatcgcaggcggataagctatggtcgctcaccatcttatgatccagctatttttttaggccctgtttaattctaaagtttttttttttaaacttccaactttccatcacatcaaaccttttatacatatacaatttttcagtcaca

SEQ ID NO: 15870 - DNA, 12293 bp, Oryza sativa
cgtgttcttgcaatgttttggtaagcattttgtagggtttcaatagctacaacttaatattcatgtaaaaaaaatatttcaacaatattgtgctttttcaagtatattgtatctctcgtattacttctctagtttcgcttgttggtactcaatgtttcatatatgtgggggaaaagtatgaattacccctcccccgaactatcgcgctctaccgaattaccccccaatccacaaaatcggacattcttcatcttgtaaaccggacaaataacccctccggctcaatccgcggtggttttgatcctacatggcagtctagtcagcaattcatttataaaaaaataggtggccccacctgtcagtttgtctctcctctatctctttcccaatctctcactccctctctctcttctttagggcgacggcggaggcagcggcgaggcaacacgagcgcggtggcgggggaggcattgcaaggcgaggctacggcgaggtgagcgtggtggagaaggaggcgagcacgagcgcaggtgagtggcgcaggggcaggcggtggtctgcggcgcaggacatgaaggctggacgtcggctgccatagccacggccgaggaggaggcggaaaaagaggaggagtgggtggaggcgggaagaagggatgaggaaccgttatgcttcccctggctgtgatcatataccttccggagaggagaggaagtgggacagcagtgttttacgcccctcttacctaagacagcctcacttgagcccgtccagtcacgtaactagttcccactcccacggccgccccctttttcatctttcttgccccatcctgagccctacatgaccgctgtggctatagcggtgctggaaggagagggtaggagcagcagtaggaggaggagtagtaagataggcgtaagcgggaggaggcctagaaatcctccaccaccgccactggccactttccccattaaagcctcatcattggccgccgcccttacctcgaaccccacctcctccagcaagttgtcgccgacgttgcccccatcatcctcctcggcatggcccatcggccgccgcgccctccccacgagcgctgccgctcgccgcctccagtgtcctcctcggtgccgcccgtcgcctccaccgttctcctcggctcggcccaccggctgccgtgccctccccgtgacaccgccgtccaccacggtcgtcgccgcacaaaatgcgagagagatgagagagagagagaaggatgaatcatggaagagagagagagagagagaaagggggtgagggggagagaagctgacatgtgggtccccccgattattttttttaaaaaataccgatcagactaccacatgtacaccacgtgggacgaaaaccacttcagaacaattagggggcggagaggaaggcgagccaacgcggacgaacagggagcagtcgcgcgaagtgcttcccaaaaaccttattgccgccttctcccggtgcagtacgtcgaaggcagaggttccggagacctactctcccgatcgccggtgcacgccggcgagcgggatggagtagtctacgagtgacggcgcagcacagagtaggaggcaaaccctagattgatttcgcatgtgagcgggatagagtaatctacgagcgacggcgcagcacaaagtaggaggcaaaccctagattgattttgtcgacgggtggtacccgtagaccggatatagagggtattggggtacgttggtacaaggatctacgtaatacgatatcaagcaacaaaagacgaggattatactggttcaggccccttggtaggtaatagccctaatccagttgatatgggattatatggtggaaaacacaggttacaaagggaacaatggaacttgtcggatccggcgagatcgtagtcaagttggttcgactagatctcgatggcttggctccttgcaggctccggcttcgtaggctgtgtgggttgtgttggctctgagattcgatgccttaagccctcaccggggggtcccttttatatcacagatctggaggtctccaagtagaactaggagatatcagaccctattcgatacgttaatgacccagtcttgtccgagtaggattcttcccatccgtagattccgtgaaggatttccatagaatatacaggaagtatctgtatgcgcgcgggtataccataccgatatgttacatatatcgaagggtaaagggtatgcctaacccgtaaccctgacagtagcccccgacttctgcttaaaaatgggctcgtgtaaccattcacgacttcgggtgtcgagactgttgtcattcctggagcgaggaccgcggagacaggccgtagccgagcatgccattcaaagcccaacggtcatgagcgaattttaaattgaagtccaaaaaaccgccgcgcataacggacccagaaatttccggcgggcatctctctctgtccttggaattcgcaccgtcggtagtgcgcctatttaaaggaattttggagatccattttgaagtctgccaaccgtgttgaaaacattccacctgaaaacattccacctgtaagcgttcatcaacctaggccctttctccggcgatcttgaatcagcaatcaacctcggcaagtcatcttccaccagtgcgtcgctgaagaagcttcaggaatacggcgcccttcctggccatggaaccatggagagggaaacaggaggtactaatccccagcccatcttgggtcgcatggttgcgatcgaagattatgttctctgcagtcttctcactccaccttccgagtttcttctcctggttttgaatttctatggtctttctcttctccatttgaaccccaattccattgcctttcttagcatctttgcccatctttgcgaggcctacattggggtagagccttttcttgatctctttcgctcttactatgaactgcgttggatggaatccaacagggtatctggttgcgtcgggttccgacttcgggaaggcctgaagtcgcgttatatccccttccagtgcccttcttctcgcagcaaatggcggaataggtggttctaccttgagatcaaagattcgaaccccgtctttgttgttcccaaagaacaaccggacaagatttcttcttggaccgcaaagccccccttgaccccctctcttcagtcgtttatcgacatcatcgatgatctccgagtacggggcttgtcggggtatgaagtcgttgcagacttcgttaataagcggatccagtcgctccaggctcgggcctatccagcttataactattccggaccggaggacgcgaccagggtttctcctcggggtatctttctcacatttatcctgacatgcttatgttcgcgttcctatcgactcatcgaaatttggttctcgattcacaggtctaaacatcgaggccgtggagtgccgtgtcggccaggtgatgatcagcggtccgacaacggcgagcaacatccccacgcccctctgtgaaaagggggcggctgagcgtgatgatgctatcaacataagtgcatccgataagcatcgcggattttttcttcgagatcaccttatgacttgattaagcgtatgctctttctctgactgacatcatcgagccactcatggaccatcaggtggcggcgtctctgaaagagaaggtcgccaaggaggcgtctgatgctgctgctgccaccactagtggtggcaatgttccgacaaaggggaggaagttctcctctgtaagcggacatcgtcgcaaggcgccgaccccctcggtaatttatcctatcgtcagattgtgcagccagaaggattttgccttactttgcattgaatgtctttcaggcctcggacacgtcacccccaccagcacgacgacaacatattgtgacgatcggcgagaagtaagtagatgaatttttagatttccgtgattctatacaagcgttgtgtgacccgtggtcgtcccgtagggaggcgcgggcaaaggctgcgcaagctaagtccggagggacttccagcgcgtcgcctgccgcggcctcgacggatgtcgtgcccgcagccgggagccgagaggcgacgcctagcggtccagtcagcgatcccgcggcaggtcatgatccaccagctgccatcctcacctgggaggagctccaagtcaagatgggcgcctcctcgaagcgggtgctcgcggcatcggctgcgagattgtggaggcgaggtcggaagcagcgctggcgaacgcgcgtgctgatcggctggtgcgcgagttggctgaagctcgtgaagacctcacgaagatgagggaattggtggccggcaacgagcgacaacggaaggggctcgaggaccgcatgtcggatctcgggaacaacctgtcggagatccggggctcgttgcgggtcacctacactggcctgcaccagctcgccggggagtgcggcatcaagtttacgatcccggtgaatcccgacgagttctcgctgacctcctcccttgcggaactggcgacggcgatgggggagatcccctccaagcatgcagccaggatcatggaggagacgtcgaacgggatctacaccggggcgtgtcatgtcctcgcgtgtgtaaagctgtcgcgtcctgaactcgatctgcgcgagatcttggatcatggggcggctagtgacacgcggagggaggtgatggaagaagtcggtgatttgggggagtctgttctccccctatttgaagagtaggacttcttgtacttccaaggcacaatttgtaaaacctgaattctgaccaccttcgtgcgggcaattatcatcctagtttacttttgtatgttgacctcgggaactcttgtcctttgtagagatgctgatgacgaggatgtccagcagcgcgggcagcccgagtcactggcgataattccggtactcgagtttgaaccacacgtgtcgcccgacaatgtggatcagacccttgatacggagacagggataacgacgacttccttaggttagtagtcccttcaccccttgatgccctcccgactagatcagccatgttctcgaaagaggcgtacagcttgacttagtggttatcaaattatgccgacctagagggtgcccttgctagccaagatcgtcgtatccaatactggaagatgaagtttgaagtggcggaactcgagagaaccatgctggccatgaagaaagagcaggctgtggaaacgctccgaggtcatgaggtgtggtttaactcgtacttgaagagttgctgcacatccatggccagagtctgtacagaacttcgagtggtccgcggagatcctgaggagtcggcggccgggtacatctcgtggcagaacggggcctgtgcccaactcgatggcatcggcaagcgtatcgacgaggccttgaagcaggagtgtcgtcgatcaagccgatacgccggagggcacgtgttggcttgcctacgagatcatcgcccgcgcttggacctcgaatttctccatgagggttttgctcgttctcggaggactccgacggagatagaccatctggcgaggtcgatgtcgccgttggccgagaagatcttccagtctatggactggcgttggccttcttggtagttttcgtaccctgtgacaaatatcttaggaaaaagatgtaatgtagaaaagatttgtgtaaaaactgtaagaagtattgtgtgaaatagtaaagaaatctatctttaacaaatgtctcttactctggatgtcgtgtgtaagagtgcgttctcagttaacgactttagtcagccgtttgagtcgcacactctccctagcccccagccttgtcgtcgaaggaattttctcggaggataaggctcttggacctttgacccgccttggttaaataagctctgatcctagcccccagccgtgaagttggaaagttgatttccgatttcacggcttggttaatacgcacggcgagaactcttacacgaccagatcttacatggtctttcgtctctacaggatctgacaagaccttatcggctctgggcgtccccagccgaagatcccttaggttcctcggaggccttgccaagacggcgtaaagggacataaggacaggtttcaacgctaggtgtcatcagggtaagggatcatcgggcgaaaacactttggttgtaatatgggcctaaaaataggcttcattgatactgtaagatgtcttacaggtatggatggtattgactcatacgtagaatttacgtagttggtcaatgttccaagaatttgctaactcgcgaccgtcgccgtctgcgattttgaatgcgcctagccgcaagacttgtgtgatcgtgtaaggtccttcccattttggtgagggtttgtttcgccctgcttggctttgaactcgtcggaggacgtagtcgccgatcgaaagtatgcgtgctcggatgtgcttctcgtggtaacggcggagggcctgttgatagctggctgctcggacggcaacccgttcacgatgctcctcgagaagatttacatcgatgtccccctgttccccctggtcctcgtcggagtgcttctgtactcatgtactctgatgtcgtagctcgccggggagcatagcctcagagccgtacacgaggaagaagggtgtttccttgttagacgttgtcggtgtggtgcgtatggcccatagtactgatggaatttcttcaacccattttttgtcgtgtgacatgagtctgtcgtaaacgtgggtttttatcccttgtagtactatgccgtttgccctctcgacttgtctgttgctttgagggtgagagaccgaggcgaagcatattttgacccccagcccgatgcagtaatcctggaaatcggcgctgatgaactgggagccgttgtcagttatgatgcggtgcggtagtccgtatctgcaaaatatccctttgatgaatttgatggcgttgtcggccttgatttcccccgtgggtactgcttcgatccatttggtgaacttgtcgatcgccacgaataggaatctgtagccgccctgccctcgtgggaatggcccaagtatatctagcccccagcacgagaacgaccaagttagagggatagtctggagcgcttgcgcgggtagctttgtgtgtttactgtggaattgacaggcttcgcatcgctggaccatgtcgcatgcatctttaagagcggttggccagaaaaagccttgtcgaaaagctttcccaaccaatgtccgaccggcggcgtgtgacccacatatgccttcatgtataccgaggaggaggtgtctgccgtcgtcggacgagacgcatttgagaagtaccccgtttggcgctttcttgtatagatcgttgccgaccatacagtagatctttggtttacgggttattttctcggcctctgtatcgtcctcgggcaactcctcgatgttgatgaatttgattagtggaatgcgccagtcgtctgtggtctcgatgtcgggggtgtccgggctaacttcgccgctaacctctttcactgatggcttcgtcaggatgtcgagaaaagtgccaggctcgagcgattctcgtctgaacgcacgttgtgctaggtcgtctggctcaatgttgtccttgcggtagacgtgtcggacctcgatcgcatcgaaccttttctctagcttcctgacttctgcaagatacttggataactcggggttagagcatttataatctttgtgcacctggttcgcgactagctcggagtcccctttgacgattagtcgcttgactccaagtgcagctgcagctcttatcccagcgagtagtccttcgtattctgctgtgttattggtcgccctgaagttgaggtggattgcatgcttgaattgatcttcagaaggagacgtcaagataaatcctgcccctgctccttggctgttgagtgcgccatcgaacgccattgtccatgtttcgttatcgacttggttgtctaacttgttatccggcatagtccaattggcaacgaaatcggcgagtatctgggacttgatggctgttcgtggcacaaagtggacatcaaactggctcagctcgactacccatttcgcaatgcggccgacaacatctttgtttctcacaactttgccaagagggaaaaaggagacaactgtgactctgtgggcttgaaagtagtggcgtagcttccttgatgtcatgatgaccgtgtaaagcagcttttggatctgtgggtatcttgtctttgcgtcgtggagagcttcgctaacgtaatagactggtcgttgtactttctctctctcgacaacaatgacggtgctaacggaatacggtgtggcggcaatatagaggaataattcttcattaggttggggagcaacaagtacagggggtttgataggtagcgcttgagtgcaacaaatgcctcgtcggcttcctgtgtccatacaaatttgtcttgtttcttcagcagagcgaagaaaggttgtcctcgttctcccatcctagcaacgaacctgctcagtgccgccatgcatccggttagcttttgtacctacttgagtcttgtgggcgacttcatgttctcgattgccttgatcttcttggggtttgcttctattcctctgccagaaacgaggaatccgagtagcttgcccgacggtactccgaacgtgcacttctctggattgagcatgaggcgatatcgtcggaggttgtcgaacgtttgccgcagattggcaatcaatgagtcgcatgtcttggttttgacaacgatgtcgtcgacgtatgcctcgacattgttgccaagctggtcgctaagtgcgccctggaccgtacgctggaaggtattccctacggttatcagtccgaacggcatcttaacgtagcataataccccaacgagcatgatgagtcctgtcttctcttcgtcctcttttgccatgttgatttggtggtagctagagtaagcgtcgaggaagctcaacaactcgcaaccggttgttgaatccaccagttgatctattcgagggagagggaagtgatccttggggcatgccttattgaggtcggtgaagtcaacacacattctccattttccattggccttccgcaccatgactggattggctagccactctggatgaagtacttctctgataaagccaactttgagaagtttgtcgagctcttctcgtatggcttgttttcggtctggtgcaaatctccgcagtctttgctttactggcttggcatcgggttgcaccatgagtttgtgctcaatcacctccctggggacccccggcatgtcggacggctgccaagcgaacacgtcagcattatcgcggaggaaggtgatgagcgtgagttcctatttctcgtttagtgtcgccccgatcttgacggtcttgtcggggttggcactggagagtggaacgatcttgatggtgccgtctggtttcggcgtcttgtttgtcttactcactttcttgggtggcgtagtcgtggcgagtgggctgggcgtttgctcgaccatgttgaggctccgcttgtcgcactgcaccgctagctttgcgttcccttgaatagtgattgttccattcagtcccggcatcttgagcacttgatacgcgtagtgagatgcggccatgaacttcgcaagtgcagttctcccgatgatggcattgtaagctgtgtcgaattcagcgacatcaaaggtgatctgctctgttcagaagttgttggcttggccgaaaatcacgggtaacgtaatcttgcccaatggtttggacgatgattggggagtaattccgtggaagggttgatcggttggtgtcaattcgctttgcggaattcctatcgcttccaaagtgctggcgaaaagaagattgattgagctgccaccgtcgatgaggactcgcgctaccttgatgttccgaatagtgggttcgaccacgatcggatatcgtcctgggatgatggcggtcttggggtggtcttcttccgagaactctatcttctgctcagaccacttcatcttgggtgcagccccctgccatgtcgaacaaacgtcacgttccactttcttgtattctcgctttgaggagtacgttgtggaagcgccaaagatgtgtgaaacgtggaggtcggagtctggatacgctggatccgattcgtgaggaacctcctcctcgttcttctcgaccacgcgtactcgcttgctttttcaaatgcgatgtgcttctcgagcgaatttttgaaaacaaggcaatcttccagggaatgtctgtccgtcttgtgtatggggcaccatgctttctttgtgtcgctactttgtgggtctgggcgcttgggagggttcacatattctgctgcgagaacttccacttgagctttccttttcccatttttgcgatttttctttttgcttgactcaaatccgtccgtggctggtttcttctctcccccggtcttcggcttatcgttcttgcgtcttagcgcatcatctgcgtgggcgcatcgctcaacaatctcgaacaatctccgagtggttgtgatgcgtcttgtcgccaactcctgtgtagtgtagcgatctctgacaccggatttgaaggcgcgaattacagaagcatcggtgatttcggggattgtatttctgcactcattgaagcgccgaagatattccctcaatgattcacccgagttctgagtcaacgcgtgtaggtcgtcttctatcgcgtggcgcttgtatgttccttggaaattggcgacgaactgttgccacaggtctgcccacgaagagattgagtagggaggaagatgcatcagccatgaacgtgcagaacctttcaacgcagttggtaaataattcgccaacgcgttgtcgtctgctccggcagcgtagagtactgtggagtagacttgaaggaactcctctgggtcggggctcccatcatacttttctattactctaggtcggaatctctcaagccatcggacatcacgtagggaacgaccgaaagccctacacccagcgttgggggcggtgggttgtcggcggttgtgtgtccttcgtggatgtctgtctgacgatgaggaggacgaggatgatgacgatgacgacaggtcgcttgcttccagcgtacgattacgaggatgtcggcctggatctcgggaatcctgtcgtcgtctcccactattgtctcggcgccgatctccgtcatcatcgtcgttatggcgacggcctcgacctgtattgtctcgcacccgtcgttcgcgatcgttgtgatcgtggtggttgtcctggtctcggtcctcgtttgagcggtctctttgatttccgttatcatggcgccgtgaagagacatgacgccgagaacgattcacattgtctcgtgtgcgtcgtgcctctcggcggccgttgatgtgatctcggagatcgccggtgccgcgaggtggaggggtagctcgttggggtgattccctccgttccaggtcttcaccattgacatcgtcagttggtggctgctccgggtgtgctgcgatagcggcttcttcgaacgtgttgctgaggttggtcactgattcccgtagtcgttctatcaaacgctcgaggtcatcgttcagaatgggatcgtatggagtttccctcagtatagcttgaatggcccttatggtgctgggctggagtagtcaattgtcctcctgcttctgcgttggcgtgcgctgacgtgccaacgtcatcgatagccaatacctcccacgacacactcgttttcgatgacccatagtcttcgagaaggtgtaagactgatggttcgtgaggatcgatatcgattaccccaacaaatcgatctgaaattgaagtcgctccttgttccttgtcgttatccctgatggggacgtatgacttaggagacggatctttcatggcgccaagaaagaccttgcagcttgagagcccgtgattctttgtcttgtgaataggacaatagacatcacgagttggagaaacacgctgaattccacgctctttgcaggcgtgaatttcagcgcggacgttgaggaaaacccagcaggcttgcaaagtgtgttttctggttttgtggatagaacaccaggaccttgtggcttcggaagtcatctttgtcggctcgcggttcatgtcggaagaacaaggtttggccgcatcagaatccttctcgagctcggatgtcgtcgatgctctgttctccgtctcagcgggagga

SEQ ID NO: 15871 - DNA, 6118 bp, Oryza sativa
cggagatatcagaccctattcgatacgtcaatgacccagtcttgtccgagtaggattcttcccatccgtagattccgggaaggatttccatagaatatacagaaagtatctgtatgcgcgcgggtataccataccgatatgtaacgtatatcgaaaggtaaagggtatgcctaacccggaaccctgacagaatttccgtgtgttgcgtgaaagcggcggcttggtttatatagagataggtcgcctgatcagggcactcgcgtaaaccgaacccgataagtcgcgcataacctatccggacctcacgccattttcacacaccggatttttgcactcgtgtaaaccggcggctcagttatatagagataggtcgcctgatcagggcactcgcgtaaaccgaaccggataagtcgcgcctaacctatccggactccacaccgttttcacgcaccggatttttgcactcgtgtaaaccgaaccggataagtcgcgcgtaacctatacggactccacgccgttttcacgcaccggattttttggaaatagaaacaaaacaaattcgaattaggcgggcattttttggaaaaagaaacaaagcgcgtaaacctatccggactccacgcaccggatttttttgaaacagaaacaaaacaaatccattcgaattaggcgggcattttttggaaaaagaaacaaagcgcgtaaacctatccggactccacgcaccggatttttttgaaacagaaacaaaacaaatccaaatttcgaattaggcgggcattttttggaaaaagaaacaaagcgcgtaaacctatccggactccacgcaccggatttttttgaaacagaaacaaaacaaatccaaatttcccgcagaccattcgacgtgtacgtcgtgcacgcgggccacctgcccaggctaggcgagcgagcgtgcgcgcgtttttcccctcttctctccaccacacatgcttcaagtggctaggagggcatcctcccttttaagaaggtccccctctcctagaataagcaaggtggtactaaactccacatgcatgccatcccatgaggtgggcctttgtgattttctaaagaattaattttcggatgagccttagcccatctattaattccaacactattttgttcgtggtaaatacgagcctacacaccatatcaaaaagtgtcaaataaccagatttttttttacaatttggttatttctaaaaacttattttacaatggcccctttctaaactttactatgaaagtggacccatagctcgcgcctaaggctattggcactgaagttaaatgtctcaataccaatacccaacccttatgccagttggtttggcactgagcatccatatctcatagtatttttcttctctcctcccatcccttttcaaaattttttgattttctgctaaattttagaaatatcatgattcatttccgctaatttatttcaatttataagaaacctaatttgaaatgagggtatggacgctcccgtccaccaacctctaaatcctattggttttccaaggaaattttgacaaattaaaatatcaagattcattttccataatttgttatttataggaaacttaatctaagatgagagttcctttctcctttgcccaacctatatgttgattttttgtgtaaaataaagtgggaaaattgacaatgtagaatttttttaatttatttctagaatttcagtaagtagtttttttttgaaaaacaaaatggtgattcactgtagtaatacttgtgataaagagataatttatcgtcatactatcatgatggaaaaaaaattaaaaatgactacatggaatctatttaaatttttctggaggtcttagttagaacgtgtactgtggtaaattttatttaccaaggcaagagagtcaccgatggcttagcatgaacaattactccctccgtctcacgatataatgaattttaagtttttgcttgtactgtttgatcacttgtcttattcaaaaaatttgtgcaaatataaaaaacgaaaagttgtgcttaaattactttaaataataaagtaagtaaaaaaataaataataatttcaaatttttttgaataagacgagtggttaaactgtgcaagcaaaaacttaaaatctcttatattattggtccgggggagtagttttttttttacaaacgtctcgagagggaggaaggagctagggtgatatattataaaagcatgtaagtagtgtaactcgtcctttagcggtacttcgtaatacgtacttgtactttcatttttgttaccataatcaaacctcctgttttgtactcattaattttagttgtaccaatgtacatttaattctttgtgaaaaacagaacacatctgattatgaaagactcttgtgtcttggtgctccatatagacgccattaaaaccaacacccaagaattgcgtatatatacgagtacatagagcctctcacttcccaacacagctgcagaagcatcgtcgtacaccacacacaaaaaatggcagatcttcacacctatctgtaccttggcctggcgctcgtttccctgctcgccgtgcaactcgccaggcgtaggcgctcgtcggcggcgcatggctctggcgcgctgcggctgccgccggggccatggcagctaccggtcataggcagcctgcaccacctcgtcggcaagctcccgcaccaagcgatgcgcgacctggcgcgtcgccacgggccggtcatgatgctccgcctgggcgaggtgcccacgctggtggtgtcgtcgccgaaagcggcgcgcgaggtgaccaagacccacgacgtgtcgttcgcgacgcggccgctgagctccaccacgcgcgtgttcagcaacggcggcagggacatcgtgttcgccccgtacggggactactggcgccagctccggaagatcaccgtgacggagctcctcagcgcgcgccgcgtcgcctccttccgcgccatccgcgaggaggaggtcgccgccatgctgcgcgccgtgggcggctacgcggcggccgggtgcgccgtcgagatacgaccgctgttggcggcgctcgtgtccgactccaccgtgcgcgccgtgatgggcgaccggttcccccaccgcgacgtgttcctccgcgagctcgaccgctccatcgagctcacggccgggttcaacccggcggacttgtggccatcgtcgcgcctcgccggctgtctcaccggcaccatacgccaggccaagaaatgctgggacacgatgtccagcgtcctcgaaagcaccatccaggagcacctccagaagaatgccagcagcggcggcggcgctggagccaccgacgaggacctcatcgatgttttgctaaggatacagaaggagggtgggctccagttcccgtttgacatggacgtcatcaagtctgtcatccatgtaagtgactacgccccccacgagttatcttagggcactgtttagcatagctccagcttcatctctcctgaagttggagcgcagccaaatagtttcagctccatcttaaaataggagcacagctaggtagagtgttcttaactcgataggtggagctggatttaaactgttccacaactccactttatacctaactcctacattaaatggaaaaattgaagctctatcagagcaagttcaatagtataactaactactaactccaattcatctatagccaatctaatagctaattcatacaatagttacatactacactattaatacctggtcccacatgtcatacgcacactgtatcttgggatccgtgctacagctggctataaatctgtagctcactgcctttctctcttcttatttatcttcataaaatatgtttgcagtacctgctcttaaacagacccttagatcattttccgtgtcatgttccaactgtcaacttgtcctccagcttgacactatggcatctggtcacatatggtttttaaccagaaagcagtacatagctttttagctggtaagcacggtcatcgctttgcttacgtcactacttcacaaaagtaaattgtgtcggatgggaaagccatatagctgccggatttttcactcggcatctaacagacgcactaatgaggagcgctatcgatagaccggcacctataaattgtacgatttgcgaaaagaaaagactcagctcaagtgagttgaaccgatgctccaaatccaacaaaaaaaatgaattgaaaggcacaataacacaagaatgctcataatagaatcaaacaagcattcatcatccaacatcccagaacaagcactagagcactagaacgggcgccgccgctcacccttgttgacgtcgaaggaaggagaagacagatgctgctcggggaccagcgcgggggccaaatccgatggaccccgaactcaggcctgctggacttggcatcggttccaccgccgtcaccgttgccactcgcgagggagaggatgtcgtcgtttctctcgagggagagggtgttgctgccgctcgcaaaggagaggatgttgccactactcgcgagggagagggtgccaccagtgctcgctggtggcgaggggaaaatgagagaacagtgggttagaggactcagcgtgaatggataagaatgagaggctcaacttagcttggtttttacggatacctgtgttttaattagccagcaactataatacattataggtgctggttcttttaaaaaatcaatatcaatagtattgctgctagtttttctctaaaaccagtacttatagttgttcaaaggtatcggttgtatacttttttggcccatggaggtgggaaatggtaataagtaccggttccaattgaatcggctactatgagccgagccctattagaagaagttctatagtagtgtgtataagctgttactgcttagaccaacaaaagataattatgataaaacttttatacatgagtttgttagtaaattaaaatcaaatattgaaagttaaactttaattaaaaaaaccacaaagagtgaaatgtaactcatatcaaatttcggctatagcttataagctgaaggttaaacgatgggagtgtacagagtgaagacatgatgaacatcataagaacactacaaaaccttagaggtgggccagttggctctcttcgtgttcattgctgcgtcttcaaggtagaatggagtggacatcctctcggtttgtgcatatcgtatataaagtcacaaacttttttcttaaaaaaaataaaagatagatctatggtacatcaccccacaaacatgctaaaaaaatatatttatataggtgtcaaatttaaacttacatgtttattaagtgatataccacatacgttaaatttgaacttacatatttgtgggctgatatacaatatattgttctatcttatcaaatttgtaattaactttttagataacactgcaccgttttttaatagatgatgttaacttttgatatgacatatgtccatttgtcttattttcaaaagaaaaatattaatattatttattttgttctaacttattttattattatataaatttaagtagggcttgtatctaactgttattctaaatgttattttaaaatttaatcacatcatctatttgaagaaaacgaagaacgaaggtagtatatatataaaaacatcacctgtagaaactaatagagacctcccccagtccccctcttccggaaattcctactatctgatctcattcctctgcttcttttcagcgcttctccctcatctatgcctctaattgtctgatttttttgtatcttgtatctcgggtttattagagtgagcctacggtacgaatttgatcgccattgaaagccatgaagtccaatctgttcgttctttcgtgatggtcagctacgcagcttcaataaaaatatgggaaagtaaaatcatccatcgaggagatatcccctcgtttcgtgcatatcacctaaatagtcataaaaaatatgaaaaaaattgacaacatagattattatgaaatatatcactccacaaacatgcaagtttaaattcaacttctacaagttg

SEQ ID NO: 15872 - DNA, 1921 bp, Oryza sativa
cagtaagaaagtatgggtatagcaaccaatgaatataaaacattaaaaatacttggactgccttaattgaaaaggtcaaacaaccaaagtttcatacaaggacattcacacattgtccttaattagcaacttgaggggatacctccctgaaaaagaaagatgattttagcagcttattatggggttgtggtattaaaaaatttgaacaattattggtatcttgtgccactctgagacaagataaatgttggtcatcagttcatcaccacatgcaactgttcacaaataaacgaaggcccatacaaggtatattattgagatagtgttagcaagtctttatataaccgaacactttagactcatcatcggaccggacagaaaattaggggcctgaagtgttcgggtatactgcgccagaccaacttttacttgctcctgtggtccatgtcccaacacttagcattatttttcccaaccttgcctcctatttgcacgaatctcaaagcaaatccaacgatccaaaatttgaatgttttgccctcaagaaaacttccaacagatgaataacgatctattcgtgtataatacgactagttggatagctcgtgtatctgtatgggtcggtttatttaaaagtttaaagtctagcagtaaacttctttgaaaaggagattaaaataaaaaataaacttgtctttttctaaaagaaaaggaaaatctaggaatatgaagagaatagagataggaagagaatagagataggacattgagcatcaccaagagttttcatatcattccctatgagagaatttgagaatacttttttttaaaaaccaatttcaatagacttcctacctgcactcccaaccgatcaaactcccaaatccggatgattcgttttccacttcttatagggaagagattttgctcccaatccaccacacaccgcttttctgtgagtgcttggtgaaatattcccgtgcggctcatcttcggtaacatcggcgtggcggcgcacggccaccgcggcgagtcgggagccaagctcttggacgtgcaagcagagggtttttctcgtgaaggagatcgtcacactgctcccagtcgagaggggcatcgccacgacaaggttcatgcgtgcttggacttcgccgcaccgacatgatcctgcacgctggtgtggcgtggcgtggcgcgtgctgagacgacgcttgaggacctcctgatccccaacatcgatcggcaactttgtggagatgctcaacaacgtggactgcatacatggagcagatgctggagcagttcatcgatcgacgccgaacatgttggtgactgttcgccgcctcgccggacgccggagataaacgtcgacgaagcccagctggtcgacgcatgcatcaagcgagctcatgcagttagaacagtggccaagctcatcgacggatacctctcaacctctaggttctaaaccatctttggtcggtctggcaaaatcaacaatagtcccggttccaaaaagaaacagaacaaaaggttgcttttagtcctggttataaaaattttgatctttagtcccggttggtacaccaaccgggaagtaaagatggttcatagcctgtcagaggcatatcagggggtcgaggatctttaggccttgtttgtttcagcttaagattactgtaatctatattattgagacaaattactataagctgaattataataagccgacatagaataagttgttagctttttgtttctctggatcattagctggttgttaggtgttagcaacccaataatctaaaaaaagcacaattagagtggattactagattatagtaatttggcttatagattgtaataatctatcataataagctatatgtttatttcaatttactcctaataatccagatta

SEQ ID NO: 15873 - DNA, 1900 bp, Oryza sativa
ccgtcaacctgagcgagctgctgtcggcgcacgccgccgactcgtcggtgcgcgccatcatgggcgatcggttcagggaccgcgacgcgttcttggcgatgctggagcgcggcctcaagctgttcgccaagcctgcactgccggatctctacccgtcgtcgcgcctcgccatgctcctcagtcgaatgccgcgtcggatgaagcagcatcaccgggacatggtcgcgttcctggacgccatcatccaggagcaccaagagaacagatcagccgccgccgacgacgacaacgacttgctcgacgtgctcttgaggatccagagggaaggcgacctgcagtttcccctgtccagtgaaagcatcaaggcaacaattggagtaaggaccttttaactacgaaataccacgtcactttctaggaaatgtaatactacttgcctcaatatatagcaatctagaaccgaatatgatacatcctaatgttataaatctgaataggcctatggtttgaaacggaggtagtaacgctaatgaatttggcttcgtgttatgtgtgtacaggacatgttggttgggggcagcgagaccgcagcaacgacgctgcattggatcatggcggagctcgtgaggaatccgaaagtgatgcagaaggcacaagatgaagtacgacgagagctcatcgggcatcgtaaagtgacagaagataccctatgtagactgaattacatgcatatggtcatcaaggaggcactccggctacacccaccgggatcattgctgctaccacgggaatgccgacgcacgtgccaagtcctaggatacgatatacccaagggagcaacggtgtttgttaacgtatcggctattggtagggatcccaagtactgggacgaagctgaagagtttattccagagaggtttgagcatagtgatgttgactttaaaggcacacattttgagtacacaccatttggagcaggtcggaggatgtgccctggcatggcgtttggtctagccaatgtggagctcacattagcgagcctcctgtaccatttcaactgggaactgccgagcgggatacacgctgagaacctagacatgacagaggagatgcgattcaccacgcggcggctccatgaccttgtccttattcctgtagtccacgtacccttgcctacaatataagctcatcatagcacactgatttttgtacaacacttaagcaatctttttgactggcaactcaaaggtgcaaccacctatggtgaagcttgaggctatatgtgaaaaataaattttcataagcggcttcttataagatttccacctacactaatcgtactttgatatgcaccttatcatgaaatgtatttggaagctttgcttgtttgatgtgattgttatgttaaactttttcttgtaatttctttgtggaaattttgtgacacatttggaattcctaagagctctcatgtttttcctatgatatacatatatctcaatgtctcatgtgtaatttcttatgcaaacctaatctaatgagaagatacaaccttcaagactatctcttttgtgaaacccatttagggctatcaacgaatcgagctcaaacgagcttgattacctaggctcaagcttgacaaatgctcaagtcaagcctacgtagttcatgcatctttgtacaagtgtgccggaaagatcaaaccaatagaactgctcatatcacagtagtcatagtatctattgaagacctcaaataggaaggcctataaattcccccatgcagcccaattccttggggagagcccacatatgcctgatgcatctggaaaagctcttgagctcgttggcgtgtgagcccaactagctgcacgaacaggctcctttctatttttggctat

SEQ ID NO: 15874 - DNA, 2870 bp, Oryza sativa
  unsure (1)..(2870): unsure at all n locations
cttatcgtggccccaggtttgccacaattgtagcaacctcctttctttttcttctaaggttatttctgagtaatctattcaactaggagcctgcgctataaaatagagataaaaggattaccatatgctcattcatcaaaaactatagagacatgaaaagaaaaatgatatttttatcaaatcaacagaaggaaagatcctttaccaggtttgaattccaccgtcctactggcttgcttctctcgtctatcctcccatcgattcttcctcatgttgtgtcatgcaccacctctaccaatctatggatgcttctcaaaagctcttactcctctcaatcgaggaactaaattagaagaaccagagaagagaagtaaaaagcatgcaagtgactacaagctaggtctactattgatacgccttgaggaaggaagtggtgagacccaatgacagatcaaagtcgaagtaagtgaaaagaaaagggaccctctgctgaccggaggaagcattttggaaaataaaaactcgatctatacctctataggtagcagagcagagggaatgtcgccctcgttcccgaggaataattctcttaatgaactacttccgaatatagaagtgaataccaattctactagttgttaggaagagctagggttgttttgctagagctcacgtgtacgggggtacgcatggagaaaaaggttctagaaggacaattttcaacacaaacccataatcttttacaaatttgagcccccccccccccacctaatgtaaaataagcatggaagaatatcttggtgacaattcttcgaggaaagaccactttgtcgaaagatctcaatacctagaggaaaggatggtacaattagccaagagagtgaaattttccgtaaccatcctgaaatcggttgaccattctggttctaatttgaaatcgtagtgagaatatctagcatacatctgcataagacaaccagtcaatccggagtttagtaaaacacgttgtctcatggcctattagtagaataatatatatgctaaagataatcccctactaagaaaattagattatagttaaccacattaatgaaagagaagaaaaagaaaacgtttagagtaactcgagacgatgccacgttgctacatgtagtttttttaacctatcgctatatattggcacttccgtgtgatgtggcaagattcatccatttaatgacatgttcatttgctaccgctcataagctcaatacacgattaatgacttgttcggtttggagcaaattccctcccttttgggatttaaccaaacaggatctaatggttccactacaatatataatagcaactactccctttatttttcaatagatgacactgttaacttttaaacacataacaattcatcttatttaaaatttttatgcaaatatataatatataaatcatgcttaaaatactgtgtgataaaacaactcacaaaataaattatatttacataattttctttaataatacgaaccatcaaacatttaaaaaaaatcaatggtttcatttactttaaaaaaacggaggtaatatattatagagagagtactaacgaaagcaagttggttggacgtatgtccgctagacgcctggcacagacacaaggaggcatgggcggagatggagatcggccttccgccgtgcagtgatgccgaacgcttctgtcatgtcgagcttggccgggtcggccaagccgggcaccttcccaatcaaagtggaaaagcaagctggcgagagggagctccacgttggcgagcccgaacgccatccctgggcacattcgccgcccagcaccaaacggcaggaactcgaagtcggttcccctgaagtccaccgccgccgtcgcctcaccgtcctcgaaccgctccggccggaactcctccggcgagccgccgggccagtaccgctcgtcgaggccgatcgcccaggcgttgaccagcacctgcgtgccgcgcgtcacgtcgtagccgagcacccggcacggctcccggcactcgcgtggcagcagcagcggcagcggagggtgtagccggagcgtctcacggatgacgagttgcaggtaccggagctcgccgagcgcgtcctctgacacggcgccggccgcggcgaaggcacggcgaacctcagccatcaccttgtgcatggccgtcgggttccggatcagctnnnnnnnnnnnnnnnnnnnnnncgtcgccgacgtctcgctgccggcgctgaagatgtcctgcgtgcacgcgacatcatcgtcaaaaatactctcgaggaatacaatgatcacaccacatcacttacaaagatgatggatttgatgtcgtccatggcgagcgggaactggagcccaccctccttctgtatccttagcagaacatcgacgaggtcctcgccgccggcgctagttctctcttggtgttcctggatgatgccgtcgaggattttgtacaccgagttgcggcactcctcggcgcggcgtacgacactgctcagccgaccggcgagacgcgacgactgttggaaataaacacgtcatggtgtattcctggcgtggttgagtcagtgtgtgtgtgtcgtgctgctgcatgtgtgcgtcgtatgcgttctgttagtttggttgagtcgtgatcacgagtgcatggctgctgcatggatgtttgcatggccgttgcagtgttgatcgagtcgtgggtgtgcatggtgtgcgtggcgtcagttcttgcggaggaagccgcgtcgtccgggcgagcgtgtggctcacggcgacgtcgagcgggttctgcggaacgtggcgcaatggccggcatggaggctagctcccggtgtgtcac

SEQ ID NO: 15875 - DNA, 1924 bp, Oryza sativa
cggccacggcgaccgcgcgcagcagggcggcgacctcctcctcgcggatggagcggaaggagtggacgcggcgcgcgatgaggagctcggtgacggcgatcttccggacctggcgccagtagtccccgtacggcgcgaagacgaggtcccgtacgccgttggtgagcacgcgcagggtggcgctcagcggccgcatcgcgaacgccgtgtcgtgggtcttcgtcacctcgcgcgccgcgtccctggacgacacgacgagcgtgggcacctcgccgatccggagcagcatgacgggcccgtggcgacgagccaggtcacgcatcgcgcggtgcgggatctgccccacgaggtggtgcaggctacctatgatcggcagcgtccatggccccgccggcagccgtagcccgccgtcgccatgcgctgccggcggcggcgagcgcctgcgcctggcgagcagcacgacgaacagcgacacgagagccaagccgacgtagacgtagccatgagacgcgtcttccatttccctttcctttcgcaaaggatttatgtggcagtgtgggtgtacatatcgagacgacatttatatactacctcattactagtagtactatctaatcttggataaaccaagattatcaagaacaaaaccaagattatcttgtatgcacgaaggcgtccatggcgagagctgttccaagacgattgggttcattacatagattagtatggtatactaagttattgacatgcatgaagcgcgcacgcaagcatatatgcgacataaaaatgcccattgaggaaatcaagttgactttgttaaattaaattaataaggataaaattcagtagggaaaattaaatagggtaaggtttatcgtcttccgttaagaatgaacgaatacacaattcgatgtcggtccctcgacctcaacagcatgctcgtgcacctcatggcaacaattaataacaaccttcccgctgacttatctcaggctaccattagctccttcaaagctactcccccgtctcaaaataacttaatctaaaagaggatatgaccagaccactctaaagacaacgaatctcattccctcttaggttgagtttttttgagacgaagggagtaagtttcagtttccccctagtgaacaaggtatcgacaaggctgacacattggcaaggaaagcttctgaatcaagccggtagatccgcccttgtaaggccctgtttagttcatgaaatgagaatttttggatgccacatcaaatgtttgaccggatgtcaaaagaggtttttggatacgaataaaaaaaactaatttcataactcggctggaaaccgcgagacaaatctttcgaacctaattaagccgtcattagcacatgtggattactgtagcacttatggctaatcatagactaattaggctaaaaagattcgtttcacgatttccatgcaaactatgcactatttttgtttttatctatatttaatgctccatgtgtgtgtcaaaaattcgatgtgacgttgttgagaaaaaattttggaaactaaaccaggcctaaaggtggtgctaatctcgcaacccatctaccatctcacctccatcaggtttccaaagcggtgttagaggcgctagacaagctcaggagaaaattcctttgggctaggggagagaacttatcaggaggaaaatgtgaagtgaattaggaatggctttatcgctcgaaatagcttgggggactcggggtcctcgatctataatgcttcgcaaacatataaatttaaattcaacttatacaggtagaaataaaaataacaaatttaactatgaaaagaacatgtaattcactgccaaatttgtttttttaattatataaatcaaattttaactcgcatatttataaaaagatataccgtatat

SEQ ID NO: 15876 - DNA, 812 bp, Oryza sativa
caaggtaatgatccaacggatgctgaatctcagctccgcggaggcatccctcatcccccaaggagtcctccccctctgcagcgatccatatcgcgccaacatcctgaccatcatgcaagcggtcggggcgtcggaggagcgggctcctcgaggccacgatggctcgggcgggagccgcaggggggaacaatctaccccgggagggggtcgtgcttctgggccccgtgatgggggctcggggggcagccgccctgccgacgcccgagggaagagaaagcaagagggtacttcctccccatctcctccccgagggggcggggcggcgcgtgtcagcagcaggcgcccggagggggccgcgccgacgccgcagctcgagagggagcggaagaagaaacggctccgcaagatgggggggacagaaccatcccggggaaacctcatttcccctccaaggtggtcgtttaaccgaccccctcgcaggttcgtcccacgcccattgtggctgtattcattcttccaacacaagttttcattcacccatcttggttgacttctggcttttcttctgcttcagcgagatcccgtcgcgtccctcccgccattccaagtccggccagtctgaggccgaggacccggcgaccacagaggcccggaggcggaaatctgaccggcgagaagccgcggatcgccttcgggaagccgaggaggccgctcgggaggccgcccgggctcgccagaccgaggaagccgctcgggaggaggccggactctgccaggccgaggcgacgacatcctccgaggcgacccgtgaa

SEQ ID NO: 15877 - DNA, 2076 bp, Oryza sativa
cctcttcgaggcggctcttccccacaccttccgttgctccactgagcgcagaaccccttctgcaggccttggccgtcgcaaacaccacggtgttggacgggttaaatgcccaggtggaggccctgcaagcagagcgggcggagctcgacgccgcatgggcacgtgtcgaagaggggcgacgctcggtggaggccatggtggaggtgggccgcaaggcacaccgccggcacgtctcagagctcgaagcccgtcggaaggtgctgggggagatcgccaaggaggtggaggaggagcggggggctgccctcatcgccaccaccgtgatgaacgaggcgcaggacaccctccgccttcaatacgggagctgggaggtggagctagggaagaagctcgacgccgcccagggggtccttgacgctgccgctgcccgagaacggcgggcggcggagaccgaggtggcatcccggcggcgcgaagaagcccttgaggcccgtgccatggcgctggaagagcgtgcctgtgccgtggagagggacctagcggatcgcgaggctgccgttgccatccgggaggcaacgctgactgcgcacgaggccgcctgcgccgaagaggagtccgcgctccgcctccgcgaggacgcgctcaccgagcgggagcgagctctcaaggaggccgaggccgcggcgcaacggctggcggacagcctatccctccgcgaggcagtgcgggaggagcaggcgcgccgtaatctagaaggtgcccgcgccgagagggccgcgctgaatcagcgggccgctgagctcgaggcgcgggagagggagatggacgcgagggcgcgcagtggcggggcggccgcgggtgaaagcgacttaaccgcccgcctcgcagctactgaacacaccatcgccgatctgcagggcgcgctagactcgtccgccggggaggtcgaggccctccgcttggcaggcgaggtagggcccggcatgcttcgggacgccgtctcccgtctagaccgcgccggccggcaggcgggcctctggggcgggcggactgcgaagtacgccgccaaccaggggggcctcgcccagcgcctctcggagatagccgggactctccaacggcttcccgaggagctcgagaggacgattaagtcatcctcgagggacctcgcccgaggagcggtggagctcgtactggcgagttaccaagccagggatcccgacttctccccatggacggcgctggacgagttccctccctggaccgaggacggcgcgcgcgcgcaggtccgggacgccgccgaccatatcgtccacaacttcgagggttcggcccctcggctcgcgttcgccctcaactccgacgaggaggacgatgacggcggagtgggcgacaatggcgacgaggctggcgacccgggtgcatcggagtgagcccccaggcccccgccaatctttaaatagtttcttcttttcttcttccgaggccttcgggcccccttcttgtatagactaatttaatctgcaatcaaataaagaggaaaattttttgtgtcaattctatttgttgtgtgtatgagacgaggatggtctgtgccgcggtccttttgtgtcttggcttgaacaagggctcgtgcccaggtcctagtcctcaaatggctcgggtcggggctagtgcctggggagatccacatgtcgagactggccaggccgggagcgtgatgaccgagggttatgggtgacccgattgtgggtttttgccgattcccccccggagttcaccacgccccggggcacggctcggttctgggccccgtttggcgattttagccgacccgagcccccgagggcaggattgaacacgagtgacctatttcaagtcaagatccttcaaaaggaaacaacagcacagatacagcctttaggaaatcgaaaatacttttattgaaatacagatatcagagaaataagaatatgcatatgtggtagctaccggccaaccctgcacgcccgaggggggtgcggagttcgtccgagcccgaaacctgacacccgatccccctttaggggtagaagc

SEQ ID NO: 15878 - DNA, 3040 bp, Oryza sativa
gcgtaggacgagctcgtccccgcagagtgatcgggcccgaacgtggcgctgatggtagccccgcaggctcttctggtagcgaccggctcggaggaccgcgcgccgccttcgctcttccaagtagtcgaggtcatctctgcgaagctgatcttcatcagcctcgcagtacatggtggcccgaggggagctcagggtgagctcggatggaagaaccgcttccgcgccgtagacgaggaagaaaggcgtttccccggttgctcggcttggcgtggttcggttcgcccagagcaccgctggcaactcctcgatccacgaatcgccgtgcttcttgagaatgttgaaggtcttggttttaaggcctctgaggatttccgcattggcgcgctccacttggccgttgcttctggggtgggcaggtgaggcaaagcagagcttgatgcccatgtcttcgcagtagtcgccgaaaagttcactagtgaattgggtgccgttatccgtaataatacggttaggcactccaaaccgggctgtgatgcccttaatgaatttaagtgcggagtgcttatcgatcttgacgaccggataagcctcgggccacttagtgaacttgtcgatcgcgacatacagatactcaaacccgcccggggcccgcttaaacggtcccaggatatcgagcccccagacagcaaatggccatgaaagtggtatgatctgcagggcctgggccggctgatggatttgcttggcgtggaattgacacgctctgcatcgccggaccaggtcgaccgcatcattgagagctgtcggccaatagaaaccttgtcgaaaggctttgccaaccaaggtgcgcgaggcggagtgggatccgcattcgccttcatggatatcggcaagaagttcgacgccttgttcccgaggaatgcacttcaggagaattccgttagccgcgcgccgatagagggtcccttctaccagcacgtagcatttggagatgcgttggacgcgttcactcccttcgcggtcctcgggtagagtcttatctgtgaggtatgcttggatctcagcgatccaagcaatcaatctaagggagctgggagcgctcccctcgggtcccgaggcctggactccgacgggcatcgagggcctgtcaggcgcgtccgtctcccctaaggggttgggtcacgccgacggctgggcaagcctttcttcaaaggcgcccggtggggtctgggctcgcgaggaagcgagccgtgagagttcgtcggcaaccgtgttatcctgtctgggcacgtgccgaagctctatcccgtcaaaatggcgctccatacgccgtacttggcgcacgtaagcgtccatctgcgggtcagagcaccggtactccttacagacctggttaacgaccagctgggagtcgcctaacactagaaggcggcggatccccagtccagctgccaccctgagtcccgcaagaagtccctcgtactctgccatattattggtcgcccgaaagtcaaggcgaaccaaatatctgaggacgtctccgctcggcgaggtcaacgtgacccccgcaccggcgccctgaagagacagggagccgtcgaactgcatcacccagtgggcggtgtgaggcagctgtgaggggcccgagctggcctcggggactgagacgggctcgggagctggggtccactctgccacaaaatcgacgagggcctggctcttgatagcgtggcgtggttcaaagtgcaaatcaaactcagaaagttcgattgcccatttcaccacccgtccagtaccctctcgattatgcaagatttggccgagggggtaagacgtaatcaccgtgacccgatgcgcctggaaataatggcacagtttcctcgaagccatcagaatagcgtaaagcatcttctgggcctgagggtatcgggtcttggcgtcccggagggcctcactaacaaagtagacgggccgctgcacctttcggtggggccgatcctcttagctaggggccacatccctggggtgctctttgtccaagcggcctcgcggggtgcactcgtcttctgtgccgacgacctcggggtcggaggacgacaggggcggccttcccacagtggactcggggccgtcctgggggtcgggggctcctggcgtcgttggacaagcgggcaaagggccaactccggtcgtcaggggccttaggccaccgttcggctccgggggccttttctccctgctctctcccgggtcgagtcgtcacagagttagcctcggggtcagagggcgataggtgcggccttcccgcagtggccctcgggccatactgggggtcgggggcacctggcaccgtctgacaagcgggcagagtgcctgctccggtcgtcgggggccttgggccaccgttcggctcgggggcctctcctccatgctctctcccgggccaagccagcacagggtgggggtgcgcggaatgaggattgtcctcatcgcgctccacaaccaacgccgcactaaccacttgcggggtcgccgctaagtagagtaacaagggttcatttggctccggggcgaccagaactgggggagagctgagatacgccttcaactgagtgagggcacgttcagcttcctccgtccaagtaaacggcccggagcgtttgaggagcttaaataagggtagcgccttctctcccagcctcgatatgaaccgacttagggcggccatgcaaccggtgacgcattgcacatccctaagcttgctgggggggcgcatccgctctatagctcgtatcttctcggggttggcctcgatgcctcgggcagagaccaaaaacccgagaagcttgcccgcaggtacaccgaacacgcacttatcggggttcagttttatgcgggcggagcggagactctcaaaagtttccgctagatccgagagtaaggtctcttggttgcgcgtctttacaaccaagtcatcgacataagcctcaacattacgtcctatttggctacccaaagaaattcgagtagtacgttgcaa

SEQ ID NO: 15879 - DNA, 1127 bp, Oryza sativa
cgcgcgctgctccatacaagcaagcgcgactttgaggtcgccatggacagagatggggccaccggggcccggcatcttcatctggaggtaggcgtagtggactgccgccatgaacttcaccaacgcgggcctccctaggaccgcgttgtagggcagactgaggtccgccacatcaaagttcacccgctccgtgcggaagttggcggatccaccgaaggtgaccgggaggtcgatatgacctagcggccaagtgtgacccggcgtcacaccgataatcggctggaacggccggagcaccattcccggggccttgatagcgtcaaaggctgcgggggaaaggatgttgagggctgctcccccatcaatgaggacacgccccagcttcacgttgcaaacagtgggggaaaccaccattgcgatctgtcctccctgggcaacgcacggtgggtggtcggtctggtcgaaggtgagggcaaccttcgaccaccgcgcccggcgcgtcgcctcatgagtaggggccgcggccagaagctctcgcttcatggccttgaggctccggcgagaaacgtgagcacacgctcccccatcgacagtggaaatggtggccccaggctcttggaaacctaggtcatcatcgccgtcatcgatgtcctcggcgggggccttctgcttggcctcacttcgccgattgccggaaggaaccgccgaggacttgccctctcggcgctcctgcctcctctcctcctcccacttcctcgtccgctcagccaaacttttgactgcgcggcagtccgcgaggtcgtgaagggaggtgttgtggacgatgaaccacttgccggttgggcgctccctactgggagcgccggcctccttctttttgttgctcgcaggcctcccctttcgggtggcccgcgaagcgccctcgacggcgaggacatgaccctcgtcgtcggaatgggctgacctcttcttcctcctcctgtcacgccgccctgtccgagcagcggatccgggggcggccgaagctgccacaccggaaccggaggggttccaggtccatgcctcttccttacgagccactcggtccgcgagctgaaaaagctccgcggtagtctggggctctttgg

SEQ ID NO: 15880 - DNA, 807 bp, Oryza sativa
aaatctcttcctcggcgactttatacccttgccaacgctgtgcccggctcctcgtttctcgcgcccactatcttgccccctcgtttctcgcgcccacgcttccactaatcccattcgcccgtttgcggtgcatgaggtggatatgcggctgtggcagtcgagatggaacatctcgtgcgcgcgttaattacgctcgccgaccaaagcgccatcaccatatctccaggaaaaacgaaccggcttgtcccgatttttagaccggccccaccatgtcaccaggccttaggaagtggcgtcacgcccgaccgcttccctcgaggagggcgatcgccctggcataacgccgggggctactgtcggtgacatgggaccgggagtatcatgacttagagacttgaggcagacacgatcacccacgtggcctaaccccctcggggggggtcgggcccgagggtgatacggccgcccttctctttgtctccccgaggggtcggaccgctcccgtctcggccccgagggccgaggcgccccgaccccttgtgggttttgcgccgcgtatatggggtaggtgagcatagcggggctcacctaaccacatttattgcggtttggacgagcgcgtcacgccgcatgtaacgcagtgcagcgcgctcccgatcagatcgtgggttaggtggcgacaggcggtttgacgcacgcctcgccccatcccgtcaggatgagagcctccaagcactcgtccctagccggagccggcgtgttagctcctgaagatggcacgttggtcccggtcagatatatatacca

SEQ ID NO: 15881 - DNA, 3244 bp, Oryza sativa
ttttgcgccgcgtatatggggtaggtgagcatagcggggctcacctaaccacatttattgcggtttggacgagcgcgtgactccgcatgtaacgcagtgcagcgcgctcgtttatccggtctgtgaccaatcacagacatatcagatcgtgggttaggtggcgataggcggtctgacgcacgcctcaccccatcccgtaaggatgagagcctccaagcactcgtccctagccggagccggcgtgttagctcctggagatggcacgttggtcccggtcagatatataccaggcttcatcctaaccattacaagcaagacattgtatgaagaggggcgaacatgcagattgataaactgacgcgtggtggacaagaatgaccgatttgtgaccggtctgacactgatcatgtcgtcagcagacagccatgttcccacgtcgcgcctgcttccggcgaaagtggaggtaggtatgggctgtcccatcagaaggtcattcagacggcaaccatacaagtctccgtctgtttatgaaaagataggataagtccccacaaaaaagagagagatggtgcatgtggtatccccttgaggtataaaaggaggaccttgcccacttagaagggggatggattttcggatccagaacgatcagagagggagagagtaagggctctctggttctccagctcttttgtagcttcttcatacatagatccacaaaaacacaggagtagggtattacgcttctcagcggcccgaacctgtatacatcgcccgtgtcttgtgtgtttccattctcgcgaaccttccacacacagactaggagcttagaatctcacccagggcccccggccgaaccggcaaaggggggcctgcgcggtctcccggtgaggagccccacgctccgtcagtggtggtggacaaagaagccgatggaggatggtagtatagagggttcgtcggcgagcctcgctggtgttggaggtgacgttagcgatgtgaataggcagcagtgagagggttggggggggaggatggcagcgccggcaactaggccattaagggcaatatatatatatgagaccatggatgtaatctaggtttttaggttgtgatccaatggtttaatatttgcaatatttgtctgcaaatttttctggcaaattatatacttttttgcaagattcatttttctttagaaaattcagttgaatatttgtttttcttccgattcatgtaggatctgtttataggtggcagcgagacggcggcgacgacgctgcaatgggcaatgtcagagctgttgaacaatccaaaggtgatgcagaaggcacaagacgagatacgacaagtgctttatggacaagaaagaataaccgaggagaccataagtagtctgcattacttacacttagtcatcaaggagacgcttcggctacaccctccaacgccactacttctaccaagggaatgtcgtgaaccatgccaaatattaggattcgacgtgtctaaaggggctatggtactcatcaatgcatggtctattggtagggacccaagcaactggcatgcacccgaaaaattcatgccagagaggttcgagcaaaacaacattgactttaaggaaacaagctttgagtacataccttttggagcaggacgaagaatctgcccaggcatgacgtttaggctagcaaacatcgagcttttactcgcaagccttctgtatcactttgactgggagcttccatatgggatgcaggcaggcgacctcgatatgactgaaactctggcggttaccgcacggcgaaaagccgacctgttggtagttccagttgtgcgtgtccccatcgtgggttaattagccatccacatttcagttgaccgttattcatatcgatcagtgtctcgctgtcctttgtccaaatgtcaaattaatcagccccaataatgatcatatatatgttttgtttgacttttagtttgttcgagcagcagtaagtagataggctaagctttgaacaaacattcaatgtcgttcatgaaatgtatctgcgagtgatctccaatggtatcttgacagtgatgttttccaacctgttcagacaatatttttcaacatgttcagacaatttttgtccctgcttagaaacttatcaagatcagaattcagattattagaaccaacttacaacaatgaacaaactgcaaatgatctgaagtccaaaaaaacaactatgcctatgctgaattagcaacgactgaatgagaacatgcaaagcgagagctcatctgctcaccttcctggatactcacacgtcgtatgcatccattctcctcccgtttcatccccccctcaaaaacttcttgtcaacatttggcagagcagcggtgatttcaccgtgccatgttttggaatttcgacatcctgtctcagtgtctccacacaaaatgtttttatttttgtttgtgttttgttttaaagaggccaaatgagtatcagctccacaacctcagggcagtaggacactctgtttggctgggctataacttttcagataaacagataattagttaagataatatagatgcttagatttgatttggtcaccacatgactaacactagtacatgccgataaaaatgctgctttgcaatatgagaacgataagtatcttgatatgaaattaaatactcctactaaaataacaagtaatatgaagaataaaaaagaaaagtattttttatgataacgaaaagaaatccggtctctatgttcacacacggccctttcagtgtagtatgctaaaaccttgtcaacggcccagaattaacgtcgtctgaatgtcaacatgaaagaactcatttgctcatgggcttcaccttcctgcacactcacgggtcagatatatccattctcctcccatttctttccaccctcgaaaattttgtcaacatttggcacagctgcagtgatttcactgtgccatgttctggaatgttggcatcctatctcactgttgtgtctggctgcttggctggccaatgaattgtcagatataatagactagtattagacaaaataatatagatagttagatttaatccattatctaaaagagcttagatttgatcaggtcatcacatggctaccactagtagatgtcagtatcactttggacatttggacaaacactttcttatcggcacagcttctgagctccttcagttcaatccacccatt

SEQ ID NO: 15882 - DNA, 1289 bp, Oryza sativa
gctgctgtcggcgtacgcctccgactcggcggtgcacgccatcatcggaagccggttcaaggacagggacaagtacctgatgctcctggagcgagggctcaagctgttcgccaggcacaccttgccggacctctacccgtcgtcgcgcctcgccatgtggctcagccgcatgccgcggcggatgatgcagcaccggcgggaggcgtacgcgttcacggacgccatcatccgggaacaccaagagaaccgagccgccggcgccggcgacggcgacggcgacgacaaggaggacttgctcgacgtgctcctgaggatccagagggaaggtgacctgcagttccctctgtccactgaaagaatcaagacaacggttggagtaagcactttaattaggccgtgttttagtgttctttctagcttatttaccaaatcatactccatattttttacaaaatattttatcttgaaaaaacatttttttcactacaataaaaacttgttttaaattattggttaagctaatttattaaaatatttaattcattcatataattaactagataatccgcgttaacaatatgctcaataatctaagtcaaacgaggcaccctaagaattatgatattactttgtcacatgtaacactaattaatctagatagatttatatgtttaaatttattaacatcaatatgaatatggaaaatgctagaacgacttacattgtgaaacggaggaagtatgatattactttgtcacatttaacactaatgaattttacttcctattatttgtacaggacatgtttgcgggaggcagcgagactgcggggacggcgttgcaatggatcatggccgagctcataagaaacccaagagtgatgcacaaggtacaagatgaggtacgacaaacacttgccggtcgtgacagagtaactgaagatgcaataagcaacttgaactacatgcaccttgtcatcaaggaggcgttgcggctgcatcctcctgtgcctctactactgccacgggagtgtagaaacacctgccaagtcttaggattcgatgtgcccaaaggagcaatggtgcttgtgaacgcgtgggcgattagcagggaccctcagtattgggatgaacccgaggaatttatccctgagaggtttgaggatagcaacattgatttcaaggggacaaactttgagtacacaccattcggggcaggacgaagaatgtgccctggcatcgcatttggtctggcaaatgtagagcttaggggatcctctagagtcgacct

SEQ ID NO: 15883 - DNA, 2589 bp, Oryza sativa
tgatcggccacctccaccacctagccggggcgctcccgcaccgcgccatgcgcgacattgcgcggcgccacggcccactcgtgctgctccggctcggcgagctccccgtcgtcgtcgcctcctccgcggacgccgcgcgcgacgtcatgaagacgcacgacctcgccttcgcgacgcgccccatcacccgcatgatgcgcctcgtcttccccgagggctccgaggggatcatcttctcgccctacggcgagacgtggaggcagctccgcaagatctgcaccgtcgagctgctcagcgccaggcgcgtcaattccttccggtccgtccgcgaggaggaggtcaaccggctgctccgggcggtggcggcggccgcggcgtcggcaacctcgccggcgaagacggtgaacctcagcgagctgatgtcggcctacgccgccgactcgtctgtgcgcgccatgatcgggaggcggtgcaaggaccgggacaagttcttggcgatgctcgagcgagggatcaagctgttcgtgacgccgagcttgccggacctgtacccgtcgtcgcgcctcgccatggtcgtcagcaggatgcctcgccggatgaggcggcaccgcgaggaggtgttcgcgttcttggacgccattatcgcggagcaccaagaaaacagagcctccggggaagatgaggaggacttgctcgacgtgctcctgaggatccagagagaaggttgcatggagtccactgttatccaccgaatccatcaggacaacaattggaggaagtactcccatgaacacacaaataactcaaaaaaaagtacaatcgtaatttcacgcgaatagcaaatatcatcgccatctatagttatactctgtaatctctatctctactattacaaaaaattaaagatatttttgtcggtattttggtccgtcatctgtgtatgagttggttttcaagttcgttcgcttttaaaaatacagatccgtatttgagtcgggttttaagttagttcacttttggaaatacagaaagagtcgtataagaagtctttttaaaaagctcgcatgctaatttgagatgaccagatttctaattgcagcttatgattttctagaaaaatatatatcgaaacgaattctcacagtgaatttcaccttaactaaaccatataataataataagataaaaataatctttatccgttgcaacgtacgagcattttttttctagtaataacctgccactttgtaggacacacaaacgagagattttgcttatttcctaacccccacaaatcctaagagctctagctcaataggcacctaaaaagtaacagcaaaattaacataatcatatataatatattagataataaaaataatttgttatgggcttcaaaaaatatatacaatgagctatttttattaaaagaaatccgttgtaacttagtagtgttatgctagtaagaataacgcgtgaggactgaacctacacgtcaatgacacatatatactataattttgttttttgatacaatgatatttttcagcaccataatttttttacagggttaccaagcaaattagcaaaaagttaccatggcttttccacaaaatgtagttacctgaaaatttggcttcatggtacacaggacttgttcaatgggggcagtgagacgacagcgacgacgctacaatggattatggctaaactcatgagaaacccaagagttatgcaaaaagcacaagatgaggtccaacgagtattcattggtcagcacaaagtcacagaagaaaacctaagcaatttgagttacatgtacttggtcatcaaagaggcgctcgggctgcacccgccaagaccaccactgctgccacgagagtgtcgaactacttgccaagtgctagggttcgatgtgcctaaaggaacaatagtgctcgtgaatatgtgggctataaatagggatcttaagtactgggaccaatcagaagagtttatactagagagatttgagcatgttgatatcaatttcaaagggatgaactttgagtatatgccgtttggagcgggacgacgtatgtgccctgggatggcatttggtctagtgaatttagagctcgtactagcgagtctcttatatcactttgactggaagttatctgacaaaataagtcggtgacctagacatgacgcagaagaggggggccaccacacggcgactccatgatcttttgcttgtccctgtgattcgagtgccgttaccgttagactcgcgcagctagctaggtgctagataagtagcttgtgattttttatttcttgataaagcgaccaaatatattggttcactaatgtttacctatgttcaaaccttaacaattaaattattacaaaactacttcaactcactgtgcaattaattacatttgtacattccgatatgtattttaatatacagtttctctgtgctattcatcttttgttattgttatatttgcagatttatgtgtcatatttattagacgaaaagaagtagaattcaacacaccacatatgtccgacggcttctctggatagcaagaaaaatta

SEQ ID NO: 15884 - DNA, 649 bp, Oryza sativa
ttctcgcgaaccttccacacacagactaggagcttagaatctcacccagggcccccggccgaaccggcaaaggggggcctgcgcggtctcccggtgaggagccccacgctccgtcatctggcgcgccaggtagggggctttgcgtgtgtttttctaagctctcgcattctttcgtgtgcgccaagcttttcctgttcagcccaatggccgaacaagcaaaggcgcacatcctctctccgagtggtagcggtgacgacggggagccgaacccacgccgtcgagctcgtactccaccgccccctccacgccaaagtcctaggcgggaggagacgctcgagagggtcgaaggatccgcgacttcgacatccacgggtgatggggaagggcggcgagatggggagcgtcgcctcctcgtctacggcgacggcagcacgccccagggcgcgctccaagctacgggcgcgctcctacgtcacccgcccattgtccctgacccggagtctccagcccaacgttggctggacgacgtggccaacttggtcatgacggcacggcagcgcctaggtgctggtgggcggtcctccgccaccaagacctctggcgctgctaccaccggcttcgtgtcgtcaaggcggaaggcgcggcgagc

SEQ ID NO: 15885 - DNA, 7214 bp, Oryza sativa
aaaagagttgctacgtgtttaatgcaaggagtcaagtgctataactaattaaagccaaaatggaataggttttgtgtatcttggttatgcagaagtcgagagtattctcagtcagtggtatcacttttatataattagctaagttcaataaagcttccattatatgttaaagaaattggaatatgtcaatgactacagaaaaaaccacttagtttaaaaatccgagcaatagtcgtgtactattaatagccacaaacagcacattctactatattaattagctgagactatctagtcagaattcttgtcacgcaattgcttggataactctccttaatagttttagttttattggtatcaatcctttctgctgcataatttggagaagaatatcaggttcatctgctactgttcgcaagttcatttgtactggttcatctcctaagtaaccaactttgtttgatttgtactaggtatggctcattcgaagtcggatggcacgagcttttggtggcacgcaaaatgccagtaatatatgaataattaactgttataaacttacaaatgaatttgtttaattttagaaaagaaaaactttatatataaagctattacaagacgtatcgtgtaatagtttgggatacgcgctagggagaagaggagagtagagccaagctcatataaaggactagatctgtatggtggcaagcatacataatattaatcaccgcttcgagccggccggcaacatcagctagacgccagacacgagcacgggcacacgaagtgtggggcggagcgggaggtcggccttccggcgggcggtgataccaaatccctcagtcatgtcaaactcagcggggtcggccacgtcgggcgcctcccagtcgaagtggaatagcaggctagcgagcgcgagctccacgttggcgagcccgaacgccatcccggggcacatccgccggccaccgccgaacggcaggagctcgaagtcggcgcccttgaagtccaccgcggcggccgcctcgccgtcgccgaaccgctccggccggaactcctccggcgagccgccgggccagtaccgctcgtcgcggccgatcgcccaggcgttcaccagcacctgcgcgccgcgcggcacgtcgtagccgagcacccggcacggctcccggcactcgcgcgggagcagcagcggcagcggcgggtgcagccggagcgtctccctgacgacgaggcgaaggtacgggagctcgccgacggcgagcgcgctctctgacacggcgccggccgcctcgaagtcacggcgaacctcggccgtcgccttcttcatcgccgccgggttccggattagctccgcgaacgcccaccccagcgtcgtcgccgacgtctcgcagcctccgctgatgacatcctgcgtgtgtttcatcgtttttttttatgatatgaagctgcgtgatcgagcattcgagctggccatcatggcagagaaaaaagaacagcttggaaagacaccatgaaaccattgttcataagaaatgctgctagtcactcacaacgacgacgcatttgacggcgtccatgtcgagagggaactccagcccgccctccttatgtatcctcagtagcacgtctagaatgtcttcgccggcgccgccagtctcctccaggtgcgcctggatgatgccgtcgaggacgccgaacatcgtgtcacgacacctctcggcttggcgcacggcgccgctgagacggccggcgagacgcgacgacggccacaggtccgccacgttgagcccagcagcgagctcgatggcgcggtcgagctggcgaagaaacacgtcgaggcccgcgcaccgctcgcccaccacggcgcgcacggtgggagtcggccacgagcgcgcacagcgccgcccgcagctccacggtccgcccgtccgccgcggccgcggcgaccgcgcgcagcgtggcggcgacttcctcctcgcggatggggcgaaaggacaggacgcgtcgcgccgagaggagctccgtgacggcgatcttcctcagctggcgccagtagtccccgtacggcgcgaaggctatgtccctgcctcctttggtgaccgcgcgcacgttggcgctcagcggccgcgacgcgaacgccgcgtcgtgcgtccgcatcacctcccgcgccgcgtcccgcgacgacaccaccagcgtgggcacctctccaagccgtagcatcatgaccggcccgtggcggcgcgccaggtcgcgcatcgcggggtgcgggagcttgccggcgaggtggtgcaggctgccgatgaccggcagctgccatggccccggcggcaaccgcagcccggcgtcgccatgtgccgccgccgccgatcgcctgcgcctggcgaacagcacgacgagcaacgacacgagagctaagccgaggtagaagtaaccatctgccattgctgtgtcgcgcaggcaggatgctggggcgctcggctagtgtttgccagtgttggtgcgtacaaaatgtagtggaggagacggctcgtggatgaaggggatttggttcttaatctgtagtgatgtcgttttcagtatggagctccataatccggatgcgacgaaaatgcagttaatcttcgtgaggacaaatgaatgttatcttgtttatttctggtcatttataacgttaatcgtaaaatgagtataaattaaccggctaggtttctggaatctatttatccggatttaaattcttaagtgggcataagcacttgtctttatgactaattattatttcattaatagacaatgtgcctctcgatagcaagccgtcatatcacaacttcctgaatattaagatgtgtcggcccacctaatttgaaaatcaaatttaatgaagagagtactaaatattaaagtttaattgcatacctaatgccatttatagtgcgcgtgcttgacgttcggccccgaccatccacatcggggattccatgccacgcacacatctgcgctcccaacctgaagaccgtggaaccaaacaaagccaccggttcttcatcaaaatttggatagacatttgtcaaggcggaatgaggcacagggcgagcagcgtgttgggtgaggtgtggccccgtgcgacgcctccacacctcgtgcaaggcggcggaggtcgccagcgaggccaccatcacgagctgcgtcgtcgccaaagcggagctcgctaaatcctgtgaacccgaggtcggatctgcttagtggggtggtggtcgagtgaggagaagggaggatggttgcgacagaggaaaaggaggtggcaaactaaccttgttttcgttcccgttcagcgccgccaagctcgtcgtcgtccccgctccgaaccacctcggtctgcatcagcagcagcttgacggagagggagaggagctcgtcagtatccggccaagggaggaaagccaccagttggagtaggacatgagtgggggtctttgaagagctcccgccgtcccttgctcccacgctgccgatctcgccgtctcccgcagtccacgccgcccaagggaatagggccgccagttggggaaggaggatatataggaggggtggtgtgccggtggcgactgtatggtgaggagcgtgggtcgccgttgggggatgggaacgggagaggcgtcggtggcactggaagggcaacggggaaagtgaggaaggagggattttatatatgtttccgattttgagggtgttttgtgtaaaatttgaagtattctctaaattgacaaactacgagaactttaatgtaaaatgttaggggctgatatgaaaagttaaagccacaggtataactcctttgcattgtgggataaagagagagttgagacccgttgccccatgctacacgaggtttctcgtaacaaagtgatgcactgtggaataaagagagagttgagacccattaccccatcctacatgatgcttctcataataaagtggttctctgtgaatggctcgatagaattactgccaacatgccttaggtttcacgatgtttctagctccatcataagatccatataagcagtgagatatatattatgtggggattcttcgcaatcattactatactacaaaaattagcgtgtctattgacgcgttgtccctttagcatatatagatcatttctttattttccatttacccttctgcgaagatcgcacatttaaaaggataatttagtgggagtatcgcgtgttaatgacctgtaggtttttaacagagtgaaacaattgaggctaaagttagaacaaaccgataaattttgataaaaacaactacacttttcatttcaattatatttatttgtgctgctaaaattctagtatgtgtctgaacctgaaattgattatctttttctttcttccttcctgtttgtgctgtctcctaggccaattggatcgtttagcacttcaaagtgccaccaggcccatgcagacccagctgcccaagctgctgctcgtgcggtcgtgcccaagcaagccgtaggtcacgcagtgtgtgtgtgggtgcggctttcctgttcctacttccgtattcccgtcccttttcctgctacgtggcctactcctattcgcttcttgtttgcctggtggccccaccctttttcttcccaaatcaaaacagaaacgtataattttttcagccttcattactccattggtatattggattagttccgcttggacacttccacctccaatgatgccccgtagccgcaggtgatttcctcttggcagtttcttcgctaatcggatgtgtggcgcatctcaatagctttgattatgtctgcaagtttcaagatgtgctcaggtaacaccaaaaactgttactcgggtgcttcctatcatccatggatgaacatggagacaaaggtttttggaagttttgtccttttatgaatgtgtagcagttaatctgctaggagttcatttcaattttcatcggtggaagcctgtaagagagtacatactcacagagtcgcagacttgcacggttgcaccagaatgtatgaaaaaaataagaaacaaagaaaaggatggaaagaggcatcgccctagttgaaattgttatcaattaatgatcttctataacagtattgattttgttcttgcctcaagctagctaaggtttccgttttgtccctttgataccacacatgccattgatgcaaaagcacagtaatttgttcaggatggtttagggcaggcaacactagcaaggaagaatccaagaggacctctccaggtgatgagcatgcacccgataaccagcaaatcagcaaaagttgttcagacctgaacgatgtgaggatcagtctggaccctgtagggagagtgttggagactcgatttttgtttttccgatggatgggaaggaagtagggccaccggtgaaacaaaagcaaatggatgtacgccatgtagcggaaacagggacgggaatacggaagtagtaagtacaggaaagccgcatctgggggaggggggtgccacctatgtttccggatacggttttggactttttcttttcctggtaacttgaatttatcttagaaatccagcctattttcatactggcggacttgaaagcttctaaggaatcccttgaagtcttggacaaacagagaagagaagatagttcttgtgggcgggaaacgaaaccatcacaggagggaagtgcaaggtgaattggacgtggactttcctctctactgcctcgggaggtcttggcatcctgagtctcgaaaaattcgcaagggcccttcgattgcgatggctctggcatgaatggaagtcaccggaaaaggcttgggcgtggggtcagaaacaccttgtgataaaactgacaagctattgtttgaaacagcaactacaaaacaaattggagatggagcgaaagtgaagttctgggagttggcttggctccgggcaaagattgaaggatgtcacaccactagtccacgcggcctctaggaaaaagagcaggaccctcaaacatgctgctttggtagatcaatggctagagtcgaccttgctcttccaacaaacgaaggatggacaacggatctgattgaccagctcatcaccatttggagcgccgttcagaatgtacacttcacggaacatgaagaccagatcacctggaagctaaacaaccatggcgaatacacggccaccacagcttataaggtgcagctcctgggtacaacatcgtcaaatttcgacaccctaatatggaggccttggatgccgcacaagtgcaagtcctttgcctagctgatactccaatacagagagtggacatcagacagactagccaccagaggctggcccaacggatccacatgccctttatgtcgccagactcaagagacggctttgcacctgctagcggaatatagatacataaggagaatctggaatgaaatcgcgcagtggacaggcaacgaccatttaagaccttctagttggcaagtaactttgacagtatgagtggtgggaggcccccgtaagcatacgggaagcacacgctaaccttgcttgtgaaccggagatatggaatgaaaggaaccgaaggactttccagcacaaggagttgccagcgccaactctgctagccaagataaaggaggaagcaaaaacgtaggggctggcgggcgcaaaaaatctcatcgcctggttgacaatgtaattgccagtagttaggaccgtggccctggtttgtttcctgtacattctccctttttatacagtttcttctctattcaataaaattggtggcctagtcgattcgttcaaaaaaaaaattatcttacaaatcgaggtgccacatgaaccaatcagatgttgacataacagcattagaagtattggttgatggattgattggttgattaataagccctgggacgttgtacgtatttatcttttgtttcaggacgcacatgtcagtttctacagccattacagaagcagtattggtatactactttcttcaatgcagttgtgtgtttctgtgtacaacgtttaaccactgtcttatttgaaaaatatataaaaaaataaaaaatagtcacacataaagtattattcatgttttatcatctaataacaataaaaatactaatcgtaaatttttttcaaataaatcagatggtcaattgttggatataa

SEQ ID NO: 15886 - DNA, 2740 bp, Oryza sativa
gggcgaattcgagctcggtacccctggggttttgcaactatttattggtccttctggatctcggagaaaccctccattcgtttgctcgtctctgaccaccattgggtatgttgcttccattgccaaactgttcccttttacccataggctgattgatcttggctgtgtgattttttgcttgggtttttgagctgattcagcggcgcttgcagcctcttgatcgtggtcttggctcgcccatttcttgcgattctttggtgggtcgtcagctgaatcttgcaggagtttttgctgacatgttcttgggtttactgctttcggtaaatctgaaccaagaggggggtttctgctgcagtttagtgggtttactatgagcggattcggggtttcgaggaaaaccggcaaaaaacctcaaatcctcgacctttagttttgctgccacgttgctccgccccattgcagagttctttttgcccccaaatttttttttacttggtgcagtaagaatcgcgcctcagtgattttctcgactcgtagtccgttgatactgtgtcttgcttatcacttgttctgcttaatcttttttgcttcctgaggaatgtcttggtgcctgtcggtggatggcgaaccaaaaatgaagggttttttttttttgaactgagaaaaatctttgggtttttggttggattctttcatggagtcgcgaccttccgtattcttctctttgatctccccgcttgcggattcataatattcggaacttcatgttggctctgcttaatctgtagccaaatcttcatatctccagggatctttcgctctgtcctatcggatttaggaattaggatctaactggtgctaatactaaagggtaatttggaaccatgccattataattttgcaaagtttgagatatgccatcggtatctcaatgatacttactaaaacccaacaaatccatttgataaagctggttcttttatccctttgaaaacattgtcagagtatattggttcaggttgatttattttgaatcagtactcgcactctgcttcgtaaaccatagatgctttcagttgtgtagatgaaacagctgtttttagttatgttttgatcttccaatgcttttgtgtgatgttattagtgttgatttagcatggctttcctgttcagagatagtcttgcaatgcttagtgatggctgttgactaattattcttgtgcaagtgagtggttttggtacgtgttgctaagtgtaacctttctttgcagttcctgaaattgagtcatggctgccaagctagctcgcctccacagtctccgcgaacgcctcggtgccaccttctcgtctcatcccaatgagttgattgcactcttctctaggtgaagatctcaatataatatcttgtgtcttcttggaacctgctactaattgttttgagttttcaatgattttatccatacagttggttagttcttagtcaacccagatgtgaaacgataacatgttagtatgttacaaattcttagctgacaaggttatgcatctctttagttttaatgatggtatctataataatctgtgatgagctctaacatttctgtcttgagtcatgaatcttaaatgatgttgaaatattgtttgttcatagctagattaagtacagatcatgtggtcttaaaaataagaagtaaaaatcaggtttatgtggtagtgccattaacatagttcagccgcagaaaggatgtgagatctaagcattggttctatttcttaaatatcactctatgcaggtatgttaaccagggaaagggaatgctccagcgtcaccagctgcttgcggagttcgatgccttgatcgaagctgacaaagagaaatatgctccctttgaagacattctccgggctgctcaggtaaatttggcaatgagccaggatggttatgatagtcaactcaaagtcaaataccagtctttctaacttacttccttgactgtatgtaggaagccattgtgctgccgccctgggttgcactggccatcaggccaaggcctggtgtctgggactacattcgggtgaatgtaagtgagttggcagtggaagagctgagtgtttctgagtacttggcattcaaggaacagcttgttgatggacagtaagtaccagaacgacgatttgcagattataactgaagcaaaataacagtgactgaattttacttctgtttttcttaaacagcaccaacagcaactttgttcttgagcttgattttgagcccttcaatgcctccttcccgcgcccgtccatgtccaagtccatcggaaatggggtgcagttccttaaccgtcacctgtcgtccaagttgttccaggacaaggagagcctctaccccttgctgaacttcctgaaagcccataaccacaagggcacggtaagcttccaatttgtggaacataccaaatgcttttatactagatgttttttcttgtgtgaattgctttaaatgttagtcctttagaaacccacttgacattctctgtaagttccaccaaatgacgggatccgaattttctattacagacaatgatgctgaatgacagaattcagagccttcgtgggctccaatcatcccttagaaaggcagaagaatatctgatgggcattcctcaagacacgccctactcggagttcaaccacaggtgattactttattatttctccttatcatatagcccatgtt

SEQ ID NO: 15887 - DNA, 568 bp, Oryza sativa
ctttttaacaaattttccccttatatacagtacttcaaatatttctagttttgacctgttattctgttgtttgcaggttgtgtacattttggaccaagtccgcgctttggagaatgagatgcttttgaggatcaagcagcaaggccttgatatcacacctaagatcctcattgtatgttcaagatgttggtcttgaatgtttcaagttttaaacacttctcagtgcgaattgtagagtaacgtgcggacatgattttacttgatgcaggtaaccaggctgttgcctgatgctgttggtactacatgcggccagcgtgtggagaaggttattggaactgagcacactgacattcttcgtgttccattcaggagtgagaatggtatcctccgcaagtggatctcccgttttgatgtctggccattcctggaaacatacactgaggtaaatggtttatctgacaacgtccttcagagctgagcacaaaccatgaattctgagagctcatctttttttttttggttgcaggatgttgcaaacgaaattatgagggaaatgcaagccaaacct

SEQ ID NO: 15888 - DNA, 3587 bp, Oryza sativa
tctaaagagcagtagaatattgctgcgttgtgccaacacctaaacgggtatctgatgtttgtttcctctgtttcttcagcaaggacactgtggggcagtatgaatcacacattgcattcacccttcctgggctttaccgagttgtgcatggcatagatgtttttgatcccaagttcaacattgtctctcctggagctgacatgagtgtctacttcccgtacaccgaggctgacaagaggctcactgctttccaccctgaaattgaggagcttctctacagtgaagtcgagaacgatgaacacaagtgagtactgaactgctggttccgtccctgttattcacctaccatgtaacaaataattaaacactgatttgtgtgtttggtctagctttggctcttcagtctactaagtgccatgcactagaactttgtagatttgaactgcaattcttaattttctcactccttagtagaccacaataataattattgtgtctgacccagctagtttacaatagtgacttcaatgcttgttttttccccttgaacaattgtttactttctagcagtggagtttggcatctaaacttgaatacacgctgttcttttttgtgtataaaatgtttatttaatgttctgcaggtttgtattgaaggacaagaacaagccaatcatcttctccatggctcgtcttgaccgagtgaagaacatgacaggtctggttgagatgtatggtaagaatgcacatctcagggatttggcaaaccttgtgattgtttgtggtgaccacggcaatcagtccaaggacagggaggagcaggctgagttcaagaagatgtacggtctcattgaccagtacaagttgaaggggcatatccgctggatctcagctcagatgaaccgtgttcgtaacggggagttgtaccgatacatttgtgacaccaagggagtctttgtccaggtatatacatacgctgtcatattctactgctatatttctattctgagcttccagtagcaaatgatttctactatttgtaaagaacagccttgtgcttgagactaaaactgcttttaaaattgttttttagcctgcattctatgaagcgtttggtctgactgtcatcgaagccatgacatgtggtttgccaacaatcgcaacatgccatggtggccctgctgagattattgttgatggggtgtctggtctgcacattgatccttaccacagtgacaaggctgctgatatcttggtcaacttctttgagaagtgcaagcaggattcaacctactgggacaatatttcacagggaggtctgcagaggatttacgagaagtatgtatttcatgatctgcaaatatataacattttttttttacgattgacatataactgtagaaatcatgtgtccaatctatattgatcctacaaatttggacttgtcaggtacacctggaagctgtactctgagaggctgatgaccttgactggtgtatacggattctggaagtacgtaagcaaccttgagaggcgcgagactcgccgttacattgagatgttctatgctctgaaataccgcagcctggtaagttactctcgctgttcaacagcttgttaatttcagtattattgcactgagcatatctctgaattctgttgctacatttctttgttgaatccaggccagcgccgtcccattggctgtcgatggagagagcacatccaagtaatggaggggaaaatatgcatcttcagcaggagaagccgtcagctgcattcgaatttgataattttctgtagttgtcatttggcatccatgtttgccatggatgtgtactatgtctaaggtttcagtacttttgcgagattttgggcagtgcttgcctcaaataaacgccggttcctggtgtttatcgttcagaattcaatgcaatgttttattgccgcgcttcctcaatctgtcatgttgaatgaccactccctagtgccctactgttaaaaaaggttggttcaaagccatggatgaacccaacatttttgttaccttgttcttttcagaatttccttaagagttgtgatagtaggcccagtgcgaccaaaatgttgggttccttgagttttcagtataaaatttctgatattaaatgcagatcttggctcagtacagagtcttgcaaaccatgtggttgcatcttttctactgctgtagtagatgaaactgaagatactacttattactctttagacaaagtttcatcatattcccaaaatcttggtctaggattgggagacatcaagaagatataaacttcacactcaagccctgtttagcaaccctgaataattttcttttgtgtaatgcaaatgcacctgtaaatttgggtgacccaaagatgccagtgaaatataaatcccatgtagccaaactgtttgttagaagaactagaacactcagtagaggttttagctaattacagttcattgctgatcaaggttgcatcagacatagaagtcagaccgaaacatcaatttggagctataatacaaaattcgataaaccaatacgaaattcaaataaaataacattgttcatcaaaatttctggccagaaccatccaagagcagttgtaagcgagagctcgataattcccatggtccacaaaaaattgtgcagaagatcaaatgaccaaaatctaagaacacgatgatttgcaccgcacaattcaaaatctaccagattttcctgttctcttctacttttatatcactatctctactattataaaaattaaaaatgtttttgccgctactttggtaagtcatccgtgttttagtcggttttaatcttactcctcaaaatccgcaatttagaaaaggacgaaaagaatcacgcggaaaagaaaacgcaccataaaaaaacaaaaaaaagtccaattcgtaccggaacgaaaaaaaattggcaataaatgctgggtaaaaaaaaaagccgatcgaccattaaaaaaataaaaaaatcgccaactgtaaaaaaaataaaaaaaaagtaaaaacctttccttttattcatccgttttttttctgtccctatttttttgttcgtattttcttttgcatgcggaagggtgtgtgtacatggtgaggatttttttaatctacacggttttttagtcgtcaggtcgaatcctagctccaccgccacatcgatcaacctcctcatgctttcccttctccgattaattgtaaaaatcaattctccactactccatcgtcattttccacataatttttcttttcagttcctctttaattcactagatttaatctctatttagaaatcaccgtttatatcccacagttttgtggattagctccaattttaataaaaatgaaaagaggagattgagtgaatcaaaagccctcaaccaattttgggagatcgaggaagattcgaccggatttgatgggaggatcagttcttgcatcgttctacacggactatcttccagaggttgaagatgccaatcgactatgtgagctagacctatagttctacttgtgagctggggtcaaagagaagcatatggc

SEQ ID NO: 15889 - DNA, 2851 bp, Oryza sativa
tatgagtctaagtgctcttgtattttttttgctgtgtatatcctttgtggatatagatacgggattaataaaaatcattatctaaaaaacttcccatctcagtctgaatgatcgttcctatcctgaggccatggccgccgatccggcgactatcctggcaaggatcctgctgagttgcacgctcgttggcctgaaacaaacacgccacacacgcatccataggccaggaaaatgtaattaactcaatttttttttcactttggatggcgtagcaattattaaaaaaaagttatatcagctttgctaaaattatgttgatatatttcttagctaaatacagttagtttgtgatctgttatctatcttcatggttcgcgcaaagtgcatctggataagcccatagaacaacatgccccctaataaggtgacgactcctttttgctttgcatgacacgtgctagtcatcagtgaattatttaatcaatttacattgtaattacatatataattacaaattacactatagttttttttagataatgaaaatggattatatctccggcttctgtcataagacacacagccataagtataatagtaataaaaggtaaaataaaagtaaatcaaaatgagaaataaggtgatgggacaaatccccaactcccctttattattgactagcgttaaaccacataaaattttttagctaacaattcttatggaactacgccacctatagtggaataagagacccttggctaccgattccaagagtgtagcaccattgcgtatagtatcctgctccttctgtggtagcattgtagaccaaaagtggagccagtaggaagacatgaagataacctgcatagggttagataattgtttaccattaaaaactttatcattgcgacaacgccaaattgaccaacatacagcactagctccaattagaatcatcttcttgatggacctagatacccctctaagccaattaccgaaaatgtttttggcgttacggggtgggggatatttaaaagcaaaaaaaacacacatctccaaacaaactgagcgacaggacactaaataaaagatgttggattgtctcttgtgcatagcagaaagaacaatgtttgtctcccccccatttttttttagccaggttatctttcattagaattactttcttgtaaagaaaccacataaataccttgatctttagtggaatttttaagtcccacaaaattttttttatccgaacattacagttcatgatcgcggcatatatagatttgacggaaaattgaccattcttatggagtgaccgtacaaagcagtccttttcatttgacagagttatattagctagcctgaggatcaaatcgttccactcgattagcttttggccaacaatagctcttctaaaagagatattaagcggcgttgtgctcatgacctctgccacaactttttaattacaccgtaacttttattgtattttgactgtaaaaatttgttgatagtttttctagataaaagttaattttgttgtgtattttaaccaatttacttttatttttttagtttacaatagcatattagtgatttatgttgtctttggttcatccgtaacttacccatcttttttttaatcatgtgatctcaaatccgactatgcggagcatagatttgtggcgctattattatagatagtcccatgttatatttggatggtgtagcaactacaagataatgttacatttggatggcgtagcaactatttataggccaagatgcagttactctatattctgaactttagtgtaactcctgtcttactagaagcaaatgccttccatactaggcagcaatagtggatcaaattaaagatagtacaatttcctctttatacataagtcgggctgaggaggaagagaagggatgtgtgatccaaaatatatttcgaaccagctgaagggagcacacacaacttcacctcaagttctgttggccacacaatctaaactctagccatgattgcaggattgggattgggatgcattaggaaacacttgaatggcaaaagtgatggctagtcctagctcattcccatattattctattgcacttacaaatttggcacaatcttatctccatttgcacagctggtattggtcaaactgtagtaattttagttgaacaaactatatagatgcatacaccataattttaatttcagttgaggataaagagaaactaaacatagagagagttgatacagtgagactatgagagatacttcaactgaacaaacctttgagagtttatcatttgtccacactagctcaaaaggtattggggcataaatcagcgtaatacccaattaattaaacaaagaaagaatacactgtacgagtggttggaaacttggattggatgaacagctgggccggatcaagttgcgaaatcatctaacaaaaactataattgatttgttcctaatatgcagccaacggattgaattcaagctatttatcaatttggcatgatcatttcggctcactattcattagggcccattcaatcagttcatgacaagccataaattaatacatggatttatactcgtctccttggatctcgccactcatcgccggaaggtgtcgttcgttgcaccatcacctttcaccacatagatgataccgtcaaatcggagaatacagggtattgcgaggggatgatcggatgctggaatacatggacataaatagactaggtggagtgtggacaaaacagtaaaaaaaatgtgtgggcgcctgaggggtggagagagggcgaggggtgaggggaggga

SEQ ID NO: 15890 - DNA, 1112 bp, Oryza sativa
aaaaccaacagaagaaacgaaatcttttaaaaactatcacatcaatcacactgtctccacatacgtcgcggtacttgggcttctcggggaggttggcgacgcggccggaccgccggagcggggcatcctcgccggcgcccggcagcgcacgcgccttcctcttccgctgcttcacctgcacccaccggcaaccgcccagatcaggaagagacccacaaacaaaacaaccagagagaatcaaagaccgagaaaaaccaggggaaatccaaaaagaaaagaaatggtgaggggaatctgaccggcgacggcttggaggcggattcgcggacggcggcggagaggtggtggaggcggagctcctccagcttccgcttgttcgcctccacctgccgcctccgctgctcctcgtacgatgccgcctccgccatttggctttccgcttcgatcattggaaggtgaagtgaagtgagcagagagatggaaggaaggagataaaaatcgaacctttggatggcaaagagcgatttttttacgtggacatggtgtatggaccatgagggctaatgcgttggtggtggatactatgggtgtatggactgggtgtacggagtgtgagatgagaagccgaaagattcaaactttcaaacagtccagctccccttagcttttttcctccgagaaacaagggagggtttcctttatttgaaagtacttagtgggcccacttgtcagtgagacaacgaatctgaaagagagagaaagaatcgccttgtgggctactaaaaggcttgggccatctctgtaagaatcttttttaggcccaacccattcgaaacatgtgttcgggagattttgggtctgtttagaggaggttctagcaacgcttctcacaaaatctccagctccccctaaacagattatattgttacccagattttgagaatatatagttgtagaatccaaaaaataatctagaagctagaagctggaaaacccaacttcttcaaattctcagaacctggctttcaactagtagatttttagaatcttaagttcactcaaacaggtcatttacatcggcttggttatctaaccaagataactaacactag

SEQ ID NO: 15891 - DNA, 2636 bp, Oryza sativa
cggaggaggtattctttgaacacgtgttaaatttatcatcctatacatagtataatactcctgtattcaagggtacaatgttcttctagcgctcaagagatcaaccttacattaagactacgatgttcttctagcgctcaggagatcaacttgcgacaaaaacactagtaacaattcaattattgggatattaaatatgtgaaggaatataccaaatatatgaatgggatgtaagttgagctatcaaaaggacaataccttattaaatcaagttgatcaattatttgtactagcacagtagcagcaactaatggtccagcagaccagcaccaagtggtggtgtgtgatggcccgcgaattgtttcttggcagaaatgtcatgtccaaatggtcacaaattgatcgacgagttgatggcacgcctcaccaatctccactctggagtgaagcaaaaagatcacaaaaaggttggctgtcccatggaaaaagtgcagatgcgtcacacaagctgctgcaactaacacaaaacacacgcattactaaactccaggttgtatgtacttgttggttattctgcaggcaaaaatcaatacctttcgcagctgcatagtgtgtatgtatatatgcaccaatcgaattggttttcagtgcttgttactctcaaagttgtcgaacctgaaatatgccatttcaacagacatgtttcatggtttggctgctaccatattgcggaataacctttattctgatttctgaatgagaattacagtgatgtagtaatcaattatgaactcaatttaattaccggtcaaaagctgagacagtatccaggtctaggcctgtcttaggtgttgactgtgatgagagagttgaggcaagacaatttaacacattgacattatggtttcagtcattgaactttggcactcacctaattcaggaggaatttgaaggtagctatgcccaaaaaagtttgatgtttggcacatacttgccctttttgacatgttgaggaaaattgctgactttgtaaagatgcacacaacaaatttaatttgtgagcatatggactattccttatcagaaagtttgctttgctaatctagcatatactcccaagtatatgaaaaatttggtaagataaatttcatatttttacaagctttactccctaagatttctcatcaataactaaatggaaagctttcccatttaatcatctgaaattcttacctaattaggagctaaaactcaagcaagtaaagaagtgtcgtcaggacaatctcattttgtcatctctcatttagagcaggtacaatagcatactataagccagttataaatatttttttaagaagataaaagaggagagataatagcagcaggctacagatttatagcccattgcagcacggattccaagacgcaggtgggaccagatattgattgtgtagcatatgtttatagataactattgtataaattagctattaagttgattatagatgatttgaagccagcagttggctatactattaaacttgctcttagacgacaaaaagcctaaaatgactggtggaatcttcttttgagaccatatatacacccaagggacaaaaatagtaagacaatctagagaacattttaatacgattgttgccgtgactttgtaaccccaagtttagtgttttagttgcctttatcaatgatattgcgtgcgttgaacacatgccagtaataacagccgtctctccttttcagattaaaaaaaagaagtgtacacccttctttctccatggtcgtcaaaggcttttcaaaactctttttttttttctaaacaaatatgctcccttcgttcttaaaataattggcactattaactactgctatatcatttttaacttttactgtagatgactagattataataaataaaagatttatgattatattcgtaatgctacataatttgatatgatatgtttttatattttatttgtcaaaagataggttattaaagttttaaaactgaatatatcgtgaagtgagcgtaacacaactggttagtttcttgtggtggatccagcccatattgataaacgacgtcctcactgataacgagatatccatgacgatgtgtgtggctaacccatgaactcacttatagaacaaaataagtaaccgtttattttagcctataggtaagtttgcgggttagcaacttaccactaatctgagccgtcaatctcgcatcagaaggtctccacctgtcccacgtggaccaatcacactcagccagctggccacctcccctaaccaccatcatatttaagccccaaatggccaaatcctcctcactctctgtaaaaccaagcaaacaaagaaagaaaagcatcacaaatctcacgcactgtctctcgttcgcgcaaagcacgctgcttttctccgctttgcgagcaccatagcctagcccaccatgtgcggcggcgccatcctctccgacctcatcccgccgccgcggcgggtcaccgccggcgacctctggctggagaagaccaagaagcagcagcagcagaagaagaagaacaagggcgcgaggaggctgccactgcgccaagaggaggaggatgatttcg

SEQ ID NO: 15892 - DNA, 6064 bp, Oryza sativa
acaccgatcttgttccttgctccaggtggattgaaaaacactactgttgctggtgctgatgggcctgcagcaaggtctgctaaaaggaagagaaagaaccaattcaggggtatccgccagcggccatggggcaaatgggctgcggaaatcagagatcctcgcaaaggtgtccgcgtctggcttggcactttcaactctcctaaggaagctgccagagcttataatgctaaagcacgaagaattcgaggcaagaaggccaaggtcaatttcccagatagggctccagtggcttctcagagaagtcatgttgagccctcctccatgaacatgcctgctttcagcatcaaaaagaagccggccgtcatgtcagcaggcaacaaacccatgtacaacccaaatgcttatgcctaccctgctgttgagtaccccttacaggagccatttgtgcagattcagaatgtctcatttgttcctgcaatgaacgcgattgaggatactttcgtgaacctgtcctctgatcaagggagcaactcctttggttgctcggactttagccaggagaatgatatcaagacccctgacataacttccatgcttgccccgaccatgacaggtgttgatgactccgcattcctccagaacaatgccagtgatgcaatggtacctcctgtgatggggaatgctagcattgatcttgctgacctggagccgtacatgaaatttctgatcgatggtggttcggatgagtcgattgacacccttctgagctctgatggatctcaggatgtggccagtagcatggacctttggagcttcgatgacatgcccgtgtcggccgagttctactgaggggtttggggtgtagcaactggtgcctgtatatataaggacaaatggtaagcatcagcaatgtgaaaacggctaactctttgtgacatttcgatctccatttctctgatctttctccgcctctcgtttcaggaataaacattctggacatccaagaagcggcatgtgtctgtcgggcgctgcgaattcgagctatatagctatgttagtatgttagtatgtgctgtgtctagcttagatgctgaagtctcaagtactatttggcagtgaaactatctatctgtaactgctatatgaggctggaacaagttacttagcttctaccttatctgtacttgctatagtggctgtgaaccttgtggatctgaactctgaagccaatgtttactatataatgtggttggttttataaactctagttgatttggacccctgtcaatggtcatgctatggctggggataagaaccattgatgatcatatttgactagaaacgctgcttccaaaatatcccataaagtaaagctgaacttgtactaatgttcttgcacaagttgcaataatgttgccttatggaaaaacagtttccggaccaagtggtatctgtacgaattgctattgtaggctaacaacttgtgctcaagtggaagatggtgagtatgaatcatctttccttcagttgcacttaaactccggacctacatatacattgactgataggccccagccaaaatcttgtcttctacataggaattctcgggtagtttcttattacttggtaatggttgttgcctaggaaaaattttggttgccactcagttttgattgttcttaggttggagaaaatttggccgttctttgaatttgttgtagatagtagagcatcatgttcgattgagaattttgaccgattacacttcatgaattgtacaaaattttttttatcgggctcctttctatgatttttttttacgcaagagttagaatccatgttggaatgagtttatttgagcctccaattctccaaactatggttatcaaatcttgataataaaaacatctgtgctgtgtatccaaccattgtgcactaatgcactatgatatttatgtatgtttggtttgctgctagtctaggatccttgctgcaatatgctaaaactctagtggagtattttacgttggttgttgctggtaataggcaccatcaatattgaccatatgggtatcattaccctcccaaaatatctcaaaagttaagcagtacataacaaattgcaaaggactatcttaagaaacaccgtcttataattggatttttgggcagcttcattgttgatttcgtgcagaaagtggtcttttagttcaggaagaaagtgaggggaaaccaaagagagaaataatcttccttcttcgtcgcactgctgtatgtactcggaatagacctgtcagtttgttgaaggtttacggccctctcctccatcacatttctgcagtctggtgtcgcatttcctggtgcctcctgttcctacaccatgggattcccgctaataggctgtccatcaggtttgcctccaaagaaggctcagaatgaaaggttgcatacatgaatgcaacactaataatggaagctttagtaatgtgttatatattgcctccaaggaagtatgtgttgtgttgtgtctagcttatcagctcaagtctcaagttctctctggcagtggagtatctatctgtaacaagttacatagctttccagtttattacacttcgtgaacaatacaaagttttttatcacagtcctttccatgtttctttctagacccacaaaagaactgaacatcatttaagcttcatttaaatgttggaataagtactttcgaacatcctgactatgctagtcttaactctaaaagtcacaatgatacgaagatgctatatatgaacttgagctagaaccaaggggccagaacatcacaatcctagccaagatcaaagaggaagctgtagcttgggtgaaggcaggagcatatagactccaagagtttggtattctaggagatatcacctaatgcctttttcctgggactgtcgtcttttgacaatccctgtgcataacctttgtatacttttattccttatctatcaatatactaggcaaatcttttgcctttctttcaaagaaaaaaaaggcataacattaagaaagatatttggtgccaattcattcttcgatgtctctcatccctaatgtagaatggttggatatatttcaattgcatcacaaagaactgtatcaagtgaatcaacttctctaaacttcatgctggtatcccttctccccatttataagaagagaggagcagcacaaatgtgcttggtctgaaatagcacaataaccatacgagtcatagttatgttttacttgccatattaagtccacatgacatgttcattgatcctcaattgtactagagtgtacattgtttggtgattttttgacagcgttgatgtagagtttcctgcaggatagagtcctctgtcatgattcatgagctcttcacctcagcttggaactcacgatgaaagattgtcttcactttgcagctagcatagttcgaagtgctttgtgcaagcccctctacatgtgcagtaggcttagtttcatttcaacataattttcccttgcgaggatttcaacagaaattttgttaacacatgtttacctctgaacatgcctagaactccaacctaaaatctagtgttttacatagaattctcgggcggattatacttttttcgaattatacttagtcctggcctttgggtagtagaacttttggcccgtcctcgattttgaagtagatcgtgtagcatattgtgttatctaattttgaatgttcatcatgccattactcacaagtttttatggggtttctttccatgcttttctagaaataccttcaagtaaggtacacggttgagggtatccttagatcaaaccataggggttagaacattggcaatgaggtttggtgccacttgcttctccgatgcctcccatccctagtgtacaacattataatggtatattccatgtcattgcaaagaagagtgtcaagtcagtcatctcttcttcagcttgtctgaaacatcaagggtggtatgccttctccttctctccatttataagaagagaagagaacacagatgtacttggtctaatctagtgcaacaattgtacaagccttaattatgatcattgatcaagtaaggtacatggttgagggtatccttagatcaaaccataggggttagaacattggcaatgaggtttggtgccacttgcttctccgatgcctcccatccctagtgtacaacagtataacggttgagtatattccatggcattgcaaagaagagtgtcaagtcagttatctcttcttcagcttgtttgaaacatcaagggtggtatgccttctccttctctccatttataagaagagaagagcaacacaaatgtgcttggtctgatccagtgcaataatcgtacaagccttaattatgaccattaatcactcaattgacactggagtgtactttgtttagtggtttttttttgattgacttgatgcagagattgcttcaggacagagccctctgtcatttgctcatcatacaaatttgaaactcatgatataggaaggtgaatagctcattgagagtgtgctatgctataaagtaaagctgattgctgaacttgtaatagtgttcttgcacaatttgcaaaatgttgctatatggaaaaacagtttccggaccaagtggtgtcgtactaattgctattgcaggacaacaacttatgctacagaggaagatggttagtatgaatcatcccttcagttgcacttaactccgtagcccggacatactggtagaccctagctaaaatcttgtcttctacataggaattgtcgggtagtttcttattaattggtactggttcttgcataggagaaattttggttgctcctatgttttgatgattctttggtaggagaaaatttggtctgttttcaaatttgatggtttccactcctcggttcttcgatatctcccatccgtgatgtagaatggttggatatatttcaatgacatcacaaagaacagcatcaagccaatcaacttctctgaaacttgatgctggtatcccttctccccatttataaggagagaggagtagtgcaaatgtgcttgttctgaaacagtgcaataacaatacgtgtacgttgtttggtgattttttttatacagggttgatgtagagtttcctgcaggacagagttctctgtcatgactcataattatgttagcatgtgtttgacttcttggtgtttttgcccatcttagttacaacttgcacttgcttaccttcggacatgcctagaccccagcctaaaatctagcgttttacacaggaattctcacgtgaattctttttacttgatcctggccttcgggtagtagaacctttggtcactccttgattttgaagtagattgcagagcatcatatgttggtcaagaattttgaatgttcttccctcatacaaacgtccagttcttattaagtttctttctatgtttttttcccagaaatacaagaagaatcagcacaagtttgagtagatctttagctcaaaccataggggtcagaacgttgacaaggaggtttggtgccaattccttctttgatgcctcccatccctagtgtacatcagtataatggttgacatgttgagtgtatttccatggcatcccaaattatagtgtcaaggatggtatcaccttctctacatttataagaaggaagattaacgcaaatgtgcttggtctgatgcagtgcaacaaccatacggactttgctcattgatccccgaattgataatggagtgtactttgtttggtgattttattttgatcggcttgatgcggaggttcctgcaggacagagctatctgtcattagctcatcacaccaatatgaaactcatgattagaacttagaaggtatatagctcaatggaactgtgcagccaaattaacttagttgaaggatagcatctagcatagtgagaagcgcttgtgcaggaccctctatctgtgcatcaagctttttttcttcttgacataaattttgttaccatgtgcttacttatta

SEQ ID NO: 15893 - DNA, 1761 bp, Oryza sativa
tttagtgaccaaaagcaataaatatatatttgtgttttttaacttcatgagagcatggaagttgtttttcccttgttttgttttctttacctttaagagtttttttttaaaaaaataaaaaacttttttggaagttcttcctttcgtagtaacacggtagaaaaagaaataacttatacaagaattttttttataatcgaagaaaacttctgaccactgaagcaatgctctttaattgttggtgagtggtgacatacacaatgcaaacgatcgaaagacaaccttgccacaccacggctcactgaaaattagcccatcgtctggccgttaaataccttttgacaaaacaagacaaaaaaaattgaaggatgcgagcacaagttgtgctaaatgcttgaatgtaacatgagatcaagtgctgtcactaagtgaccagaacagcttggcctgccacacgtctgaactttcccggagtaagaatcagtcttgaactgaccatgacaaatatgttacccagctttgttggaaggttttgctctgtagcactttctgatgcttcctatccccactatctctatctacatagtttcatcaaaacgaaaaaaataatgacaggttttcatcggcattgtcgatctatgagctcttctcttttctcccttaagccacctcccatggtctaagctgggtcactccctgtctcttttcgcgaatgcgtaaaaaaatggcccgttaatatattagaagaaaagagtttttgatacataacgcaatgactagaagaccattattgccaggggacaaggaaaaaactgagaaaggttaaaaaactatgaaagaaacttaaagctgcgactcctatatagcgggagaagggcggtggaggaaacccgctatgctctcaataggcctccaaaagaagcggcaccagccaaagaccagagatggccctcctgaacgatgaactctaaaaccaccgaaactggtaagagagaggagctgaaaatcctggagttctgctctttccacagctgtcaggaaaccaagagaactagagagtcaaaacccctacgaagatgctcacgcaggcaggtcctaccagacagccactagtcttggagagagtagccacgagaaggagcgagacctagccaataagagggggacatgatatgatgctagacctagcgtgcgaacacacagtagaggaggatatggttcatcgtttcaagctcctgggcgcaaaaaggacaaaccgagtggctgtcgatgccgcgctttttcagtagatcagttgtctaacaacgctgctggaacacaagccagagaaatagattgcacttgacagggcctttagcctgccatagcagatcggcgcaagtaaaggagtgctagcctaggaagaaagcccggtaagctgagctagctgagtagagctggtcgcctgtcgaatgccggacaagacggtcctctgtgcccgaagagagctggacggaacagtcactccatgtcagatcccttaggcttgagtgtgaggttctacttggctaggtccagaacgagttctaagtttcgttgaaggtgcaaagccctctcctcaatttgatgtcctgattctgctgacagatttcctagtgcttcctattcctactcttcctacaccgtgtgttcgtgctaatggactgtccatcagcatgcctctaaagaagtttcagatgtgttgctctcttcacttccttcgttcacctcgggtgagtctgt

SEQ ID NO: 15894 - DNA, 547 bp, Oryza sativa
caagaattcccggcacttaccagtggagttggggcagaggcgagcgagcagctcaaaccggatgtcccgctcgcagttcatggtgcgagtgtggatcttgaagatctgggtccggccctccaggtctggcaggccaaactcaactttcctgtccagacgccctggacgtagtaatgcagggtccaaggtatcgggcctgttggtggccatgaggaccttgatgtttcccctggcatcaaatccatcaagctgattaacaatctcaagcatagtgcgctggacctcattgtcaccaccaacaccatcgtcaaagcgagcaccaccgatggcatcgacttcatcaaagaagacaatgcaagccttcttcgatcgtgccatttggaagagttcccgaaccatgcgggccccctcaccaacatacttctgaactagctcacttcctatgactcgaataaagcaagcatccgtgcggttggccactgccctagcaagaagtgttttcccagttccaggagggccataacacagtactcccttaggaggatcg

SEQ ID NO: 15895 - DNA, 2252 bp, Oryza sativa
  unsure (1)..(2252): unsure at all n locations
ggcgaattcgagctcggtacccgacatgtggttccattcccacgacacctgcccgctctgccgcgcgcccgtggggcccgacgccggcggcgaggggctgccgcgcgtgccgcgggaggagccggctgccatggacttccccatgttccccaccaacgtcctcttctggggcaccgcccacgacgacgtcgccaacgccggtgaccgccacccgttccaccccccgccgccgccgncgtctttcatggccgcgccctccacgagctcctcggcgtccgcgcgcaggaaggagagcctcgtcatcgacatcccgtcgcgctctgccgccgccgccgaggcggacttcgtcacgtcgtcctccgcctcgacgccgctgtcggcgagcaggatggcggacgacatgaggtcgccggtgtcggcgcggctgcggtcgctgcgccgcctcctcagcaggggcaagcaggccgtggtcggaccgtccttcagcccgcgcggcggcggcgacatcgagcaggggctcgccggcgctccgccgaagacgcccaagacgccgccgccggcgaactgatccttctccccggagctccgagatgcattggctcgcctcgccgatcaccggagcgtacacatgtgttcattctttctttcctactattcttttctgatattttcttttacatttcaaaaaagaaaaaaaaagaagaaattttgatgagaaactctcatgtaaaaagaagatgacaacattactgtaagttgattcttggtgattgggggataaaattgatgaatttgttcaattgtccatgagattgttcaattgttcttactttcttacttatctttgcctagatgtgaaattgtctgaaaaggtttatgtgtttcagttaaacactgcttcttcttcttcttcttcagaagtcagcagtctgaattcctactgtcactgacaatctgatcccagaaacacgatattagaaatgaatgtatttggttaggagccgaaattcaaaagataattcctaaacaaacacatcagcaagagagaagaaaaagaaggctcaaaatggaattatgcctaacaaagtacatcaactgtacgttcggctagaatatgaagtgtgtaggagacaacctctgcgctttttaggcaaaagagttggtttctgctgatgaaaacttgttcatgtaggccccaatgaccccaactatacgatcattttcttttcagaaattttgatagctatattcagaaatatgcatcaagaaacgagagcacgaacaattgttcagtgcttaacatacatttgctgcaatgcagcggcctcactagttttcagtcgcttcaagtatcacctcatctaatcacagtttaagatatccagctgccttcatggataacacaaattccagcatccaaaatatgaaaaatatcaaacccttgacagtgcctgagagtttctttccgtgaagcgattattctgctcgtttcagcacaatggatttgccgatcaaacacgacacagtctcagtctcaccgtgtgtttgcacacaaaaaaaagtcgatgcgattcgatgcaaaaactttgacccttcctcactctgattaattttggcttacttttttccccctctttctgacacaagttgcacttgactatgctccattcgttttgtgcgtcactgcgtgtctctgaatttccaagcaaacgagctaagctagccgtcagtcaggtcagtcaacgacatgtgatcttatgtaacagtaacaatactacgtgtgcattttataaaattgttattaattagctttagctgcatgcggattaagtcgtggcgtccaatcgcctgcacgattaggatgtcagtacaggagaaaatgggggaagtttcttggatgcaagtaaagtactcggctggagtcagagacggttgaatgcgagaagaaacaggggaaggaggaatttctgagctaaggcaggacggacgttaggtcaggtgtcactttctttgccttgtggacatggctaatctttggtcatcaacgagcttcggttgctaatctcatcgacgtgagataccgtgagcgtgtgactgatcgaatcctttgtcacagagttattattagcaggaacagtgaatagtttaagtgtttctacgcagattgaccctgatcaattggcatgttggatatagcctggttgggtttgttgagataatttaatttacgtgcttgagattcagggatcgga

SEQ ID NO: 15896 - DNA, 562 bp, Oryza sativa
cttctctttgattatcacaactcgtacccttggtgcaaaactggtgttgacgaatcgcatccgctggtgaccaaggttcacaattggcaagaagttgaggaaaagcttctttcttgggtagtaccagagttctgacacttgattcggtaggagacgcaccatttgagagcagcagatgtctcggtagactttgatttctgaagaaacatgttcaacccattccagtatgtcagagttaaataggatctacaacatccctaggcaaagactggcagaatgaacgttgttgcagaatgaaggtctggaaggctccagttttagtatgtctcccatgtgattcaagacgaatttgcaatgttgacgactgaaaccgtcttcactcttcagttcttttaccctgctgtggggtgtatatattgacactgctataacctcaatgaatttggggaacgcttcatataaatttgacatgcgtgtgagcgtgttagatctttaactttctcgcctgtgatctctcattctgcgtttttaagtgtagatcggcaaaagttgaatccaggtc

SEQ ID NO: 15897 - DNA, 2069 bp, Oryza sativa
agtcatatcagccacaaataaaaattaatagcaattccccaaagcttcttcaaaatatagcttgtagtactaaggaaccatggtttgcatgcttactcaatttcttagctgggtgatattggtttaaagaccataacacttgaaggattgtgtactaggaaggatgcttgagagagaacacaaaatgtccatacaacaacatgctcaagtagacaagttaacataagatgaattgcttccctggtgtaaatgaaatcttgtagcctagtccacaaagcatgctaacttacaagaaatgactgaaatcaggaattcagacgcatcacataaggagtaatagtataaaaaagcatcctcagttaccaattgcaatgatatcccttacatagtgcagatttctgaactgtgcaagctcaaagtaaatctaacaacttagcctattagctggtaaattatatgccaatttaatacttctgacattgtttgccatcaaaagactgaggatggctagtccataagtaacctaatacgtagttaatattttgaacattgttcatcactcaaaagactgaagatggcctagcaatcccaattcaggtcaacctaattcactagaagacctgcaaagtaaagtgaccaattaacaaggaatcaagtcagtatcattacatcatgtatgatagataataatcaaattagaagaaaagaagagctgagcagtgggagaaaagacgaagctttgttagacagttttaaacgtactctgtatctatatatttttcattttaagattcttgtggtcgatttttaaaaactgatttggccataaattttactagcatatttcattaacagtaattccagaacaatacaccattgcatatatttatttaaattttataatcgtaataacacgtaattgctaaaacaaatataggcaaaagttatgcactcctgattgcatatctatcatcgcataaaactgcatatgtcacatcttccaagtgaaaactgcagaactcctgattgctaaaaaagggagtaattcacatcttcgaagtgaaaatggcaaagtcttatcaggctccaacagaagaccagtagtctagtagagctatcaatttgaacgatagattcaaattccaactacaacacatgccaaaaataacaagaacagcacacctgtgccccaatcacagatatttggagcctctacatcagtcgtcagtttcatagtaggaacttgctctgattatgtagacctgcaccattttgatacaagacaaaacattgtttgcactaatgtagatttctcctgggtaggccttataagaaccaacgtttcctgcacaatattttcctatatttagacacatacattacctggctaggctcaacaaattatagcaataacatgtgcaaacaatgaatgcttgaaaattgggataccatgagtcaatgacacattcattccagttatttatggtgaactggtgatgaactgtttttctgatttaagacatcaataaacctaacacatgattagtcggctactacaaatcaaccagaattatcatcaaccgtgcaaagattcaggagatcttcatataacattcgtgccgtgcccgaacaactccaaactcaccttgaacttcgtgcgctggataagttggaacaccaaacaatctccatcaactagcttatgagcaatggaaaaccccctccaccctccactgagccccctcttgttggcaagatagagggtgtcaaactcatcatcctcctcatccaccaaacggatagtctcgtcgcgcttcggcagatacttccggctgaaatgcgtcggcaggctctaccaatttcattcaccccaagaatcagctgcctcatccctacaacctacatgatgcaaagcaagatgagagtgaagttacaggcttaccagccagaaccctccagtgacatgggactgaagcatgggcttgacgaagattgggtagtcggagccgagctcctcttccagctcttgagcagcgttgatggcgtagtccctttgctcgtcggtcgcg

SEQ ID NO: 15898 - DNA, 3160 bp, Oryza sativa
ccagcggcgtcagcacgcgcaccttcctgggccggccgaggcggccctacgcccgcgccgtcgtcatggactcctacctcggcccgctcgtcgaccgggccggctgggtcgagtggcccggcgccgagcccggccgcgccgagacggtgtacttcggtgagtatgggaatggcgggccgggcgccgccatggacggccgcgtcggatgggccgggttccatgatatgggctacgacgaggcggcccagttctccgtcgacaacctcatctccggcgaccagtggctcgccgccacctccttcccctacgacgacgacgtctaaccgtacgagcattgtcaccgacgaaatccatgtccaatcaatgcattgtagtattgcactattactacacctgtattaatgaattattaccacgcgtaaatctcaacaatgcagccgttaattaattaccgtgtttcagagtaaatccgtggaactgtaaactgcaaaaatgcagaattaccctgttttgtttacgacacaaaaatcctaacaaatttcagtaataatggttgtaaattatattaaaggggttgccaaaaacatagcgacatatatttcatttatatttgagttaatttttttcctacgtaattgcgctctctaccctatattttgaggaaaactacggagtatgtataagtatggttctacctctcttatctcctcttccaagttgacaatacactacttggaatattatttctattatatattgtctatttgaaaaattacagtgtaatttaaagtgtaaaaactaattggttgttttttaatgaaaatgtggcgttataaatatctatcttatgctaattcttgctacagattctgaagcttaataatggttgttcttgaagctgactattgatgatgacacgacacgctgtaaaagaatgttaatgggtagtacactctgaatgtctcgaaggatgtcaacattcagataactctgagccaccaacttcagagtttttttttttagataataccaacttcagagttacattcagataactctgaggcaccaacttcagagttcagactcacatgggcacatgagtctcactaattaactgccagtgggagccaatctcttcatctctattggagtttttcttaatcaaactcaccagctgatgatgctagcaatgattgaaatgatcgtgcacaaaagtgttattcccagcagaatgagaaatagccaaacaggtcagaatatctgttctgaatcttgattgcttcacaaggacaaatttacaagttctccatgaaccaatttactgtttttaaaagcacagaattctaaatctgaaaaattagccaaactatatatatatatatatatatatatatatatatatatatatatatatatagagagagagagagagagagagagagagagagagggtacagaactacatcagaactgcctcttcagtgtacttgaattccataccttgaaaattattcttacacatgagcatttctatacaactactgccttgcactacatgatcattgatcagttcttctcagatctgcctcttctgatcattcttgatctgaagaacatcggcatcttcgaagacccggaacgtcgccagctcaatgaaatcagtgatctgaacctccataggcctgttcttcagaggaacagaagcaagcatgatcattagacaaccaaaaccaaatcccatcagacaacaaaatcctcatcaggcaacatatgctaatcttctttctcctttcagcatgtcaggaaaaattcagtaaattcagatgttggcaattaccatgggaagcaggccttctccggcagccgcattccgagccttggaccttcatcatacccttcacagaccatctctcccttgtcatctctgtagcacacaatccctctcaactggtcctcaaacacctgaaaattccgacaagaaaattcagaagcaaagttaatcaagacaagatcactcatatactctccttgcttggaggaaaacatatactatatgtatgtatactttcttgatcataattaccttcttgttagcagttgctgcagcgatggaaagctgtgatgagctggtgccgccatgggcaggagctctgaaccttagggctgccttcctggtgccaattaatcttgggatgctggccatggaggaaggatggagggagctcctggctgccattttggtttgtgctgagaaggtttggtgttcagctttctgcagagactaaatatagtgggggaaggagtagggtagggtgttataatcatggaggaacaaaaggttttattattgcaggttacatccggttcgtcccaatgacctgtcactgttttatatttaaaatgctgcttattgtaggccatgctttctattaagcttataaagtcatatttctgtgtatgccaaatttgaattttgacatttcattttagaattaatttacgggtttcttttttgttttcgtcgctctgcgtgactggctaagagtatatgggtaatactatattgccttgactagattgtattattttcggaacagctaagaattattttatcgtaggttagagccgatccatatggacaattgaattgccctgttactgttttatactcttttaaaagaaaatatggacaattgaaaagaacacaggaagcacttcaatcattcaattctaaaggagtatttaaagttctgcttgtcataatttcttttaatgtttacaaagtcatgcttctgtgtatgcataagtgcatgcttaagccgttgcgaaatttgaattttaaaacttcactttagattttttttttgagcgggcaggggcggttatactaccttcatccaaaataataataatgcaattctgactaatgcacctgaatattagctgcattgtctttggattataataatagttgtagccaacaaaatgccttccaaaccgatccttgtaaaagtaaaataaaaaattatcgcctgtagtttttcgtgttttgatcggtaaccgcaagcaatgcgcatctaatggtcttatggctgaatctctccccaataggttgggggaccccgggccatttcctcatataagtgataagtcgcaaatt

SEQ ID NO: 15899 - DNA, 3856 bp, Oryza sativa
ctgtcactcaccaaaggaactcatggcgaaggtcagaattaggcatctacatggcaaagccagcatacatggcaatttgattttaaggtattgatcagattagatttgatgcaacctgtttggaagtcaggccccttcgactttgaggtgcaaattaatcttttgcttgtctcctagcttagaatcgcctatggattgttgttgtttataacttagaggttggccaaacaattagttttgtcccctatgcatcgaacctcgagacatctcatcacttgttcatgaagagtagattagttaaagccatccgggcaggaataagcctgtgcttgactgaagtttcttcagcaagccctccttcggcctgttcagtattggaatggtggtgccacaagatttcatcagaaaagatgcaacgcaaagggctcaggaccctcttcttgctgtggtctgctggccactgccgggaatttggatggagcgaaacaatagaaacttcaagaaagagggatggtcaattcagcacattgtcgacaaattctttttttacgagatcaatcagtgaagcagctgcagagcaaaaaggctggtacagttctctcgaagagagagagccgttttttgtagtttgtatagcctctggcttcggttctattttgttcgctcctatcaaaatatgcacaaaataggcagtcatgcccatgtttacaagtaccgataatgttggttactatatttttttacagttacataggagatatattttataaattttggttgaataaaatgtttttggtagatatagtttccaaacattcaatgtactcctatgatatattttatgaaaaacgtgcattgcacgtgcacgattactagtatatatacttaagtgtgagaggaaatggttgagcagaatcacaattcacagaaggaaaaacagcctaactgaagggtgaaaagaggagacctcatacttgcacgatactgatgaaatcctcccatcatttttttcttgtgaaaccatgtagacatggtagggctaggaagcatcaggaaatacaacagagcaaaacctgccagcaaagcttggtacagtttcaatcctggtccgatgaagactgattcttcttccggtaaacatcatccatgtggctgattaagatgttctggtcacttagtgacagctctgtcttatcgcatgcaagcacttagcacagcatggatcaaagtatctgcaagctttgattttctctcgtttcatgaaaaggtattgacaactagccggtggctaaaattgataaggcttgtggtgagtttttctttcaactgtgcaattgcattgacaatgttatgaataatgaaaggcattaattcagtacacatctatgaaaaaatgttttatgggtataaacataaaaatatagaaaaacaataaaaatgcagaaagaaaaacaagtttccaaaagaaccacactgccccaatagctctttaaaaatggcaacagcacttgcccatgtcctcctccttgattaagccagcattcattggcaagattgcatcctaagtaccagcctatctgtcgattagaaaaagggttagcgcatgagacctaaaagtggatggacaaagatttaaataggttcagaccctctcgataagaggtaataccctacttctgtttggggattgtatccgccggatgtatattgatctgattatctgacagtgctatatccttggagggctccctgcccaccttatataggttggaggggagcaaggttacaaagaggaaaacctagccagacatggtattagtttcctaatctattacatggtagtactcaatcgggactctaggtcctgccatagaacataaggcaacattgcgaaaaagtcctactctattacattacagatggattcgatccacttcctatctctagttggatatttaggctgtgtgggtccccggtactcatattcttcgtaatagcccctgagaccttcacggtcaagttgcagtcttctccgtggttcatgaccaattctgagtatttcaatcttccctgtgaaggcttcccaagtgcttgatgtggaaggcctaggctgaatgacacatagatgcactttgaacgccctttagcttgcctcacgggccacctcatactgtaggtccagattgacttctaagtttcgttgaaggtgcacaaccctctcctccagttgatgtcctaattctgctgacagattttctagtgcttcctattcctattctttctacaccatgcgtccgtgctaatggactgtccatcaggcatgccaccaaagaagtttcagatgtgtatctcttgctctcttcacttccttcgttcatctcagatgagtctgttgctatataatgatcttgaagcatctgtctttcatgataaccatcaatatgctgcaaatctgcaacagggacaactattgtaacatgttgcagaagtccagtgtattttgatggtggtacgctattatggtgaactgctatattctggccccatttgatagggctccaaactaccacttcgttgggagctggctcctgtggaagttagagaccaactgaaaagtgtttggctagatttaagctctaggtctgaaattaaaaaaaaatggaaaaaaatgcaatccccaatctctcgtgaagccctaggcaggttgttcatccctgcaagcgccgctcgtccccgtcagagtgccgccatcggccccaccacatgtgcacctgcctatgggcgagctgagggttacggaagggagggagagagatgtgaggaggtgagtttggggtagttaaaaaaatatgtataaatatgttaaaaaaatatgtgtaaatatgttaaaaaaatgagtttgaggtgagtttggcttttttttaaatatgttaaaaaaattaaagggtggtgggtcttttaggttggagtggagctatggagcagaaaaaaaaacccagctccaccctttgttctctttgactgcccgatatacagcttgaatttctagagcattcataacacaaacaagatgatcattgaactactttggtgcaatttgaagtcaatgccaacttatttgatcaaactaacacatttataaacaaacacgtgtgttcatggaatcacatttgaacagtttgtttgatcgacaaaagcggcatttgagacatgtgcctagcctcaagtagatgtggcaaaactctcatttcactatatttcccaatgcctatgcttaggacttagaccatcctgaaaattttaagggcgattttagggtcgttgaggaatgaggatatattaagagctataacatttattagcgtaaaatttgctattaatatctctttagagtctgaagtaaggaaaaagactaaattttacataattgtaaaagaataaagttacatgaaaattttacggatattcatattaagctaaatgacaacagccaacaacgttccaagctgccactactacaataccctatttttccggtcggtcgtatttattatcccgtgcggtcactcggcccgcctgcagctcctcatatgggaaaatcggtattttcacgtgcgggcgggctgaccgcacgggataatcgattattccatgcggtcgacttaacgtaaccgcacgaaaaaatcgattatcccgtgcgatcgtattaagtcgaccgcacatgataataggttatcctgtgcggttcagttacaccacccgcacgggaaaaaagcaaaaaaaaaatgaaatcgaaacaatcccgtcgtcgtcgctgtggtaatcgagaccaaccctgtcagtgccatgtgtggaa

SEQ ID NO: 15900 - DNA, 615 bp, Oryza sativa
atcggtgatccgtttgggttcttgttttgggggtgacaggatcttgtctgtgtggattcgcgggtttcttggatcggaaagggggaatgctggtatcaatatgctagcccgcggagccgtgcggtcgctgttcgatcgtctccggccgccgccgcatcaccggaggaggaggagtagccccgccgcgattatgccggccgccgccgccgcccaccgtggctgcttctgcagcctcagccactcgaatctgtgcggggagggcagtgtgattcagaggaagggatttcttgatcttgggatgggtcggaggttcgcgccgggcagcgcattgggatccaagggatgcctgaattggcaggatcggggtagatccaagaggggggtggatggtggcgaggccgtgaggatcaaggcgcaggttctggcgccgcagcggcagctgctccatgacccggaggttctgccattggaggaggttgccacgaagagcttgaacgggaatggcgcgtgccggcgtgggaagccgctgggtttccccgagaacgctgcgccgacgaagatggtggttgctgttgatgtggatgaaggtattgggaaatcattgcaatttacaat

SEQ ID NO: 15901 - DNA, 933 bp, Oryza sativa
aaatggttacgaactatgtaagagcattgtaggaaagagtggttaaaatttacaagggctcgtaagccgtcgagacactgcgcaactcggaaaaaggaaaaatgagaaaacattccaggcacgcatgctgttggtgcgatcgcaggctaggaccaaggaggcgagaacacacagggaatgaacatctacgactcaaacaaagctgttctgtagattctgtaaagagaggatatggttctacagattttaccatcaccaaagtgaagagagtccacagaagaatcgagttacgcaaaccttgggaaaactatacaaaaattaccccccggtatcacacttttatagcctctttttattttatttgtcagagttgcatcaggggcaaggccatcaccgcaccaaaaacagaaaacataaccagcatcatccagaagggcactcgcttcttctgcttctgctcgcctgcggcctccgccgcaggtttcgccttattggctactactgcagcctgttgttggaccgcaggagatggagctggggcagggttctcttgagtttctggttccgctacggtttgctccatctgtttctgttggttgtatttctcgacgtactctggaaacattttcctgaagtgagggcaatttttgctgtggaaacaagagcaaagtttgttagtgtcccatggcttcaaacaaggatgggttgatggcagcatgtgaataaaaaaacttagataagtatcatcagcacaagtaataaatgtcacctatctaacataattcatttcgcttgggaagagcattcccactaaattgagctgtttcttttatggcaagtatgttactccctaacaatatatgcttgctgcttttatcattttctacaaacctacatagatgtatgatgaaattaatattatcttactgagca

SEQ ID NO: 15902 - DNA, 5290 bp, Oryza sativa
tgtttaaagtactgtagataataaagtaagtcacaaataaaataaataataatttcaaaattttttgaataagacaagtggtcaaacgttgcaagtaaaaacttaaaatcgcttgtattgtgaaagggagggagtaataatttgaaggggatttggttcctgtgcagtacctgaactgggttgagaggtgacaaagacttaggctgcgttcttcggttctaagttcccagtctcactttctctcactttctcgtttaccgtgcgcgtggtttgcaaaaattttctatagaaacttccccaaatatgaccataagctagcagcaacataccagattttactttatatgcacattagataaaaccgcatagataatactcatgtacatcaaaggaaacactactacctaattagcatccggatgcaatacaaaaaaaacaaaagaatacacatcaactgatgtgcaacaggcacacaatagctatagactatagagtagattgtgtcataagcctgaattagtcagataacttcctatgttttatgaccccctggattggatttcacttcattcacaaaacctgcagtgtccagcacatttctgcagccgttgagttattatgtcttctgcagttgttccccccatatttttccgatttcattttttttttcatttttcaggagggattgcagcagcagcagccatgcctttctggttggatatggccgaagcgagagcaatgggcatcaggcagagacccttgttctgaagatactgcatcgcgctgatgatgctcgtttccatcagcttcactacctcttgctcaaaggcagagctgtcttctgagtctggcatgtctggtggcccttgtgaaatggttgaagctgatagagatggattactatggcactgcagaagttcaatgagtagatggttatttcagacatagtgagatccaggtgaattgtggccccatcagttattacatatttaagtaaactcaatgaaaaccagaggagcaaatctcggatataaattgggactacaatgcacagaaagattcttccagtaggctacaatattatggtagaactgatctaggatgtcgaaaacttgaaactggatatgcatatgttgcactacatataaataatatattatttataatgtagccaattaagatgccaacccaagaaagcacaagttttggttagttatcttattaatttaatcagaacacacaaaaaaaagttaagcagtattgattattgaagcataatggcacaatgcataagcagttttgatcacagaaggttttgttcccctcgtacacaagtgcaaaggtatatcttcgtttgtcctatcttgatgccaatggtcgcaataatgggcaattcaaaactaatctcacagagcaaataaattaataaaggcaagccaatgttcatatgaaatcatggaatggtcatgaatatttggactgatgttatttgttatgtatctaaatgtaatttaaggggaaaaaactgaggttaaaataaattgacttgtttccatagctctacaatcttttaacatagcacagcctacattcaactagtctttctaacaaggattctgtttggaaacataaagaaataggaaagctgcacacctcggtttgagattccctaagaaggggaagaactgctccaggagctcctagcctgctcatgctcaatacctacagaattcaagaagactgtcagccatcagaaaaggagctaacgcccccacctcatcccacacaccaaataaacctgactgcagatgtaccttgacctgaagctgaagaaatttcacataatcaattatttcatcaagcattgatgccttatctgcctgctcatacaaagaagggttaattgtcaggagttctaaaccaaaatttgtatacattttattctatactagctaaatacacttgctttgctacggattaaaataaattatacatgtgctaatattgcttggaaaaattattgtgatgtttttgggacaatttattccctgtagatgtctttgcataataaatttgtattttagagatgaaataaaatagaatcatatgtagaaaactattttgtaaaacacatgaaggggtatttagtaaaagcataaacaatactctatataatagaggtggggtggcagattcactgccaccaccattgttttctttgaaaaggagtatagatagatgccaataaaaaaataattgcattgaaggcagaatatatgtatcagcaacattataaatcccatccacctgaaacaaagacaacggtacatctaacgcccatgtgttggctgcaccaaaagatcaatacttggatctgatctatttgataatccaaaaaaatgcttgcttctgtttgtcccatttggtcaatttcccaacatacttaagtatgtatcctcccctagtatactcttagttgttatcaatcaacagttatgaatatgacagcaataacaacagggggagaagcggattgcatttttgtggtgactcagaacaaaaaaagcaccttattggagtttgggacaaggacttggagatttttcatcctttctgaaattttctctcggcgaagctgcagcacaatgagaaattatatttaagaccatgggtgcacacaaattaaaaaaaataatcgattattatgcaacagtttgatttgtttcaaagtgaactgatcttataaaagaactcacccgttcagcaatactgtgaggatcagttgcctgtccacggcgagcccttgtacgtggcttcgcattggcactatttccaggagctgaatttgcttggggttccacatcagaagaatggttaatagggtactcactattatggtcatggatcaatggtggtatctgaacattttcatacacaaaattcaactgttgaggtataaaattgaagagaaagaaagtgaaacactgtcaatgagaaatgcaaatagaacctttgaaggaagtggtggcccttgtgcatcagtacctgccaaatgactaccagatgtgaatgtagggagaggtatattccggatattttgctcctgcaatatgaaaattgattcatcagtacagttagaattgagtggatagtgagctgcggatgtgggaattgctgtttagtggtaaagcttgaaattgaaacctgttgagcagccttcaaaccacccgctcctagtgcctgcaggacagtaccaaacgaagggatggaaccaccattgagaaactctttgctatcctggattgccaaaagagcaaaaaataattcaatgaagcagataatatggcaattatgtatatgtggtgaattggtgatcattacatgtagtgatgctatggcagcattatcaaacagcgagggattcccatttggaagacttgttttgttcaacatagcaacattttgtgccccttggaaaccgaaagcatctagatttactggttccatgaaggaggaaacgttttggaatgctgaacacaacgtcggggctgaagaaacggcatgcacatcagcaagaaaagcagaaatgtcactaccattgctatcaattgaactggacaaagcatgaggcagttctgcaagaccaggtgtatccaatttcgcatcaaatgttccagatgttgaattgcactgaagaacccctgggggaattgaattgcttcgcagattgctgctgttctgtagctgttgaagatccagaagattgttagggagctcacccttaggtagaatctggccagataatggatgagcctgggtgttgtatggcaagcatccatttgcaagcatagtggggttcctttcattctccgtgatctttaaactgcgatctgatccagctcccatgaaatagcctgaaggtggtaggcttccttcttctgcatatgattccgacgaaccgtcaacaaaattatagttctcagaacctgaattgccaggccacatgtaggaaccagcagagtagtccatgatagcacgctacaaaattgatgctccaaagtgttacagagaatggcctctagaaacagaaagtgttcacagctgataatcctgtaccaacagcagttcctttttgtacgaaataccctctgacgctgaaagtaactttgttaaccctgtgcacaatatttaaaagatattgtcaaatgagaagatggtatatatacaatactataatagctactacttataaagttggttatcttatagcacgcgttaaccacatcaataaacaagtattaaaatattagtaggacaattcttgcttgatgcatacagttgacaaaagatcctcagctaaaacacactcgtgtcatattcatgtcagtttaatacacaaattatttaaataagggattttgaatttttccatggtccgcatttattttccttaacaaactgcagagatgtcacaaacagctaaaccaagcatagttgaaattatatctaatatttgtgatgaactaactaaaagaacataaggacagcaaatatagcatggatggtagtgcattatgaaaacttagatacaagacaagggtcgactctgcaggatccccttatacacaaaacagaacgtacatgaacattgaaaccacagctgctgtcctaagccaccatttgtacaaatggaatgattctaattcgattgattgcagatcattaggacttattttctgttttgttctacagcggcaactcattttctttgggaaatggaagcaaccaattcatagttccatacaatcaatttgtaacaagcaaatattcttccacctttcagtagaagaaacctgacctcttaactttatcatgtaactattgtcgattataattacacacattcaatattcaataccatcctctctttaaagctaggctatgaatgtaataaaaccgacatgcatcctccaactgttcaaatgctagttcacattctgctgcataccatgcttgtagtcagtttggactgttcttgtctaggcagtaacaagaaaatgtatacttatctaaaaaaaagaaaatgtatagtactatgtatctatcagcactgcaaagatttgtcaaaattcctaaatctattatcgtaaaaaaaagaagtaacaggctatcaatgagcaataaaaccaaagggaaaggctgaaagcacacaattttcacagtttgagactgctgattgcaaaaactaaaaatggtgccagtggataaatcattacatgcaaaaaaaaaa

SEQ ID NO: 15903 - DNA, 2330 bp, Oryza sativa
gactaaatattgtgtgaattgaagcatgagtttttgagtaggtcaactaatcttccggggggtccggagccggttacagtactaacttacaagcaaagtctacgcaactttcccatgaaaaaaacgtttatcagtaaagtatgcttgtctcatcctcatcaatcatcattcaaacctttgataaaagtcaaacatctttaatttaattaagtttgtagaaaaaaataatagcattttcaaccaaagacaaatatattataaaaatatatacaattaaagttttattaaaataatttgatattataaatattatactatatttatctataaactcagtcaaatttgaaaagtcaaaatatcttataatctaaaacggagggagtaaagtatttaaatgatcatattcatgcatgtcctagccctctgcctaaccactgaacccttggtttcaaaaagactttatttctatctcttaaaaattgtcaaaaagagtttgtttatccttttttccctactctcaagtctcaatccacaaatcaaagaaattttatttctcaaatattccattcctagcatttttcaatactactttatcattaataagataagtagtggataactttgtgagacggcgagtagtaataacttttatagtactttatcatctaatagttacaaataaaatctttgtgagacggcgagtagtaataactttgttagttccgtatacctaagggatgaaaacaacgatggaaattcttgatcggccaagtatcatttccataggagtgataatattttttttgaccattttcgattctagctagtatacataggatttcacttctaatttctattattagggttgtcattagatagtatgataaatatgtaaagaaaaatcccgagcaaaccgagaaccgtttcgttagaagtgatataatttccgactaaatctaatctgcctctggcatgtgggcatcgattgctcatcacttcatcagtgtgctgctatctgcttagatgaaagctttgcttgggcttcgttttgattgtttgacatgccattttgaatgggcctttttgggcctccagtatgcacagttaaaaattgggtaatttcctttcatatgggccagccctgccatgcagcttatcacctaggaataagttcacgggaggtccctcaaattaacagcggtggcggcgtccggtcctgcggggcccagccgcctttctcccgacgggacggcgctgtccgtcgtcgtgcacgacgccgtggccgcctcgaggctccgcggcggtggcagggcgatccaagttgtcatctggactttcggaggcaccttcgaaacgtgaacacggcagcttagtcgcggatgacggtggcgtcgttggcacgagagcggcacggtccacggcgaggatctcctcctccgccatgctgcaaggcacctggctgacgaacagccgcaacctctcgccgtcgccatcctccgcttcttcggccatcaccgcgatctctctctcttccccgtcttttttcctttttatcctctcctcgttcttgcctacgccttttgcctttctatatcagacgagcagtaaccactgattgattgatcagtatcagtgtcttgagtacaaattaattaatcgatgtgtagtatcaagtcttgatctcgagtagcagtgagccagtgaatgtaatcgaatcatctgattgcgcgaaaagcagcagcagcattgatgcctccgcctcaccgtccagcgcgacgacaatgtcgtgctcggcgtcggactccaggaaccgcgctctcgtggaccagcacccacacccgacgaggagacactagtcttccgcgtccgtccctgactcctctgtcggcagcgcgggacgaggcggttccgcgccgccggcgaccatcgcgtcgacctggtgtgggacctcacccgcgcgcgcttccctggctcgggttcgcccgagctttcttttgggtgcagccgacgagccgccatcgcgccgtggtgctgccccgcagccgcaacagctgtgtggatggaacggcggcgctggcctcttctcctcctcttcctcctccggtgcgtatagatggacggactacgtcgacgtcgtgcgtgcatgcatgctgcaatcttggcgtctcagtttcgtgcatggatcttacgaaggtcggggaaggacggtgatgatggcgtgccacgacgtcgagatgccgttcctgcgggggattgacatgaaccggccagcgctagtggcggagacgacgacggcgagggggggggggcgcagctgcagcgaggaggac

SEQ ID NO: 15904 - DNA, 3214 bp, Oryza sativa
  unsure (1)..(3214): unsure at all n locations
cgccgtcgccgttcgtcgttgcgcgtgtcggaggagccggcacgagcaaggacgtggaaggggacttcggccgcgccctctccttcctcttccccggcccaaggccggagagatttctcccgcgccgtcggcctctcgtcacagcgcccctcctcacctcggtgatgcctccctccgttcttcctccttgctccatctcccccccttagtttttggtggtagcacgagtagcctccccgtagctagccggcgccgccccaaccgttgccgtcgcccgccgtgtgctcgccgccgtcgccgctcgagctccgtagcacccgctcgtcgccagcctcgctcggcgtagctccgcccaatccaacgctagcatcggattcccgtggccgcgtaggtgctctcaccgccgagaatcggcccctcgtgacctcgtcgctgtttccctcttccctccccgccggttgccgacgccgcgattcgccgccgtcaagcttcctccagcgaatccgagccgttggctcgtctcccctcgtctcgtgcaaccacccggtgtgctcgttttcgccggtatcgccgtggtccgctccgccgctcgccgctgttgtccgccgtccgttccggccggcgtcgtcgtctacctcccgccagcccacgtggcagccacgtagacgccacatcagcgccagctcagccgaggtcgggacgggccgaccccggtcagcccctccagtgcgcgcgttccaccgcgagccgtgaggctgcgcgtgggcccgccgcattcgttcctccgcagaccgcgcgcgtgcaccgngttccttccccgcccgcgcgcgtgcgccgcgtgctccctccgcacggtaagccgagccgctaacaagcgggtcccacccgggaccgcgcacggtgagcccggtccaccggcccactctctcctcccctcccgcgcgcgcgcttgggccgtcttgggccggccggcccatttagctcagccggactgccccatctctctcgggccgcgccctagccggccgaggaaaagtctaatttccatccctcttttattttcttttcttttcttttccaaaaaggatttaattaaatccttttcctttagaccaaaaatccaataatcttagaaattcaatatcttcccaaccataaatccgtttgactccgttcaacttccaaaattcctcaaatctcgagatctatctaatggcacgcttagaggcattaatagggctttattttcgccgtttgttgagttgccccgtttcgcgtgtagtttcggagcccgaagacccgcagtgcgaggatttcgaggatcaagctccagatctcgagcaaggcaagccacctttgaacatcttgagcctatatttgaaatttaattatgttgcttgcaaaatattatgcattgataggattgcacttaatctgttgtcccgtttgcaaggcagattggcggacctacctaacttgttgcatttgatccttccattgttaattgctataccatgtccccttgtaaccatccagttgcgcctcgatattcgtgcactctgtgcgagtatcgacggtcgccttcaaacttaaaatctaagtaacaacttgggtaaaactggagttttacaaaagacttggaaaacccgacacctgggtcggcgcttgcgaactaaatgaatttccaaaactgcggaccggggaacgtaccgggtgtacggtttttcccgctctcgcacttaaggaccgattccttgaaatttcatccaaacataagacaagtacgaccacatgggtggaatgggacacccctggctgagtaactagcttatcaggggagccttgatgtcgagagacatgtggattcgccggggtggtgtcggggaggacccctgggcttcctggcacagtatggtctgggacctaacctgttgttggtctgggacccctctcgtcggcatatggtaaacctgtatcggctttggaaatgccttgtcatgaaagcttggaggtctctcgacgtggctgatccccacgagctgggtgatccgggttagtaatgtcgtgtgggtaaagtgtaccccctctgcagaggttaacaaactgttcgaacagccgtgcccacggtcatgggcggatgtgaggtgattcctagcgtagtttgtttgactactgcttgtgaaattgctgttgtggaaaggggttcgatgtttgaaaaatctgcagctgatgggatcagctaggcccgggtggccgtttgaaagttataggcccgggtggccgtttgaaaagctgttggccgggtgccaaccttgttttaaattttaaagactgatacattgcacatactccgaccggacgagacgcactgtctcatccgtgtcgtttgagaagcactcacttagttgtttttagaaaagagttcaactaaaatcaattgcaaaaacaacagcctttccttgaagcctgcattaaacacttatttcccatggcttgctgagtactcccgtactcacccttgctctatataaataatcccccccccccagttgctgaagaagatgaagcggatcctgctgatgaggagttcttccaggagcaagccggctacgatgagttttagggtttcggcctagttcccaagtcgcgcctatgttgtttggtccaagtcctgcttccgtttcccttttgtaatgcagttgtgagctcgggatctgtccgcagcccaacatgactgtactcctactctataataaagagaccgctgttgctgtgatattctgtctccctgtgataccagcactgtttcctgggactggtatcgatcaacaggttaatttggagcgtcacgggctagttccggtcggtactagttcggggcgtgacacttattaagtgtaattgtaaaccatgtgttggtgcagctacccctgatttgtacaattatgggaacagatccaattaaagcgcaaccaaatcttcatcatacatagaagagtagagatacctcaagaatcaagatatataccaaaggaaccaccagcttgcattaggggaggaaaaaggtacatacttcagagagattcatcatatatacataccaacacacaatgatcgatttcaataattcgatgcacgggttgatctatctgcaacttatctgctgatggaagttgcatgatgagtaggaatgtgatgtgtcaggaaattcagg

SEQ ID NO: 15905 - DNA, 694 bp, Oryza sativa
cttaattcaaaagtttcttccatcacaaccaaaaaaatatgacatcacagtgagtaggaaatgctaaattttaaaggtttgtttgccaaacttgttgcaatggtcattcatttcttttagtttgaatattccaacttgcatggcaggaaaaatgcatcttgaaactaaacgtacacaacaaaaatggtagaatcttaccaaagctaattcgttcctagtatcatttagttcatggtccagtatggtatactcaagtgatcttctttgtttgtccagctgctggtacttcttcatttcttctttctcttcatcaagttctctcaacctttcctccaagtagtggacaacttgatcaatctgctttcttttgttggctgctaataaatcatgaatcaatgtccacttacaagaggtcccctacaaatatataaacatttatgataacttaaacatgcctgtttcctgcatgattttcaaactctgtcgccgtctatcttcataaacgcgcgtaccaccgatctctttcaggagttccagtcgttcagaatctttcattagggtaagggctgcaatctactcataacaattttcattacattatagctgaacagcacatggcaacaatcaggtgaaaaaatattacctttccctgctgggcaacgtaatatggatttgagcgagaaaatccagcatt

SEQ ID NO: 15906 - DNA, 1451 bp, Oryza sativa
atatgaggacaccaactatgaatttctgtagctttactgctgtgcccttgttttccaactatcaattatcagatacatcttttctctcagaagcaactcttccaactacttttgtgctctctctcctgttcatgaagtacgatcaattttacttacctgcagaatgtttggacaccatcgaaggtcatagcttgtcttggcaaagaaataaatgatgaaagttcctacctttattgggcgtataaggtaacacatgtttattaactacacctgaatatccttacaaagtgcaaaataatagcacaagaggggggccacaccatcaattctgtttataaagtccatgcatctctatccttagtacacaatgagatactaggtagtctgattcaaaatttttctttgttccttgaaaaaatatttgagttattttttgtctgtatttaatgttgtgtagctgtgaactcttcacaataatgccatgggaacatattttcctcctggaactagtgcaccgccatcctatatcttgatgttttgcttattgatgttgatataatgtacatgatatccaaattttaacctttatttgactttttagaatgagttatagacttatagttgagtggatttggtcaagacacttgttttttttctctctcatgatgttgcaatagaccatatactttaagcatctgtggagaatacgacacgtaaaccagcatcgatattcgatattcttgtgtgggttttaagttcttatgcccaagtgcaatgttatgatctgttaatcaaaagactgaaacgagatagtactgactttccaaaacttgatcagaacaatattcctgtatactgcccagcattgactgatggatcgcttggagacatgctattctgtcatgcagtccgcaatcctggcctaattattgacattgtacaaggcaagtttgtgtgcttggttttcttgcttttgcattcaattttttttctcatattatgctcgaaaatgtggcagatataagattgatgaatggggaagccattcatgcaaccccaaggaagacagggatcatagttcttggtggaggtctacccaagcatcatatatgcaacgccaatatgtttcgcaatggtgcagattatgcagtctatatcaacacagcccaagagtttgatggcagtgattctggagcacaacctgatgaagcagtttcatggggaaagattaaaggttcagccaaacccgtcaaggtatatttctgtaccttgagcaattttcacatgattatttttaatatttgatgtgcgcctagctagctaaaagtgccttttgttaaacatcatatgctgcatatatgaacatttttgtcagcttcgcttgaacaaggtatgccaaagagattgcatcaatgatcttggactagatcctaattctaatccatcttata

SEQ ID NO: 15907 - DNA, 1760 bp, Oryza sativa
tccctcctgccttgagccaccaaaatgtggggtccacctgttagcatcatcctttttcttcggcttgagagccagcaaccgtttcccacatcacgacctctccggtgggcctccccgcttccacactcgggtctccaggtgcgtggacacagtcttgtaaaatcaaaggtgtttttgattattattttgtgatgaacaattgggcattggagattattggttttgttatttggaatttattcacgaagtggttttgaagatgattggatttcacatgtgatcgcaggattcgtcattttatgtgatcggtcagaccgggctctggtagccggtcagaccgacgtgtaatgcgcggtcagaccggccgacactgtgtcggtttcaattttgggttgtttatttggatatccgaatttattttatgattatgacttctagatggatactatacgtatgtaatactattgtttgctgctgatgagtcaacttggagatagcttggtctcggaatatggtttctttgtttgttccatgtgtaggtgactcgatgtctcaggggagtatttgcggtgatggaccgggagtcggcttggggataagacgacgtccgtggtggtcagagatcatgcgagatacttaggctagagttgatgcacgtggttgatggagattttatatggcatacgatggagttattgtgtgcgtatgggatgcggagtcaaatttagaaggagtccaaatatggtacgattggttatgtaaagtttctttcttgtactagagggtttcctaaggtgtttaggactcctagtatgagtttggttcgtggctttaggctgcctacctcgggtataaatagagagggagcgtgaggcttcccggtatcgcttttgagagcaattgagttgagttttgagttagggtttcgagtttagtcgaaatttttgtaaggagtgctgttggtgcactttgtaaacacagaaagaatcaataaagtcgtcatcaactttaagagttctttgatttgtgtttccccgggtttcggcggtctaaccggcaactcaccgacggtcagaccggcggcattgcggcggtcagaccggcgggagcatggcggtcagaccggcggcggcgacaggcgcggcaggtgatctcggcggtcagaccggagattcatcaccggtcagaccggcggcatccactcggtcagacaggcagatcaatctcggtcagaccgacttccatcaatttcgagggtaacttttatttccgctaaaagttttcggtttttgggtataccaaccattcaccctccctctggttggcttagttcttatgattcgatcctacaagtctcctccacttgtccacctttagccccaccactctcccgcaaatcatacatcgtcaaagccgcatctcacttatgttgtacctatcgttggctcacctatcgcctctccccgccccaatccagtttctcgagggtataaatagcctcgccatactcctctatcttgttttccacatttcaaaagtttagtgcttttatgctaaagacggagttaaaagaccaaggtttatacctcagttgcgttttacttgtggagtgaaggtgaagttccagtaggatcgtcctttttcactgttgctttgttttttctttatgaggactaagtatttattctgtaagtatttacgtttgaatatgtatattaatttgtcattttgtgtatccgggtaccgagctcgaattcgcc

SEQ ID NO: 15908 - DNA, 859 bp, Oryza sativa
acccaaattagggttaaagccaacgtgactaccggcaaaattcccaccactaggtcctgcattcaaaccgaacccgttgttccatccatgtccattaccggcacttccaaaccaccttccaccttgaaaaaaatcctggcggccgccgcggccatcgaaccaacctcttccacgtccgcgaccccttccaccctgatgatttccgccgccaaaaccagggtgaaaccctcgagcagaaaattttccatagccccccacagcaggacgaccctgacggttgtttctctccatcggcagacgagcgacggcggcgtacgagaagggtagcgaccttacagattgatcattcaccctaactttgcgccgtatcgtaccagtttttgcgaagagagaaaccaagccagccgtgggcctgtatggtatgttgggctttggaaaagcaaggccctttggactgtttgtgatcgattcaaaatttgacatcaccggaagttttggaaaacattccaaactagtcaccgtcgggtgagaacccgagtcagaagacatcaccgaagacgaaacaactttttgaatcaaaacattcgccggacgagattggaatctcgccggagaagaagaagaaacagtggaaagaaaacccaatgataccttcccttgcagcgccaaagaaatagccgtacctaacgttcgagggggagacttccttggtaatgaaagcggcccgctccaaggcttcgaagcactctccagcgaagacacatgtggccacgtatcatcggcatgcaaggtctgcaaaacagaaaaacgggaaccagacgactcacaacatcatccagaagagaaacacctccagctg

SEQ ID NO: 15909 - DNA, 781 bp, Oryza sativa
gtggtccggcaacgccagcgcgagctcgcagaacttggcgggcttcaggttggcgtcggacgcgatctcggcgaggtagctgtcgaccagcttgccgacgtgcaccatggccacggcggacggccgcgacagcgtcgtggctcccggcgccggcgcctactcggtgatcgcagcggcccccaaggtcgacgcctggccctcgccgtggtcctcctcctcggcgaggaagtgcctgaccacgcgctggacgcagtccacgtcgtagagcgtctccgtggcgccggagtagctcgggatgagcacgtcctccagcgtggcgtgctccagctgcgtcgcggccttccgctcgagcgccgcgcacgccgcgtccgacgcgcgcaggatgtgcgccgtccgcagcagcgcgaacaggaacttggcggtgacgacgcgccccgagcacttgtcggcggggaggctggcgaccaccgcctccaggaggtccctctgctccacctccgacgacaccggcgccgacgcgagccgccgccgcatcgacctcgacaggccggggatggtgcccctggcgtacgacacgaggcagctctccctggcctccgtcctcacgtcggcgcgcgcggccatggccgccatcacccgcttgtacatgtgcagcccgaggacggcgaggtcgtctaaccaggagcgcgacgcggccgacgagcgcgcggcgatggcctccacgcagcggccgacaatgccgagctcctcggcgtgcggcagcagctcctcgcaggacttg

SEQ ID NO: 15910 - DNA, 1808 bp, Oryza sativa
ttttgccgatcgatacaacgacacgagagagacgagtgaaaagaaaacggtaatacacactctattccagaaaaaaaaaataacttttgaaaataattctagataaattcataaattatactaccagtattattaagggtaaattgagataaattagtaatttacttttataattagaagttactttgtcatttaagttttttcacagctaaatcgatcattgatagtctattacactagtatcgctcatatttcatcaaaaaaggcaaaaaaaaaagtttattcactgctaaatgatgattatacccttcgcatctattttttctaacaataatgcccctccatatttctactaccactaactagggttgtagtataaataaatctaaaccctttgattaaataagatgtttaaattaatttttattataacttgagagcacctcagtgaggctcataaataaatgtttgttcggattcatttttaaaagttagtttatttttaaaccaagggagtaagtcggtgtagctactgctgcctcttttccgttccctgcgtgcatgatgattaatttgtttgtttgttcggggtttggtgcagcgtcagtgtcatcctcagatatgacgatgtttttcaggctctctgatcttatgctagctgatcgaatgatgattgtattattaagggagtggttagttgtgcattggtaattatagccttgcacttatttgtgtcagtggcaggtgccggctggatataacaacggccatctaatcccttggctccggtcatgcacctgcaggtttggggtttggacagatcgatcggaatatcggatgcagggagggcataagcatgtgattccaggcttccagctacgatgctgtactgtactgttccgttttttctttcagaaaacaaaattttgctgtactgttctgcatgcagactgtcacaagatctgagctagagctggactgcttcagagttcgattttcctatttgtggtcctctggagagttggacggtccattagtgtatctagaatgggctgggctgtgaagtgatgattcaacagtagagatggccccttcttatgggccaaatttgatcgcccatttttcttttttgtcaaatctttttttttcttttgaaccgaactttgttgttaaatctgacagactgttcattagggaatcatgcattctccatcatgaagttacaagtagaagtgtgaagtatgtataaaaaggataaaccaaatcgaaacataactgagcataagttttgcattgaacatcacaataaactgggaatactacatatgaataagcacccgatgaacttttttggtgctaatcttcaaagagggtaattaacaatcctctaacgtcaacctataaaaacagtttgaaattatccccttttattggttcccaattaatcttgatttcaatcgatccttaagatgaataccaagtcgcggcttcaactagtacacatcagatatatgagcatgtatcaaaaattccccccggccactttctgaaagcaaacttacctatatacgctcttcatttctaccacttgccgttgcagcttcagatgttcatggccagaaatgatgttgatgctattcatttcatacttgtcttcatcacagtatatataggacgtgtaacaaacaaaacccagcaatttccttcaattcgctcaaaccgttagccatcagagaggttcatgacgttgatctgcccaattgtaaggtgaaaatttcttcttggaactgatcaaaatggtgcattgg

SEQ ID NO: 15911 - DNA, 2869 bp, Oryza sativa
agaactggaggtttgggtcggagtgcggcgccggaaacggcaggttcgacgggtgcgagcgcgggaggccgccgccggccccttcgccgtcgctatctctcatcagcttcgagctcttggccggcgtcccgttcgcggcgaggcggcggagatgagggggggaagaagagagaactgcgagaggtgtgggagagcgttgggtgtgtatgtgtggaggggaggggagtgtgaggcgacgagaaaatggcgggaagcgagaaaagtgttgagaccgttgcgaggttggggcggggaagaaacggtgggccccacttccctcggattgctccctttcgtcggtttaggaggctaaccaaacttagaaaatgctattttgcctgattaaaatgtttagtataagaaaataggagaaaggcatcaagaatagcctcagtttactgacagttcacatcattcagttatgacctgagatgagttctattggcttgattcacattcactagtggtttgctctttgttcatattgttgccatcagtttacagacaatttaaatcacttaatggtttgttagacattaatccaacttattaagtcttcagataatgttcatcaaaggattttcggtaattcagtcctttcaattcaaaacatggtagatatatggaggatttgcttgaaaatgctacacaaccatatgcttccttattctttattaggaactgaaagggaaattacacaacgaattcatcctccatgacacctccgggtgtaggtgtcatggcaattattgaaagtaaaatactaccggtaaagaccaccgtaaaactactcttgtccacgctggcgcctccgtggagcagcctcatctgatgagatggagatcagatggagatgctgttggggatgcccctggcggagaggccggcagcgtcgcccttgaggtcggaggtgtttgggtagagcagcgtgtaggggaaattggtcggcccgacacggttcttgcggtgggggtccttgttcatggcgacgacgcggctctcgatctccgtcagccgcgcgccgaaccgcttgaacgcctccagcgccttggcgtccgacgtccactccggcgtgtcgcgctgtccgaggtacacctcgtcggaggagtgcttggacaggatctccagcagcgagatccccacgatggcctgcatctgcttggtgattgtccggacgaacaccttctccggatcgcgcgccagctcgtcgtactccttcgttcccggctccggcatcggccgccggctcaccgacggacggttcgggaggtacccggcgtacgggtactgcccgaagttgacggcggcgtgcagcgcggacccgatccagatgatggtggcgcacgccttgaccagctccgccaccgtcttcatctccggccaccacgtcgcgtccttgatgtcgccatgcccgacctcgcggacctccttccaccacgcctgcagctcggcgtcgccctggagcacgccgtcgttggggtagtagatggcgaggtactcggtggcccactgctcgatggcgtgccagacggccagcccgtcgttggcgtacgggtagtcctcgatgagcagccgcaccttgtacgggctcgccgggtccggcaccgcgacgccgcgcttgacaaggtcgtcggggagcgcctggtcggcgaagctccagtccttgtagaacgccgacgacatggcgagcgcgtgcttccgcgggaacacggtcatctcgaagatgccgccgccgttgatgagcgtctgccgcgccagcgcgttgatggtcatggtgtcgcggtagtgcggcagcagcagcttgtgcaccgggtgcgccacgctgagctgccggttggtggcgatgacgaagggctccatcacggcgtgcgtgttgagccagtggctgatcagctggtgccagcagtagtcgttcacgttgacgtacgccttggcgagctgccacacccaccactccacggcgccggcgccggtgccgccgcgcgccgccggcgtgtacacggtgctcctggcggtgatcagcccgtcgtcctgcaggtgcggcaagctcagctcgatggcgagcggcgccagcgtgccgtcgccgcgcaggaacagcagcgtccgcgtggcgtagatgaagttgtcgtcgaggctattgatatccaacaagtagggcatgaaatgatcgtggtggtccaccacgtagagaaggttgccgtcgatcgcctgctgcacggtgagcccctcgagcccgcgctcgacgtgcgccgccgtgatggtgctcgtctggtcgccgtacctggccgggtcgaggcggctccgcggcgggaactcggtgaggcgggcgatgaccatggggttgacgccggcgaggatctcgcgggcgaactcgtcgtcggtcatccacgccttcttgtcctcccggatgacgtgcggcatggggagcttgaggaggtagtcgccgccggcggggatgaggtccttgacgagctggagagggaagcgcttgcggagctcctccagcgccgggatgctgggcagcttgaggccgccctcgtagagcttgaggatgtccttgaaggagtcgaactcgccgggtgtgaggtcgacgtaggtgcggatcgccggcacgatgccgtcgacgagcgccttgatggagtagcccaggaagtcggccatcttcaggtgcccgaaccgctcgtcgcgtggcacgtagatgttctccagcaatgacagcctgctctccgcggtggggtctacaaagttacatgtcccacatgtcagcgaatgattttttagtattcaacaatatagtagtgcgatattttctaatataaaatttagtaca

SEQ ID NO: 15912 - DNA, 4606 bp, Oryza sativa
gacggcgtgtaccgcgccgtggacatctacctcaaggcgcacccgcggctggcggcggaggagagggacagggtgtgcggcgtggtggactgcagaaagctgacggtggaggcgtgcacgcacgcggcgcaaaacgagcgcctcccgctgcgcgcggggctgcaggtgctcttcttcgagcagctgcagcttcgccgcgccatcaccggcacgctgctgtcatccgccggcgccggggccacgcagacgcggctccacctccaccgctaccagcagccacggccggcggcgatggcggcccggcactccgccgacgccggcggcggccgcggcgaggcggcgtggcggtcgacggcgacgcaggacagccaggtgctgcggctggacatggacagcatgaggaaccgggtgcaggacctggagcgggagtgctccagcatgaggagggccatcaagaagatcgatggccgcagcgccgcggcgtcgccgcgccacagcgacgccggagacgacgacgccgcgtcggccgacgggtcgtcgaggccggcgaactggcggtcgcggtacggatgcaagttcagcacgcaggtgtgcgactcgcacgcgcgcaacgtcgtggcgtcgagagcgtcacggatgggaatgagcccataggcgaatcgtctgaattctgaacaaaaaatcgatgctcgagatgaaaatgatttgagaaatcatccaacgtttccaatcgaagatccagccagaaatcgccccatctgtatgatttcgcacgcttacgttgcatcgctcgtgtgcacgaacgccactgccattcgacacggaacataagggatccgtgtgtgttgtgtgtatgtacgaaatgccattttgtagcctgtcatctgttacgtttcatgtgtgcttgtcgacttgctgtttggacaaaagcagtcgcgtagatttgagttgtcagggtgtacaatacacgtgcaggtgttgccggcctcagaaagcacaagctacaaagttggatttacccttcgatccgtacatgaaatggatcttgtgccgtaaatagatccagtagaaatgtacagattgttgataacttgatatcgtcgtttttttttcctctggtgttctgaagatgaaggaacaaatgactctccaccctgagaagcatgcaaactgagagctgagcaaaatgggttggagcatggtccatggatggaattgcttcattaacatgccttctgtgttagctgtgtcactctgcatggtggcattatctctaccattcgattggactaactaaattgtaaactgaatcttttggtcatcgtaaagcctgaaatgtagcagaaagtaggcactctcgatctactttgcctgcacagtccacttctctacaatattcttgtactacaagtatttggtatagtgctatacttataacttatctggcatttctggcttattttgcaccgccactgatcgtgctccaaatgcatctgccgggttggcagatgtcccaactcccaaacacactccagcaacttttattttcctctcgagtgcccaaacctttgtgactgccttttcagtgctctgccgcaatctacttttgttgaaatgcactcttcagatataaaaacatgtaaacaatagtctgttggtgctatgtggcataatatatcacgacagatgggagacataccggtaaacaacgatgctttacccaacactcatgagccctaaacagataatgttagaatacagattgactttaaacggcatcatggattcatggctgtctgcgtttgttgtcggagaagcagcagaagaagttcagcgcatgattttgttcgttatgtggcttcaaaattcgaatccatggcctgctcccggactgttggcaatgccaagcccatgggccatggctattgggctaagaagctagcttagaacttttcttttcacttgcttcggtccatcccttgtgaggcaaaaagtaatggcttgtgtagttcaattcctgttggaatcgagagagaaaatttccacattccaaaggaggcttcagttgtgtaattcaacgaagtaggggatgtgctcctgcatattccagttatcctgtatattctgaactccaaatacggggtacttggagttccctccaggccactaataatacttcctccgtttcacaatgtaagactttttaacactacccatatttatatgaatattaatgaatctagacacatatgaatatttagatttattcacatctttattcacatctttatgaatatggataattcttaaaagtcttacattgtaaaacagagggagtacgagggcgaagacgaagctgtacgtgctgctgtttcagtttgtgtgtgcaactatgcatttttttttgtctgacgaaaccaacggcagcaggaggagttcagaactttgatgacctgacctactccctccattctacaataaacctcgtactagaatgttagaatgtgacacacgctaatagagtactctctctatttcacaatataagtcattttagcatttcttacatttatattgactagcaaaagtgcccgtgcgttgcaccgggtgattacggagtgtgtacactgacaaaaagtgttgtttggtttagacaactaatctgctaaaaaaattgtttgtttttggataaactagctgggtggcccacgcaattgcgcggctagcaccgatacagaattatctatttttaatatgattttatttataatttattcaatagatatttcattgtcttaagacattgaaagaccaaatcatatcatcccccatatttctaattttgtaacttttataaaaatcacatcagtgctaccccttacttttttgtcatcctttctttatttgtttgctcgatctaccatggcttatattcattctccttttaaaattggatattttagttttttgagtttattgtcttattgggttttatttttttatttttagaagtcccattaaaagctgccaatatacttctctacggcccatccgctgcttcctctctttattgtcattgggattttaaggggatcctccatagtcgacctgcaggcatgcaatttttactttctagagtcccaccaaaccgtctgtactcctctacggctcgcccgcttattcccactctttattatatttgagattttaaaattgaatgtgattatcattgaggtttgtttttttttacttttttagaaatcccgccaccgtcgtgaccgtgctgcttaacggcatgtccgtcgtcactccttttaattgtcattaggattctatttggggttttgttaatagtttttagatgttccatcagctgtcaccactctactcctttacagcccggttacttcttcgatatttattgtcatttatcattgttgtgttctagatgattttttttgaaatttccatatttttcatcccgatagattttatttataaattatattcctagttgtttttattctattttcagaatttattttattaattatttggaattttaattaatctcgttatgtgttccagatggtgtattctttaaatagtctttattttttattatgaattttagttatttttaaattgcattccaagttgaactcttcttttatttccttatttctaatttcagattttattttatttttttattttaaattttaattaatctcgtattgggttcttatatatggacttgtatgaaatgagggcactatattatttttctgctgctgcagcctaagcgtgctggcctggtatctccaccctatatatgtgcggcaatgtatgttggtttagaatcataactctctatactgtacaattctgcaattgatttttctaaacggacatggactcctagtgcggattgtatgatctataattagattgatatgattatcttttgtacagtaaatctagaccattattcttttagtaatttcaaatttgtattcctactcgaactctcttttttcttttttttctaatttcagcaatttatttatttattattctgaattttaattaatcacgtattgggttcttatatggactcctctttcaatattgcttatttttaattccgaatttcagttatttttcagattgtatttctatttggactctttttttctttttctccgattaatgcgggaatttctagcctccacagtgaacgtggtgccttcttttcgagctgtcttaataatataaaagataatctgctatatatttgcggaatatatatgatgtttagtttggatgatttgtagcatgagagaaaatggatggacgaacaatgcgactgtctttgcctaaaaggcgacggatggaaatttgtatgatgaacggaacggagtgtggacagtaaccaaaaagtatattagataatcaggatttagtttttcatgatatgagcccttcaaaaaaaatatatttttagaaattaaaagttgtaaatcaaaaaagaaaaaaaatgcccattagccctgacttttctggctcaagtgagcgaaccatgagtccatgatggcaaccactc

SEQ ID NO: 15913 - DNA, 1405 bp, Oryza sativa
cgatggcactgctcgtgatgtcgtgcgtggcgcgcctcgacgacaaggacatgggggctggaggcggcgtggaggaggcgtgggtggcgagcaggtggcggccgtcgcgcaccgatgaggtcaggcacctcatggtgcacgagagcatgcatgacgtggtcggaaatctctcggtttttcttcttctctcctcagcagacggcttgacgccctccatctccatccctccccatatggcggtgtcactccccgtggcccccttcccccgagctggcgacaccctttccccgagccggcggctcagccgtggtgcctacactctccctctccctctacttgcgaccctgcgccaaggctgcctagtgagcagcggtccgcgacgggtcggggagcagtagtccgtgagctaatcctctacgtcggcggctcttcttccacgagcagcggcgattcttcgcccctcgcctcctccctcgccatggggccgcgggaggactcgaccctagcgggcggtgtcaggcggcggcgccctcccttccggcgggagttgtggctgcggacaggggtgatacccttccctccaccggatccagcgggaagggaggtggtagcggcccgccggcgtcccaacggcggcgacggtgccatcccctcagccggatccagtgggaccggagccgttggcggttcggtggtaccctccccttcgatctagctgcatgggaattttcggataaaaattgtgtgtatatgcttcagttttccctgcctccgattctatttgtgatgaacttccgactgggattttttttttgagcggggattatgtgatggaattccgactgggattttttttgttgccgggggggggggggcggaaaattagcgacggacaaggtgacaatcggaaagttatgaatttttaattagttaagatcggtgtcggttttaaataaccgacaccattaattaattataggacacctgtaatacattataggtaccgttttcttgaaaaaccgagccgaatcttatccatccatccacagcggtgatataaggctggtttctaaaaaaaccaagccgagccggcagggcgcaccgaggagataaggccgagaaggtactggatttttctcgctctcattttactctatctctctctctcctctgtcgctctcctctctctaaaagctgagtcgccggtcggcgggtggatccggtgcagcccattggcggcgatggcggcaccctcccctccgtgtcattggcgtgtggcaggaggagcgtcacccgcctagagacgccctccctctgctagatccggtggtaggaagggtggcgtcagccttacagtgcctccgcggcctcggggcagcagtgcccaaggttgataagtctctct

SEQ ID NO: 15914 - DNA, 1112 bp, Oryza sativa
tttacttgtggggcataataacaattaataagatagtacacaagttattttttaactgtgtcttgaaaaatggcaagcatataaagcacgtttttcaacgccctcaacaggatatgagtgggtgagaatatatagtatgtacagtaaaaaggtactgttaaggacttttgatcaattgaaaaataactcattttcggatagccaacatttgtcacacgatggcattgctcaagtctttaatacatattgatataaactcctgacagatataagacatgcgcatgaaaacaagcaaaatggatggttagataaaagtttcactaaattgttacagttgttgataaatattctttcagtgggtaatatataaattgccggaaacaacataccaaacgaagaagattatatgtccctttggtcttgaaatacataaaattcatacttatcagaatgattgcatactttacttgggtgagtatacagatttggatcaatgttcagtgtgcaaggcatctcagtataagtgtgaagatgatgatggtggaactaaaaaaaatgtaccaagtgaagaagattatatgcccccttggtcttcaaatacagaaaattcacacttatcgaaatgattccatattgtatcgggtgagtatgcatatttggatcaatgtgatggtggaactaatggtacagtgaaagaagaaaaaaatgcctcagaaggtggtgtgatattttcaattgtctctcgtttggaacgtttgtttgcaaacaagaaacatgctcaactaatatgttggcaccacaaagggcgtaaaagggatggaatggaataataagacacccaactgagggatcttaatggagaaagatagataggaagtatataaaacatttgtgtatgacaagaggaatgtccggattgtactcaacacagagagcatgaatccatttggtgacatgagacgtcgccataacgcatagccagatattgttattatctacaacattcctctttgacactgtttgaactgcaaatacatcattaattcatgatgccatttctaatttaagggcctaaataacttgagaacaatattaatgtgtacttcgagcca

SEQ ID NO: 15915 - DNA, 3222 bp, Oryza sativa
agctcctgttgcgagagaaaaaatagaaccaagagatcttcaaaacgacgcctccaaaaaaaacgacgccaagaacaccaccactacctgtcccggagagcaaggacatgattttcacttgaaaaaagtaactggagagacaagaatatgtaacaacgctccaagaggaaagcggcacccacatgcgttattgttgctaccccgaagatagagcattcgcccataattatttcatcattcccaagaaataagctcctgcacactccgctgccaccaccgtcgaaagccttcgacgcacagccaccgcatcggcgccacgttgccggccgaccgtcataaaggagctcgacccctgacacgctccagctccatccacgtagttgggttggatgaggagagggtgagagagaagaatggatctcctctctcccacactagcccgttcgacgtggtcatcttttgtcggcaaaaggcgccgttgccagaggacaaatatctagactggggcccgtcgtagaatcgcagctccccctgatggtgtacccgccgactccgccatgatctagttgcccgcgtcacctcggggcaccataccgcgtctatgctgatgacaccatccgtcacagcgcttccgatgtcatgttaggccggaattaatctctatctcgaactccgtttcgattccttcttctctaaatttggtcattaacatttctttgacgtggaattggtactggcagtactacttttcatgttgaaaacatcgtagtgttgtatcagttgtaggtgtagttaaccgatgattatccaaacggtaatggaaattcccaaccgattgagcatagttttttttttaaaaaaaaagtggtgccgttttcaactgttttttttattctggccatgtgtaaaatttgttgcaaatatcacagtgatgtactagttgttcgttgttgtggttatgtgattattgcagtgacgccctgttccacgacaattagttattactggatgaaattgtatataatttttttgagataataatgaatgcaatctgtaaaatggcaaagaaatcggaaactttacaagcaaaggtgtactgaatatatgatatatgggagttacagattatactgcaggttatcaatctcgaccaaatgataccaatgtgcagctgaaggggacagaagaaacgatcaatcgaggagaccgtagagtagagtcgctgtatcgaaagaaaaagttgagtttgatctccagccccgcacgcgaacggaaaaaggagcagaaaaccccaaactgagatgacgaaagatctccccgccgctgcgtcgtccgtccgtccgtccatctgaacgtagctcacattgttgcgttagttccagctggttcacagccgctctcctccgttcaaacagctgttttttacaaaagttttatatacgaaagttatttaaatattatgtcatttttctaaaaaataatatacacttaattaatcacatgtgaatggatcatttcgtttttcccaatccaatccagggaaacgaacgcagctgctgggatcggaatgaacgcagccgctcggaatgatcggccgcacgcgtgggcgtgtgtgacttgacgaggatgtgtagtgtagcgtcgcaggtaacaggaggcggacgtgtgcggctcccggccggcttacgccgaggccggcacggcggcgcacgtgaggcaaacaccggccgctcgttgaaggcggtgcgtgctctatgacgtcgccgtctccgcgtgtgcctctgaagttctcaactctggcacgtgtacggtgcaccctgcgtcgatcacatggtccattggctccagccgacgatttccatcagaaaactgtttgtgttctacaacgtggtaacagatcagaaccgtaggagcacgtagaatttttctttttttagaaaaatacgagtgatattacagtttttaggaggtatcgaaagttgctatattttcgaatgtaaaatttgtataaaaaaaaggtgtagctatatttatggcgccatatttttcacctaaaaatagtcggcgtgtatttacattgtaagtctctaaattacatatgtaaatttagtgtatttataatgtaagttttaaaattacatatgtaagtctcaaaattacatagtaattatatgtgtaagtgggatgtaagcggggtataaattgtgttaaagaaaaggatgcatacatgtagcatgaaattaggtgacgtttcacttggatttgcatgactttagagattagctagcaatagcatatgctttcaggtctcttcgcgaggaaaaagtcagtatggaagcacggatcttaaacacagatccaacggccagataaccgactgtaatcaacgaaaaaaatctgtcgacataattatagcaaatccgaaaaaaatggtacgtcttagtatctctcgcgaactgtaaaatttctttaaaaatattccttttcaccggtttcataggaatacgcatgtttcaaagaaattgtcacagatatatcgttatcgtatagcgagaataagaactcacgacgagttcgcacagtgagtacacaaactcgcgatgtttgcgaggaatagcgggaacgatccgcgccaccacgaactcgagagcgagatcgctgagcgaactcgtgagtactcgtgcatgctagtctcttctggtttgctgctaccacaagttcacatttttagaccattcacggtgcgccacaagaatttagtgtgcgtcacatgccacctagacctaagaacacccaagaactagatggatacatactccacggtgcgtactacttgcatactactttataaagggtcccacagtgtttcccatctcctctgtccttcttatctcttctttctcccctctttgctcttatctcttttctctcacctctctacgtctcccacagacggtgaggaatggtggcgatggggtggctggtggtgccggagacgggttgagcggaggccacggcgccgggcaacggggcgacctaaacggccgccgccgccctgctcgagtggtggcgacggctccgagccccggggcggcctgagcggagggcggcgacgactgtgccgggaggcggcgccagagacgggtcgagctcgccggctctgaaccggcgtcgacatcaagctcctatgcctctctcttctccagccggccgtgtaacatc

SEQ ID NO: 15916 - DNA, 4459 bp, Oryza sativa
tattacaaaagtaacatccaaacaccgagtgtagtttaaatgaattaaacacacccaataaaataaaagatcaactaagataaggagagcatatttattcaagtttatttggaatctctatccatagtttgcaaggaattgcatgaccgttgtctcaagcctacaacatgcaaccttcaataagctcgcgatcatcttcacacatttgcaactgtgcctaaaatcggagccaatatgttgccctggaaattacctgcatatatgagatagatgttgatttgtcaaaaaccatatcattcctagtcaaccacagagcccaatatatggcagaagctcctacaagtatgagtttgctcttcttcttgtctacccccaagagccaaccatcaaatatattagatatggtagtatgaagttataaaccaagagagaactgtactgctctccaaacaaattttgcataatgacactctataaaaagatgttgaatagtctcatttttcattaaaaaacatcatcttaaactgccattccaatttcgtcttgccaaattatccttggttagcacaacccctttaagcaagtaccacataaaaatcttaatcttaagtggcatcttaagcttccaaataatcttgtttctctcaatataaccattattaattaaagttagatacatcgacctaacagaaaatattccattctgatgataattccatctaaagctatcagaggattgattcaattgaatatgtacaatagaagcacacaattcatgccaatttgcaagattctgaccaactaatgatctcctaaagaaaacattgagtggaacagatctcataacattagcaatagtagaacttttccttcggacaatagagtataaagatggatatttgtctttaaaagccaggtttcctagccatttatcttcccagaaccttatttgtttcccattatttacaatccaagaatccatatctaagaaaatatctttgaccttcatgagacctgaccaaaaatgagaatcaccctgtttcttattaacttgggttataaactgattgtagagatactctcttcaatagattttaccatacaccttcctcgttaatcaacttaaacaaccacttactcaagagacacttgttttgtatttccaagttatgaacccctaaacctccctgatccttaggttgacaaatgatatcccatctagtaagtctatacttttttttatggttatccccttgccaaaagaatagtgatctataataatcaattttttgaagaacccctttcagtatctaaaaaaagatatcataaacatagttaaacttgaaagtacagagttaatcaaaaccagtctacccccaacagataaatgttttcctttccaactaagttttttctcaattcttttctcaatcattttccaatctctattattcagttttctaacatgcattggtataccaagatatttaacagggagagagccaaacttacaaccaaagatgttagaatactcatcataatattcctttgcctgaccaaaacaaaataattcactcttatgaaaatttgttttcaagccagacaactcttcaaacacagataaaatcaatttaagattcttcgcttgttgtaagtcatgttccaaaaaaatgatggtatcatctgcatactgtaaaatagataaaccatcatccactaggtgagggactaccccattcaatgaaccaacatctttatccctcttaattaataaggtaagcatatctgttactatattaaaaagaattggagataaaggatctccttgccttagacctttgtaagtttgaaaattattaccggtctgatcatttactctaataccaacatgtcccccttgaataaaagaagttatccactcacaccatttaggagagaaacctttcattctgagcatctgttgtacaaaagaccatttaaccttgtcataggctttttcaaaatcgatcttaaaaatcacagcacttttatttttgcgatgtaattcatgcatagtttcatgcaaaataacaacacattccataatatttctcccaggtataaaagcagtttgagtagggctaatcaccttttgagcaacactcattattctattcgtagcaactttggtaaagatcttaaaactaacattaagtaagcagataggcctatattgttgaattctcatggcctcagcacacttaggcaaaagaataatagtaccaaagttaagggagaataaaggcaaaagtaccattatgaaaatctctgaaaagatccaacatatcatccttaatgacatcccaaaagacctgataaaactcagcaggaaatccatcaggacccggagctttattatgttctatttggaaaatagcctctttaatttccttttcagtgaattattgtattaaagcttcattctctaattgagatacttgtgggatgtccacaaaattattttcatcaaactggagatcagaatcatcaggaggaccaaagaggcctttataataagtagtaatatgcgattttagatttgcatcaccatttatcaattgatccccatcttgaagttgaaaaattctggtttttctatgtttgccgttagcaaccaaatgaaaatactttgtatttgaatcaccctccaaaatatccttagttttagccctttgataccacttaatttcttcttctctcataagagtagataatctattcctacaaaaccatctaaaatcaatttcctcctgagttagaagaacagattcagcttttttatccaacaaatccaacctatccaaaatttccttttttttcttttttatacataccacttgtatgtttagcccatcctctcaaatgctgtcttaatcggggaatcttcgcctgccatcgctccataggagtattaccctcatgtacactagaccagacctccttttccatatctacaaagccatcatgtaataaccaaccaagttcaaatttaaaactatgttgtgcattacctgaagaggtggagtttgtatttaaaagaagtggagtatgatccaaaatatctctattaagagcaacccccgaggataaaggaaatttatgttcccactaaatggacatcaaaatcctatcaagtttctcataagttggatttgctaagttatttgcccaagtataaatcctacctaacatttgcaactccctaagacacagtctatcaataatagcattaaaaaaaagggccatctatcatcgtaactgccattatttttttcatcagggctacgtaaaatattaaaatcaccaccaatgagaattggtagggattcatgactgcacaaattaactaattcagcaagaaactgatccttaagttcattttgtgccggtctataaactaaaactaaagcccacttgaacttatcaactttgttacataaatggaacttaatataaaaatcaccttcatcaattaaaccaatatcaacgtttagtaaattgatgcctaacagaagacccccagacctacctctgggaggtttacaatgccacaaaaactccttaccagcacaaagatttttaagtgcagctagagtaaattctttcttaaccgtctcagacaatgctataaagtcaagctgatgttccttgggcaagtcagaaataaacttatgtttttttggtccttaaacccatcacaattccaaaagattcccttcatttgaaactatttttattatttttcttatttttcccccttttactctttttcttagagttaggagaaaatgccataggatttaaagtgtttttaagactattctcacagtcctcactaaaatccatgacctcttccataatttcactacataaatgttgtagtaaaaattatcctccaactggtcatctaatgactcagtatcaacattaggggtacaaacttgattaatagaagaacaagcatattcgcttatcctattattttctacacatttcaaatcattaattacatcatctaaaacaacatttttactagaaggtataacaccaagattatgatgatgtgcagatatttgatcatttgaaaaatgtgtaaaagaaacattattaactgaattacctctagcctgcaggttctccaagttcttaccagccttcaacttttcggccctttcaagaacaagctgatcgctatcacttgcccttcttttactcttccttgatggaaagattactgcctcagggatagcagagagctttgccacaagactttcctgaatctgggccttgtcacccattatagtctcttcatttaaaccatcaaatttttcatcagaaacagtcaagccatcagattcaggtattagatttagctgagaagagggagcagaaggaccacccctctcactaaattgaccac

SEQ ID NO: 15917 - DNA, 2575 bp, Oryza sativa
actttgtcgatttcttgaatgatttgctttggtattttcagagctgtcatggcatagattggcatggagcttggtactgatagtactaactctcttcttcctcctgccgagaggagctttttcttccaactggctaatcgtgccttgattttgtcaattaggtattggcgatggacctttcggagcctgcttatcatgagtggcatccctaggtatcgcattgggaatgtcccgcgggggccagtaaagttgtgtagcatttcatcaaggtcaatttcaccacagctgattgggatcactgagcttttgtgaaggttaaccagaagtccagtagcactcccgaagttattcaagatcgaaatcaggctgtccacatcttgtcgtgatggtttgatgaagattgccgtgtcatcagcatatagggagcatctgaagcgtgcactgcggtccgctaggtcactgaggaggccctcatcagttgcaatcttgagtagtctatgtagggggtccatcgcaagaataaaaaggtatggggataggggatccccttgccttagccctctatggtgatcaattctttctccctcaatcccatttagtgcaaccctggaagaggaggttgagaggattaaagccacccagtctcgccatctagtactgaaccccattttttcaagcagcgttaggaggtactcccatgagaccgagtcgaaggccttggcaatatcgagcttgaagaatagggtgggctgcttggacctgtgcatcttcttagccaggttggagacatagaggaaattgtcctggatgcaccttgttatgatgaacgcactctgagcttgtgatatcactttgttaatttgtctggataggcggattgccaaaatctttgcaaggagcttcgctaaggagtgaattaagctgattggtctatagtcgcccatagtgcaagcatcattctttttggggatgaggatgagtgtcgctctgtttatactcccgaaatttcctcccgataaggagtggaatttgtcaagcaattccatgatgtctgacttgataacctcccagcaacatctgaagaaggtgcctgtgaagccgtctggcccaggtgccttctcagcaagcatccgtttgatagcttcccaaacatcctcctcggtgaagggggagtcaagatcttctggcgtcacctggggtaggtgaagctcctcccagtttagggtgcaagagcgagggagtcgctggcccatcagagaggagaagtgttcgtgtagggcacgctctttggcttcatgagtttctgggatgacgttgccacggtggagtttgtgaatgaagttcttccgatggcacgcattgactttcaagtggaaaaacttagtgtttgcatcaccctctttcagccatgttagtgtggatcgctgtcttctccttgccttctctacagcagcaagaccaagaatctgtagctttagatcttttctgagggagatctccaagggcgacaatgctctgttttcttgtgcaatgtccaaacggaggattagctcatttacgagatggaattggatgcgactgtcacttaggatgcgattgctccaggaccgtagagccttggctgtagctttcagcttggaactcaagcgcttgacagggtgagaagcgctaactggctgggaccaagccgtctggacggtgtcaaggaagcccggcggtcttggccaaaagttttcaaatctgaaagttggttttcgcagcagctggtgtgttggtgagagcaccagggggcagtggtcagagttggaggaagagagagcttgtaggttgtggttagagaagagcatatcgccatctgggttacaaaaaatccgatccaacttctcgagggttggggcatctctctcgttactccaagtgaatcgtctattttgcagtcttaattcacggagttcacatctatttatcgcagccttgaaccgccccatcaatcgacgatcaaggttgaggttattcttgtctcttgcctcataaatcaggttgaagtcccccataatcagccagggggtctgtcctgatggtgccacttcgcacatttcctggaggaagttttccttatcagcgtcatccgtcggtccatagacgttggtgaggaggaatgccgtgtttgaggaccgttgggtgagacggactgagagggagaaatttctgatgttgatatcactgtgctggaggatatcatccatcccaaaaggtagctgctcctccacggctcccatcagcaggaaggtagctgaaattattcagtcttggacccccaatttccgaacacattctttggtccatgattgccaattttgtatgttggaggcacatgatggatatgcggttggtggttgccacttcgcggattgcttctctttttgccgggtagtttagaccccgcacattccaacacatgatatgttcactaatcattgcacaacgagacaaccattctaaaaaggcagcgtcttataatctcagcatttgaaccaatacattgccacagcagtagccaaatactagttactat

SEQ ID NO: 15918 - DNA, 1722 bp, Oryza sativa
cccccaatttccgaacacattctttggtccatgattgccaattttgtatgttggaggcacatgatggatatgcggttggtggttgccacttcgcggattgcttctctttttgccgggtagtttagaccccgcacattccaacacatgatatgttcactaatcattgcacaacgagacaaccattctaaaaaggcagcgtcttataatctcagcatttgaaccaatacattgccacagcagtagccaaatactagttactatcctgagcctaacacagactagaggaatgcactgcttatttcttattagcccgggggcttaaggcccgagccggctaatagagcaactactaggggggagcaaagggtgtgaagcacccctgacagcccagcgctaatctcttacaacacggacagtgactgactaatatggggatggtcgcgctcctgcatggtgatggtgagacgcacgcctaagccgtgccggtggtgatgccatcctgtccggcgaagtccgacggaatggaagctgggtcgtcgaggcgggtgaggcagcggaggccggcgatgacatgtggcggcagtggcttgtcgaaagccttgacgaacgccgcaatcgcctcgtcgttgaggtcctcctctttgtcaatgaaccccatctccttgaggaggcggccttcggtgtgcttggagacgggcaccgagaaggggcgtgctgcctgtctcgcactgtgcctagagggcaccatcttcaccttggagcggccacggcgtgctggagcggggggcggcggctgagggagaagcggctcgggtagaggctcgaacaggcgaggtggcgcaggtgcgcctggaggggcgatgtgggccaggccgtcgccctcgtccaggtagcccaccacgtcgggcaccacctccttgctggcttgggccgccatctcctcctgtgccgccagctcctcctgggcctcaaacccggactgggcctccagcagaggatgggccgtaggggcgctgagtgggattggaggaagcttctgggtagcttcctctaccccaatcgccacctccatcgtcatcgggtcaatgctgcccaggcgcatgccatccatcgccgcagtagtctctgccaacatctgtgagcaaagttgcagcgagaggtcagagagcacagagagggttagggttagtggtgtagctgtcagtgtcgtcggtcccccccctcgagaagcgcgaccaggcccaccgccttgtcgtttgtgccgctgcggcgacggtggcgtgaagtcctggcttgcggggatggagatctccggcgggaacaacgacggcttgctgagcggcggcggctcgtcgaacaagagcggcagccacgatcccggccggcaggtgggctcccgtcatcgtccccgtccaccgcgtcggcagcgcatccacggcggcggcgggaagggtggggggtgcggctcctgtggcgagccccatcaggttccccctgccctgacgacctgctctggcccaggagagccgcacgccaagatcggcgtcgtggggcgcaaccagctctgtcgtcgtcgtccccgtcgtcgttcctgcgtggagcgaccatccggcaaccctcggccgcctccagcgttttcaactttaaatttggagttaattttgagggttttttatcgaagtttatttttcagcctttgcttttagatcggtaagaacgaac

SEQ ID NO: 15919 - DNA, 1517 bp, Oryza sativa
atatatatatatatatatagtaaatttgtttggtgctccatggtgcccgggcaccattgttgaaattgagtatatacccaattcaaatgagtatgaaactttttcaattacttaggtattaacattaactactttactaactagtttaaagcaagtttgaactgaatttgaacttgtttttgttagattttgattctaggtatatagcatccatacatataattagttaggtatgtaatcatggattgtgaaataaagttaaatttgagttgttttgttgataagtataggtatgaatcaaattattataattaggtatatactcacaatttaaaaattttgaaaaatttgagtgattttgtgcattagataccatggtgcccgggcaccatggtgccccatatgagtgtcatatatatatatatatatatatatatatatatatatatatatatatatatatatatatataaaagttttatttataaattatttttcgtttggcttcttccggataggtctctaggtttacgtgggatttttctggagggagacaccacaaattgcaacattagtactgttggattggatggatacttgtttggcatcgatcaggttggccacttggccacagtgacatgaaaaaggtgtactaatgacggacaaggacgtgacgtggacgcctggggggtcgtcattaactcgaggttaaagctcggaatagcatcgttgggtgacgaggcgatggacctctccgcgctgttcatgatatatttcaccgtcgctgactagtggccccccccccacccacagtctcgttccccttcgcctccggtctccatcccacccgcccgtgtgggggaccgtgtgcagtgcgacccattgggttcggactcgggctcgacatgattttggccggctgcggcgtcgatcgtccatcatcgcccatgccgtcgcgcggtatttgcgagatttgcccctcaacatgtggtaggatttgctccccggaatccggctaaaacctcccattaattgtcgagccatacgtgacgttgttcaagtgatgattcgtagttactctgaaaataatcaatttctgaaaataaatctggatgagtatctatctaattttacgtgtggaagttagtttttttttaatgaacgaaggaagtacattacagtttagtccgagccatctctttggttggcctgcttggcatttgcggtacgtgctgctacggtgtaaacgtaaacgtgaaggaatggaggttgcgagtgagtggtcccccgttcgggattgttgccggcggcgggcgcgccacgaggatcggtgcgtgaaatcgggagcggtctcgtcacttgttcctgcttgatcaattcaacaaaacgggagagagaggctgcagtgcagacggggcagggcttggctggcgtcgtcctcggccagctgcttgcgacctggaacccaattcaccggcagtggagcagcatatcaacctcctgtacgccttcctgca

SEQ ID NO: 15920 - DNA, 958 bp, Oryza sativa
attcttagcccaagccagaatgcacgtgggccacaaaatttgatggcccagcatggatcgacgcccggtggcccatgttgcgcggtcgcgtcgccgccctccccccttctcccagacccagcgtggcggcgccgccggccgcccccacctcaccttccgccgcctttgcctcccgctttctccaagcgcggcagcgccgccgccgccgccgaaccgtctttctccttgccctccggctcgctctgctgggtcgacgaaaagcccggcccatctgcatcgttgaaagcaacacctccacccaaactacagccgcgcggaatctgattcttttttttttctcggaaaaaaaaaatcaattcgaagctcacagtagctcgcggcggcggcggcggcggctcgggctccgacttcgtgggcgatggcgggggcaggaggagggggagtgcgcgacatggacgcgctggagggcgtgcgctcaatcgtgttgaagccctcggagtccctcgacgaggggcggttcacgaggatcgccggcgccgacttcaacgacgccggcctcggcctccccgggctgctcgcgtcgctcgccaccaccggattccaggcctccaacctcggcgacgccgtcgacgtcgtcaaccagatggtacgttactaattactgcaccctttgcagccttcctgccttttgcatgcccgtgagggaggcgaagcggatttgggggttactgtagcttgaaattgttgtgtttctagatccttggagtttcttaggaattgcaatttagacgaggcccattgctgtagctgtgttggtgtaattggagctgaagaggtgaagtcatgtgctgaatgatgcgatagatgtggttgctataaaatcggaaacttgcagcttattattcatgctaggattgacgctctactgatgattatctcgataattcctgtcagatga

SEQ ID NO: 15921 - DNA, 612 bp, Oryza sativa
acttcctcgtaagtgatctggaggtaatccagatgaaaaattatgaaaaaaaactctctgtaccatcttacatgtgtgttccacgattttccactttaacatttcatatgatattttttaacacctttaagatgttctgatactccctaaccctttctattctgttcttgaatgcactgaagttagattggaggctgtctcacgagaagccacgtgaggactgtgatgaagctgagcttgatcctacatatagagaatctgtaaagtgcaaaatattcctgggattcacttcaaaccttgtctcttctggcattcgagatgtagtccgttttctagttcagcatcacatggtgagaatcgcgttgctgtaatttccttttatgacctggtttggtagagatggttttacatgcttttggtaacatactagcattatcaaaagcattgatatcttatccctatgatgtagctaatccccctttgaaaatgtgttatttaggtggatgttattgttacaactgctgctggtatagagaaggatctcatcaaatgtcttgctcccacttatagaggagtattttctttacctggaacactgttgcggtcaaaggg

SEQ ID NO: 15922 - DNA, 596 bp, Oryza sativa
tgaatcttcaccttctgtaatcagtcaaataattcacttgttatgcaatctgcaggtttgtgacaagcagaaggcaatacttctagcagatatggcacatatcagtgggcttgtcgcagctggtgttgttccatctccttttgattatgcagatgtagtgactaccactactcacaagtcactccgtggaccacgtggagccatgatcttttacaggaagggggtgaaaggagtaaacaagcaaggcaaagaggtatatacttgagcagaacaatagcaagatagtagcgtagggtgttggtactgtttcttctccatcctgtgactctgtgagcttcaaaaaaataaaaatgcctaatgaccctctaccgtctaggttatgtatgactttgaggacaagatcaatgctgctgtcttcccaggtctgcaaggtggaccacataatcataccattactgggttagctgtggcgcttaagcaagtctgtagcacttctgatccctgatgttttatattttatagatcacattgttggcctttgtcttggactctaaaaggactttctaacttccaggggactactccggagtacagag

SEQ ID NO: 15923 - DNA, 1409 bp, Oryza sativa
ggcgaattcgagctcggtacccaattaatagaatacttatatcaacaagttacaacttcttttccggaagccgatttccaaagaactccagagttaagcatgcttggtctggagcaatttgggatggaatttttctcgggtgcgcacgagtgaggacaaagtgctatgaaagctgtcagatataagcgggcgcctgagagaggcgggacgggacgttacagacgtgggacagaacatacattaaccttttttagttaattatgcaagcaaaattcaaattcaaggcagctttggcacaattaatatttgggtcgaagtgaacacaagcagtgacaaaggcgccactggccagctagcccggataaacgtccggattcacgggcaaaaactctattaaattttaatattggttaattaattgatactgaaatttctatagcaaatactagttatattgaaatttgctcggccctaaaaatctttttctccaccactaaagtttaagctagggaaagtaatttacttaattatgttcagcacctagcaaattaattatagaaactatatatacatatcattaagaagaaattttacggtctttaatgttgtatcggaagtactaatacatgatttttaccgtaattttgacaaattgaccttttgggaaaatttatttcaagaatagactataccaaaaacttatttaaaaaatagaccgtcagctcaacgccataaagattggcgctgaggtataacgctttaacgctatacatattggtgctgatatctcatccgaggtggcaaaaatttaccagattgtaggtgttgacgtttgatgtcacgattctggtatttgcatagtatggggatcgatggtactaggatatatgcgagattgtaataaaagagatggggacgaggatttttatacaggttcgggcccctgaattgtcaggtaataaccctactcctattggccgaagccggtcgttgctcttattcaccataatcacaccagtacaatatttggggtagtctatctaactgttgtcgacatagcgaactgaagtgttgactcgtagtcgacaacagggtagccttcctcctcgaatccacatccggcgagatcaaagacagcgctatgtctctcctgacagtatccgtagacactataggggactagccatgcttatctctgaagtcgatatccggcgtcttgtcttgccgcatgttggcttgtaagttaatcttgtgtcttgatctattattccgtgtcccctctcctcctaggggaccttgtatttatacccataggtgtccccttgtccaagtagaactaaggaaaccaatatggatacaatccgagtagtcctcgtcgttttcatgtaaaactctatttatccttcctt

SEQ ID NO: 15924 - DNA, 5804 bp, Oryza sativa
ccccttccgggggggcccgagccatcagtgagataccactctggaagagctcggattctaaccttgtgtcagacccgcgggcctttcctgcgcagcttaggtggaaggcgaagaaggcccccttccgggggggcccgagccatcagtgagataccactctggaagagctcggattctaccttgtgtcagacccacccgcgggccaagggacagtctcaggtagacagtttctatggggcgtaggcctcccaaaaggtaacggaggcgtgcaaaggtttcctcgggccagacggactgggttcggtttcctccaaagaattagattacattgaattattttgaaacgaattagcaattgaaccgctctgagccggctgaaccgggcggtttttgggcgaaccggacattaaaccggcactagttggaccggtagccatactaatgggctgtctaacggcccatatggtgcagctgggggttattttggcaaaaatatgaagaattggtgcacctagtgggaatcgaacccaggtccgctagctgaaagtgccaagcgctagccatcagactatccgacagcatgtgatcatgagcaaatatgtagtgtacttgtatattgagaatcgtggttcgatcgtccgggtcaccggtcagaccggcggaccgctgaaccgagaggtcggccgggtcacccgccggtccggttttttatactatggttctgagttctaaaagctcctttggttgtctcgtagcccatccacacatgctactgacgctacaagacttattatagtggagtacatcccatgccaagggaaaacaaaacccatactgacaccactcctacatctcacacactgccactagagctgtcactacccccacccccacgctgtagaacagtaatggtttcactcaggtagcggacgcggtggtacaggcgatgggtgaggcgctccagaaacataacttcattctcactagagcgaacaatagtcagcagttctgcacagagcttctcagcctccaccaccctaccacgcaagcgcgccacctgatggcgcagatgctgcacctgagggtaattgacatcccttatctcaatttggcgctctgctgctaaggcgtgtatagccatgagtgaagcagtttgctcagcttcagctactgtggtcttagctgcctcataataaaggtagggaacacgatcagccggaccaaggttaacctgcacccctacaacatgcagtccagtggaactatatatatgcctcccagtaatagtcagtggaccaaggtcaagcatgcgtacaaactcttctaaaaagactttagcaggaacctcaatgtactgcgtcatacctggaaaaacaatcatacaaacaatttatattatttaccgtagaaagctgacatgtatcatcctgacctaaggctatatatgaccagacctagaaactatcaacctatagagtctcacattttactgtaccagttcaactagacgacaactacccatgcattaaggtctcctgtcttaatatgcattaattttatctcctttttcaatttatattattgtcaaataataatctaattctaatatggaacctggctctgataccactccaactgtcacgacccaaatatatatatatatacattttttttttgacagtctgccatatccttatacgcatatatactagtatttatatatgtctacaaggatacaaggcaagatgcaatgtctaaccatcacaactggagcttggacacctacaacagtggttccgtttattattattactttttttaccagctacactgcatattacatcagttggttcactgaccaacttattgtcactaggacaaaaccctatacttagcatgcaagtatgccctctggatgtctctaaagactaagtagaccacactccccactgggtctgtatgtcatcattcccctctgacatctcatattgactagtttctgcgcacatcaaatagtaataatatatgagtatgttatacatactcagcaagattagtacatatagctatatatatatatatatatatatatatatatatatatatatatatgtttataaagacagaagaaaaatactattacccatagatattaatagccaataaataataaaggacattaaatatagtaaatgaattaaaaatacactgcagaggtattaaaataatcgttataatctcgttccttcactccgtttttcccccaattagtgataccctcatctgagaatcacgccgccggattccctacttgtgtgaggcattcctcatctcacactgatatcagccaacccgatatcgttatttcaggtatcggccgtctcaggctaagtaacataatcacgttatgattctcactgatgaaatcatcaatccattattcgagtgttaataatgtttattgttagattgttagtaccaccatcttaatataatgttggtaaacaaattcagttagaggtgattaagtaaaatagttgatgggctcagtcttgcctggtttcctgctgttttaccggtgccctagtcaaatatgcaaatctttcatattaatcaatgtataaatttgcatgcataatagctactaactgcctactagagtatagctagttgatgtgactatactagagggagggaaccaactagtactagtagatgcttgcatgcatgcatgtagctgctgctagccactaaaactcgatgcatgcatgtagctgctgctagccagagcattagtcttttcactaacagttatattttctacactaatccatctacttatagctagacattagatgtttattctagccatgcactcaataaaatcaaaggacaaggttctatgtattacctgagaggcttctattagctctaaactctcaagtgtctcacagaactcttgccacagccagagcagggagaagtactactgatggacaagagttgtagggtcacgtacggcttaaatagtgcagcttccttcagtgtgaagcagacacctatccaagccatgatgatagggataggattcaccctccctcttccttacactggaagggttcgatcctatccattaacctcggtgatatttatctgtcctcctcccaaaacaattcaagaatgtttgaacggttccctgctgctactgctattactactactactactactattattattattattcactactactacatttttcatttttttcctagtttcgtcagtaagaggccgcccagtccgccgtgcgcataaatctttctactttcaagtgtgtttgtctctcttttttgggagtttaagggaaaccgggatcaagtatgaccggtaaacatttggtatcagagccaagtcgatcacgtgcggaagtccaaggcgcaatagctgaagtggcagtacaacttcatcgagttcaaccgtggaggaattctcccttcggctcagctgcatcatcacgtcgttggcgacgctcaggccccaatccctgagtccaaggtagttgacaagctcttgcgggttgtgcctgagcatctctcgcacattgcttgctccatgaagaccctcctcgacattgacactctatcactctatgaggtaactggccgtctccacgacgacaaagagcacaagggtcgctcctgagcctattcatctcgcaaggccccctcaagcccctagtcccacgcatagtagagaaaaccgtaccggacgtcaaaccattcaagcccatggtatagtggtctagcgattgaaccggcgattcacacaattcaaatgcaaaactaggacaactatattatatgcatattcctcgtacttcatttattactacttaaaatgttactccctccgtcccatccctccgtcgtagaatataagcatttttttagagttggacacggttattaagaaagtggatagaatcaaatatgagagggttgtggttggatgaaaagtgcaggtaagcataggtgtatctgtagggtggtcccggtggtccccagaccaaaaaaaatagtgattgatcccactatatattggattttagaaaaaaaaagaagaagaaaatcccttacgcagtcattgcacggcgcatgcggaaaggcgaaaaccgaagcgtcgcggcgtgcctcagagcaagtataatagtgagctataagcctactataagcttaggtggaggagagaggtagtgaaaaattaaggatgttggctctcatgcaagagctagcttatcacaagctccaagacaaatacattaaatgtataagtgagagatagagggaggagaagaaaattatagctaaccttagagcgggtacaatagcaggctataagccagctataaacatattttaaagagataaaataggagagagaagagcagcgggctacagatttgtagccagctgcagcacggactctaagacacagtgtgtgtatgacaggtgggaccatgtattaatagtatagtaagcaactattgtatgaatcgactattagagtggctatagatgaattggagctagtagtgggctatactatatgttggctttaagataggctaatagtaggaagttggctatattattatccttgctctcaccttactcgatgcctcgacccctttttttcgtcatgccgcccgcattagcaacaagtctaccaccaggttaggaactgtcgatccaaggagtcgagaaacggaggtcgtcaggtcggagattccgctcgttcgctaggcgcgatcatggagtgccgaccaccgccgcccaccggcctgccacccgctgccacccgctgccatgccgcttgcgcccaccacgatggccggcagcgatgcccattccatgaggtgtgagacgagatcgcgacagccgacgctctcgtcgtcgtcctgatcgatcatcagcaaccaccatcagcgatcggtggctcgtcccggtagacggcacgatggtaatcttcttcaaccttttcaaacttttctagccgtataagcttttttaaatcaaaattttacttatttactaattttatgtattaagatgtgttattaatatatcacgacatatttttgggtatattctattatgtctacttgtattgtacattgtactactccctctgtcccaaaatacaaaaagttttagggttggacacggttattacaaaaagtaggtagaagtgagtggtcgagacttgtgaatggatgagtagttgaggtatgtgagaaaagtgaatagtggagggttgtgattggttgggaagagaatgttggtaaagaagttattatattttgggacaaatcctgagggctaaaagttgttatattttgggggaaaaagtacgaattagccccccgaactatcgaggtcgtccgaattacccccctaaaccataaaaccggacattcttcacccccaactatacaaaccggatgaattacccccctcgatccaaatccgcggtggttttggtctacatggcatacacatggcagtccagtcagcattttatttattaaaaaatgtgggacccacctgtcatagtctctcatctctctctcactcatcctctctctcgctggtggcggaggcaaccggcagcggcggtgcacacggcgggcggcggtgcacatggcgggtggcagtgcgggacgagcggtcggcaggggcgcgcgggtcaagcgggagcggcggcgcgcaaagcgggcagcggcgcgggacggacagtgggca

SEQ ID NO: 15925 - DNA, 1490 bp, Oryza sativa
tgttcctccccatcacgatctccctgttcgtcggcgacccctctcctccctccaccccggacggttgagacaatgtcactgttgccggtcgctagcgggccccgtagatcaagagggagaagccatcgccgtgctgcatcttgcccaatccatgacggaggagccgctagcccacgacatcgtcgacgaggccacggacaccgacaaggacgatctcgccttggccagccgccagcaaaagctcgaacaggaagacgaacacctcacgcgcgagagagaggatgagtgagagagacagagagaggagagagatgagagactatgacaggtgggtcccacatttttttaataaataaaatgctgactggactgccacgtgtacgccacgtagaccaaaaccaccgcggattgggtcgagggggttaatttgtccggttagcatagttggggggtgaagaatgtccggttttgtggttcaaggggggtaattcggacgacctcgatagttcggggggggtaattcgtactttttccttattttgggacggagggagtatatattagcatcgttagatttgcggtgtttagaaataatttttgagtcggaccacccatattctaaaaccaagattcgtcactggaggtaggtgggaaaattgaatagtagagggttgtgatttgttaagaagagaatgttggtgtataagttattatattttaggacaaattttagatgctagatattattatattttggaacggaaagagtactaaagatggtgattgttctaccaccaccaccctagtcactgacattgggccccacaatgtcagtggaacattataggcttggagtatcacctagatgtatcgggctactagtacaacagaatggtaacgatgaaaatgaatcgattaacaactcaatattggtagaaatataacaatgttgcgtcaattgctcttttaactctgctttgaaggctaactacgattatgatctcactcttttaagtttactcatgtgacaccacttttcaaaatcagggttggtgttgacccagttttcgttacacccatacgatatcataaagaaaaaaaataaaaaaaatgtattgacaagccaaacttacgaaaatgtctgggagtacacaacgcctatccccaaatttctgctcatccacccctgagcctattcatctcgcaaggcaggcatagaggaaggtgcaccggacggtggcctgggtggaggatgcggcagcgctcggagggagcaggggcggctgctgaacacggaagtagcggcggcggcggtgcacagagggagtggcggcgacggcacaaagaggcaaacaacagcacgggaagggtcaaaaacttcggcgctggcgctaagaaattgagccatcgagcgacacgcagtgggtgtgctcccgcatcgagctcggcatccacctccgtcgccatttatccagatctaggcgtccctc

SEQ ID NO: 15926 - DNA, 6573 bp, Oryza sativa
tctctctctcatgatacatatatgtatatatatatataagaaaaagtacgaattacgatcaaattacccccgtgaacccaaaaacagacattgttcaccttgaacttttaataccagacgaattacccccctcgacccatccagagcggttttgtcctatgtggcgtacgcatggcaatccagtcagcattttcttattaaaaagtggtgggtccacctgtcatactcttgttggtatttcttaaccttacagataaaatccgcaagcgcacggaaaataccgatgtagcacttcaaccgggagtattcttaggtatcgatttccacagggaacttgtgtgtcaacgccggttcagattcatccaaggacatgaagctatagataggcaaaagatagagaggtttcaccggtgaagaacagtgtctatggaaagcttaactttaatcctaatgaggtacttcgggcactggccagctcgctgctcctagatatcgctctactgcgcacccagacagggaggactttagtgtcttgagggttgtcaccacctctacaaccacctcacacctactgtgggatgcggagcaaacaccggaaattatctacctagacaccgcgcctaagcatattaatttcttactttaatgttagctacacactaaagcaaatcactatattttagttgattatagtaaacgatgatcccatactttgaataggaactaaccaagaaataattctcaccgagcaaaactaaattactcaaaagataattctattataatcggagtaattaacagagcagaaagaaacagggataggattaccgacaactggaatttcttccacttcttctactctactctcttcctattctagtatacaatatagtactatagagcatcttataattcagctcaagcttggagtgtgtgagtgaagtgaagaggtgaagtctttatatagcggcaggtgtaacggttatagaacgcaaaaggtcaattttgccctccaaccgccattcaggagctcatccagaccgtccatgcaaaaccccaaatcatacggctacagaggtggttcgactgaacccgaaccatgggttcagccgaacccatggcaggcccaacaggcttcaactttggcctgttgctcctcctctgcctcctttatccatttctgtgagtggaaggaccattgaagatgtattctagtagtttctggcccactctttatatggataggaactctccttcacttaagtctatatttcatccaactttggcggtttattacctgcattcaaatatacaccaaaacttgcggaatatgttagaatttaaccctatcactatgttggatgttttatccctttgatttatgcaggtattggcggcataaaatttgtcaataacaaccaccaacaaccctctcatcctctctctctcccgtcgggagctcctcttcctatctctcttcctacggaagcgacgcaatggctggtggcgagcgtggcgggggaggtgagggcgcatggtgcgacccacgatggcgactacaatgagcggcggcaactgcggcgagggcacctagcgagtggctctcccccttctctctatctctctctctctctaggcaccatcgggagagcgcacgcagaggccggcggcgcgtgtggcggaacggtgagggcgcgcagcgcagcccacgatggcgactatagcaagcagcggcaactgcggcaggacgccaggcaagcggctcttccccactctctctctctctggtaccgtcaggagagtggacccgaggtcggtggcgggtgttgcgggggcggtgatggcgcgtggcgtggcccatgacggtgactacggcgagcggccttccacacaccctctctctctctatgtgtggcgcagtcgggagagcggaccccgaggccggcggcgggagtggcgggggcgtttagggcgtgtggcgtggcccacgatgaattgatcggcagtcggcgaccggcgacggaggtcctcctgcacctctcacccgccagcgcttgagcgacctccgcatcccttgccgggggatgccagaaatctctatgatgaatctttcccgacaacgatgccagaaatgcttgttggtatttcttaacgacaatagtagaaatataattcccagtactggcgcataaatacttctggtatattatggttacagagttcatccgcaagcgcacagatataccattgtagcatttcacccgagagtattccaagggtatcgaatttattttatcccgtgggaagatcatgtagagagaacttgactaataatttatatattacttgtgataatcatattctaagcaggggttaagataattgaagggtagagtgacacacaagcattagctactcattctcataatatattatctaggctaagtggaaagaaaagagaaagaaaatcaattcctatacttttaatattacatagtatatatacattctagttaaccgatatactaactaataccctctatctgatgccctcctggcatttcgagaagccacccctcctcgtggcatttcgagaagccacccctgattgccgagttccttacgatagcccgtcatgaccatacaaccggggctaaatacggaggaataccctccccagggaattaacttaggattatataccggcgcggaggaatacccgtactgagctgtcaccatcagcggcccacctcttatccgcagcatataaccccaaataatgatatcccataatctagacaccatgtctaaattactagatactactctaatatcatcgtcatgacatagagtaattgcatatgcaaacattatacccgcaccaaagcatctcccagataagctagccgtataatcagtataacatgaacataatgtaaagtaggtactcatatactcggaaagtatttcaataccacaaatatatatagaagagtattctaataaaagtagaaagcttacaaaagaggaaaagaaagatactatagccatacccaaactcttccgaagacttctcgactcctgatttctactctatttccatttcaccagctagatactactaaactaaacttgagagaaatgagagagctcttgcttgaggtgtgtgttgaagtgaagagagtgaactccttaaataggcaggtaatgatggttatggtggttggaaaggtcggtaataccctccaactgccatagggagtgaatctccactgttccctcaaaaccctgcatccatcggcgctggcattggttcgaccaaaccctgggctggcccaaccagcccacaagttggctggtggcctcctctggtgtttctctccgtagacttgtgaattttggcctagtgcgtcgtgtcaattctaagttcttggcccattcatacataagtctggttctcgacattgtccgattgatttatcatctgagttgatgtggattctcctccactttattgtcattctctgtaaaaagttagtatacctaataatagtggaatattattattctaacatatatatgcattgcaaacatcactagttctcctctattttagtaatattgacggtcgaaactgatctataacgaccgtcaacagtacccagtcttgtgctgtctcccaccccagagttggagtatgcatcggatggtggctactcggaggagtaggcttcgtccgtgccgtcaaggatgcctgtggaatggtgtcgctccgctgttagcgttaagttctagaataagctcgcttttattttccacttcatttatgtaggatttttatatgtttgtaagacgtagttctgtatatcaactttgtcgtttgtgtaccctggctggtcctgaacaggtgtttaatgcacattctgcttggaattctattcgggaatttccgggcgtgacacgtatgtgtatactatatacacacacatatatgtgtatatattgtatatatgtatatatataatattttttatgaatatatttttagtgcataaaaagttatatgtcgtatacaaattttatatatgacatatacaaactttgtatacatacatattaaaaaataataaaactagaaaatacgtcacatatacaaattttgtatacgcacgtatacaaaatttgtacatgtatatacaaaatttctatacaggtatacaaactttgtatacgtgcgtaaaaatatatacatgcatataaactttatacacgtttacatatacaaactttgtataggtgcgtaaatatataggcccacaacgatcacccgcccattagcgatgccctaaatatatcggcatgtttggctgctagggttgcggctgcaccacagccaaccggaacaggccggcaagctccatgacaactaggccatattaagaaatttcacaaaactatatatactttgataaaattatcacaaaactaaatatttaaaaaacgatagatttagcgctaaatttatcccaaaactatatatttaaggtagagtatcacaaaactacatatttaataataaagttatcacaaaactacagattttagagtttaaatccttagcactagcattatgtttgagttatatacgtgtaagttttctgattaaattatcactaaacctgtagttttatgatatttttattactaaatctgtagttttacgatactccaccttaaatctgtagttctgtgagaaatttagtgttaaatctgtagttttatgatatatcatcttaaatatatatctatagttttgtaataatttgatcaaagtatccaaatttacttccatattaatataacccaatgaactttgatatctcaaatatatacaaatttctttcatggaaagttgccgtaggaaattaaaccatttaatggtaaacttgttgttttttaaggcaaaaaggcagcgcacatgtgtcatgtgcccttgagcgctcaatcaagaccaaatttcatcttatcatatattgtttgctgcccacccttaccgcgtggtgcccagtacacgtgaagagcgccctaaaacgacgtacaaaccaggttaggctaacggtacggtacaaaacggaggacgcaaaattccactatcttcgtggctgccaatttcggcccggcccatacgatgcacgtacccggccactaggcccattaaaaccagatgtgatgccacagccacagcgtgtatgtcaaccgacgaaaatatatacagtgctatctcataaaaattttacttagaactagaaaaattgcccgtacattacaacaggtgaaggctattttagtcatattattgttcactacgagaattcgcttggatatatttttttctaaaaaatcatgtcaagttagcatgcaagtttttttataggagatatcatatacgactccttctgtatttccaaaagtaaatgaacataaaacccgacttaaatacggatctacatttctaaaagcgaataaactgtattttccaatacggttaaaaattgattcatatacggatgacgtactaaaataccggcaaaaatatcttcaatttttataatagtagagataagatgaacaaatatcggatattttttattccacggtatttttaaatttacacatacacatatgatatacgctatatattttcccgttattatttgtggcgctcaccggtgtcgaggccactggttttgcgcgtcacctcggcctggttgaggaagagcagtgattgcagccagcggaaaagagagaaaagggagaaaaagaatggcaaaatactacacacttcgtttcatattataaattatttgacttttttctaattaaacttagtcaagtttataaaaatatttaacaacaactaaaatatgaaattatttttattaaatctaacattgtatatatagtttaataatatgtttgttttgtgttgaaaataatcggtagcgctaatacaatcgctgcgcgttaaacaataattaacacgcctcggatctcgctcccacctccccttttctcttttttttttctggttctcttccgttcccaccttccactcctattttttcgttttctttttctatcccctcctattcccgtcccctcctactttagctgtctgcatctgcgttgttttgtttcgagtaaaataattactccccactcctatttttccgttttcttttctatcccctcctacctcggctatctgcatccacgttgttttgtttcgagagaaggcaagtggatcggatgaggaggaagagaagagaagagaaatgatacttgataagtggtatggattttttttatttagttcggatccaccgtaatgcctcctttgctatgcatacattgtattaaggctttattagctaaagaccgggttcatatgaagccacctatacaagtagatattatacagtgctgatgcccttacaagtactctctccgtcccataaaataagggattttgattttttgtttgcattgtttgaccactcgtcttattcaaaa

SEQ ID NO: 15927 - DNA, 17701 bp, Oryza sativa
attttagtggtgataatgttaatattcataccactttggattctatggtaccctctcctaatagcaacaaagttggaaagacgggtaaaaagaagaagaagaacaataaaaatcagttttaaatgaaaggaatcttttcgaattgtgatgggtttaaggacccaaaaaaacataagtttatttccgacttaaccaaagaacatctattggactttattgttttgtctgagactgttaagaaagagttttctccggctgctcttaacaatctttgtgctggtaaagatttgttttggcattgtaaaccccctaatgtaggtctggtggacttcttttgggtattaatttacttaatgccgacattggtttgattgatgagggcgatttttatattaagtttcatttatgtaataaggtttataatttcaagtgggctttagttttggtgtatgggcctgcgcataatgagtacaaggatcaatttattgctgaattagttaatttgtgcagtcattagtctttactagtgcttattggcggtgattttaatattcttagtagcccaatgacaactatgatgatagatggccctttctgtttaatgctattattgatgggttgtgcctcagggagttacaaatgtctggtaggaattttacttgggctaataatttagcaaatccaacttatgaaaaaattgatagggtcttaatgtcgacggagtgggaacacaagtttcatctatcttctgtggttgctcttaatagagatatttcggatcatactcctttgcttctaaatacaaaatcttcttctaataatgtccaacatagttttaagtttgaacttggttggcttttacgtgatggttttgttgatatggtgaaggaagtttgttctagtgttgatgaaggaaattctcctatggaacgttggcaggcgaaaattcgtcgatttagacaacatctcaagggttgggctaaacatacaagtggtttgcacaaaaaaaaagaaaggagattttagataggttggacttgcttgataaaaaggcggaaacatttcttttgactcaggaggaaattgatattagatggttttataggaataggttatcttcgattttaagggaagaggaaataaagtggtatcagagggctaaaacaaaagatattttggaaggtgattctaatacaaagtattttcatttagttgcaaatggtaaacatagaaaaatgagaacttttcaattgcatgatggtgaccaagtaataaatggtgatgcgaatttaaaggcgcatattaccactaattataaagtctttttggtcctcctaatgattttgatctaaagtttgatgaggataatattgctgatattccccaagtttctcttttggagaatgaagctttaactcaggagttactgaacaggagattaaggaggccattttccaaatggaacacaacaaagcatcggatcctgatggatttctgtcgacgtttgatgtcgcgattccggtatttgcatagtatggggatcgttggtacaaggatatatgcgagattgaggtaaaagagacagagacgaggatttttatacaggttcgggcccctgaattgtcaggtaataaccctatatcctgttggccgaagccggttgttgctcttattcaccataaacacaccagtacaatatttggggtcgcctatctaaccgttgtcgacatggcggtctgaagctctgactcgtagtcgacaacagggtagtcttcctccttgagttcgtgcccggcgagatcagagacaacgcaatgtctctcctatcagtatccggagacaccgtaggggactagccgtgcctatctctaaactcgatatccgacgtcttgtcttggcgtatgttggcttgtatgttgatcttgtgtattgatctattgttccgtgtatgttgattgtctcccctctcctcctaggggatcttgtatttatacccataggttcccccttgtccaagtagaactagggaaaccaatatggatacaatcctagtagtccttgtcgtttccatgtagaactctggttgtctttccttatccggaactccctccatatccgaagtcagttcccgtataagacatggtatgtggtgggtcctgcggagattcagtcaactactattaggtatgtggtatccataaccctaacagtagcccctgacttcaatgcaaatgaacaaattcatattctcaaccgcaaaccttggagtaactgttatcgagctcacgtgaccgttctcggtgagttcagagataacgttagacttcctttatcagcctcgtgcgggcacctaaagggtttgtctgagtccatctccgacgtcaaccaagaaagtacataacatacgactaagtctcccgtcttgctgtaatcgagaatttggattgaagtcaagaaattttatctcggcaggtacaccatctcttcattccatattccttgtcgagatccactaaccgttctcgagtgatcgagaaggcgcagagtctgcgacggagccttgtcaacatttgtcgtactcgccttagtcgatcttggtgtagaaccatagagacatgaagtctttaacaatgtcgaatagaattttcctgaaatcaatactcagaaaagaatattagatagaaatagccccagagcgaacgctcaaagggtgacatgttataatatgtatggaaatttaaaaatgaattaaatttacagaccaatgttttgtgtacgagcgtcttctcttttaccgacttcgatcagtcagtttgttgagtcgtacactctctctagcccccagcattgttgtcagagaatcgttctcggaggataaggctcttggacccttgacctgccttggttgaaaaagcactgaccctagcccccagccgtgaagttggaaaatccaatttccagttacacggcttggttaatacgcatggcgagaactcttacacgaccagatcttacatggtcttttgtctcttcaggatccgacaaggccttatcggctctgggcgtccccagccgaagttcccttaggttcctcggaggccttgtcaagacggcgtaaaaggacatgaggataggtttcaacgctaggtgtcatcgtggtaagggatctctgggtaaaacacttagcgatattgtgtacctcatatcaactttgttggagtagaggtagtgggaggatcactacaccgctggtcgaaaaccagttgtagcaccaactggaccacttgaagtaaaggtagcgggagaatcgctacaccactggtcgaggactagatagtagtcgtaactcgaccacttaaagtggaaaaagtgggagaatcgctacacctctggtcgaggaccaggtagtagtcttaactcgaccacttaaagtggaaatagtaggagaatcactacactcctggttgagaaccaagtagtagtcataactcgaccacttaaagtggaaatagtgggataatcgctacaccgctggtcgaggaccaggtagtagtcgtaactcgaccacttgaagtagagatagtgggagaatcgctacaccgctggtcgagaaccaggtagtagtcgtaactcgaccactctcgaccacttaatgtggagatagtgggagaatagctacactgctggtcgagaaccaggtagtagtcgtaactcgaccactagaagtaaggcgagagagatcactatgttctaatggtttgagaaccaggagtaggagtctcttaatcacctatagggacgctaaagttggtttattacatgtgcatctcatgtggccagcatgagcatacccaaattatagcatatctgaatgtccgttcgcaatcatgtcgggtgatcaagccgacgacgttcgtgaggaattatccattcacaaccttttctcgagtagtccagccatggccggtgctatgagataggtcgtcggtcttcgttggtaggttgggcgcgacgactctgcatttgtcgagatcgttctcgataatggggtgtactcgaccacaacctactcgagtgctcaattgttcctgaaaaatattttctagaaagcaagatatatagcagagaatatcgagtatgtactcaaaaaactgcatggatcttctagtattatcaggatataacgagcagattaaatatcagggattatataaaccgtaaacaagaatgatttatacggaagaaaatagagcgagcccccagcattaaaccgtagtcgatttaacatcggggacacttgcacaatagatattgcataaaaaacatgatctaggtaaacataataaattattgatctgacaatattgtataatcagaaaaataggtacgataaattatatataaaccattgcgtacctgtgtagatatatgccggatatatctacggaattagtagatcaatttaaaaaaccaatcttccaattaccttgctgcgtactcgttcgatatcatgtgatctgacatcttttggtacgccacggagcttgaggcttgaatgatctcgatagaccaagttgttgacaacgatggttccgatcttgtcggggcacatactctggtcaagttagatcctccatagccgaagttatcgagtagtatgttgtcggagaatccatctcttaaacccatctcgtcgaaaccttgaagcaccaaaagatcccctacctggcgcaccattgtcgacgtttgatgtcgcgattccggtatttgcatagtatggggatcgttggtactaggatatatgcgagattgaggtaaaagagacagagacgaggatttttatacaggttcgggcccctgaattgtcaggtaataaccctacatcctgttggccgaagccggttgttgctcttattcaccataatcacaccagtacaatatttggggtagcctatctaactgttgtcgacatggcggtctgaagctctgactcgtagtcgacaacagggtagtcttcctcctcgagttcgtgcccagcgagatcagagacagcgcaatgtctctcctatcagtatacggagacaccgtaggggactaaccgtgcctatctctgaagtcgatatctggcgtcttgtcttggcgtatgttggctcgtatgttgatcttgtgtattgatctattgttccgtgtatgtttattgtctcccctctcctcctagggggccttgtatttatacccataggtgcccccttgtccaagtagaactagggaaaccaatatggatacaattctagtagtccttttcgtttccatgtagaactctggttgtctttccttatccggaactccctccatatccgaagtcagttatcgtataagacatggtatgtggtgggtcctgccgagatttagtcaactactattaggtatgtggtatctataaccctgataatttgctgctgagttttatcaagtattttggaatgttattaaatttgacttgttagaggtttttaaagattttcatagtgggtgtttacctttattttccttgaacttcggaaccattattctttttcccaagtgcatagaggctatgaaaattcaacaatataggcctatatgtttacttaatgttagttttaagatttttaccaaggttgctactaatagaattatgggtgtgtaacgtcccgccttcccccaggccgggcccgcttacatctgatagctttcataggtcatagactgccctcacagaccaacacatgtcttttttgcacactttatcctcactcgtccgcacccgggaagaatttcccggtcggtcacccatcccaaatagctccaggccaagcatgcttaaccctggagttctttagaaatcggcttccgaaaaagaagttgcaacaggcttaaaaataaattttcacaaaagtgaattattttgttttggtcaggcaaaggagtgttatgatcaatattctaatatctttggttgtaagttaggctcttttccggttaagtatctaggaattccaatgcattttaggaagctttctaataaagattggaaagttattgaagaaagaattgacaaaaaacttagttgttggaaaggtaagcacctatctgttgggggtagattggttttgattaattctgttctctcgagtttagctatgtttatgatatctttctttgagatgccaaaaggggttcttcaaaaaattgattattatagatcacggttcttttggtagggggacgatcataagaaaaaatatagatttactagataggatattatttgccaaccccaggaccagggggccttgggatatataatttggaaatacaaaataaatgttttttttgagtaaatggttgtataagctaataaatgaggaaggggtttggcaagacttattgaagaggaagtatctttataataagtctataacccaagttgaaaagaaacaaggtgattctcatttttgtcagggctcatgaaagtcaagagtattttttaagatatgggttcttggattgttaataatgaggaacaaattagattttgggaagataaatggctaggcaacttggccttgaaggataaatatccatctttatatgctattgtctgaaggagatcttcttctattgccactgtcatgggttctgttccacttaatgttgctttcagaagagttttagttggtcagaatcttgtatattggcatgagttgtgcgcttctattgtgcatatccagttgaatctttcttctgattgttttagatggaactatcatcagaacggtaggttctcggtaagatcaatgtagctagctttaattaataatggctatgttgagagaaataagtgtatttggaagctcaagatgccacttaagattaagatctttatgtggcacttgcttaaaggggttctgttaactaaggacaatttggcgagacggaattggaacggcagcttgaggtgttgcttttgtatgaataatgagtctattcaacatctctttatgaattatcattatgcaaaattcatatggagaacagttcagttttcttttggttttaaccttccaagtagtatatctcatatttttgataggtggcttttggggttgacatgaaaaagagtaaactaatacttgtcggagcttcggccatttgttggactctatggttgagtagaaatgatatggtttttgacaaatcgctatctatttcctatatgcaggtaattttcagggcaactcattggctccggttttgggcacaattacaaaggcgtgatgaagatggagagtttctgaaagttgcatgtcgcaagttggagacaatggttatgcaactttatgccaactatggatggagattcacaaataggctggaataaatatgttctccttattttggctttttctatttaagtgtgttatattttatttgaactacactcttatctcgagtgctactttgtaataattggctgtagctcttcttgagcaaaggccgggatattatatttgattatctaaaaaaagtagctgatgataagtatgcagtattattttgtttttcaaaaaaaaaaaaagccatgcagatgtgtcatgtgcccttgcattgatagctgattgatttgccagaccagattcaaatcaaaggatgttcgcttaccacccttgccgtgtggtgcctagtgggcgcgaagagtgccttacgacgacgtacgaacctggttaggaagacggtacggtacaaaacagagcatatgcacaaattccacaatctccgtagctgccgatttcggcccggcccacaacgtagccactaggcccatttaaaaccatctgcctgcttcagcgcgccggcccggccgccacattgatcgatcgactgccgccggcacggtggctggccgtgccgcacgtacgtctcggttggcgctcgccggcggcgatacgcggcatgcgtggccgctcctgtcgcgccgcgtcgacgttgggagatttgcaataatgacactgcaaacattaacctttactataatgacattggacgacgttggggaaaggcggcaatatccactggaaacaaaggagtagcaaaattgcaaaaacgctaattaacatcgcgatgtaattaacaaatttggtgagattctcaaatgttggccttaaggcaaacggcctagggctccataagcactgatcaagcttaccaaagtcacataacaaatgctagctttaggtttagggcacactatactatagaaaagatttatttttgcggtcaaaaccaattttcacagttgagtgggtggttcgtctacactcaggtgtcttcgaaaatcggatttttgcatacggatagagcaaccaaattttctcttctggacactgaagacatccgactgcaaaaaggaaaatcgcaaaaaaaaaattgcaaagatcgaaactctaaccctagaatatagaagccgtcgctgtcgctcaaaattggtggtggatcctcgcgcgaggggtggagaggcggcaggatccgtgcaggacgggatggggtgccgaatcctctcctcccgtcgtcgccactcatggatccgtgcgggaggagaatggggtactagatccgcccctcccatcactgctcccggaggatcagcccacttgtttgatcgctccttccctggcgagcgctagcagctcaattgttcagccgccgccaccccccgatctccgaacgactgagttgctggcgcctgtcagggaaggagcggtcggacaagtgggcaattcatcgtaggaggtggagagatagaagggggagagaggtgaggaaaaagaaaaaagaagattaggatgactgacatgtggggttgtatttatttaaggagcggccggactagcgggcagttcatcgcaggaggttggagagatataacagggagagaggtgaggaaaaaggaaaaagaagattaggatgactgacatgtggggttgtatttatttattttatcaatcatgagcgccacgtacgatgaaacagttatccatacagttgagagactcgatttgctttggtttttgaagatggaagagatgttatacctggtattgctagtgagagatgcgatttattcaggggcaagagttaagggaggtaaaatagactatttatccaacggtggagcagcccacggcccaccgttatatgatttgtatctcgtcccagttgtggacttgtggtcactggtcagtggtggagcacgcagctggtggaggcgtggagcagctataccgacgcatcggtaggatggaccgatggagagtagaaaatcgtgatgaatcagagggtgagaaattcaaaattactaggtgaaaataatgtacgataacaataactaatgtataaaatagctagacaacataagaatatgttaaagtggtttacgataatttaaatttaaatagtatatagaataacgattcaaatgtaaaagtaaggtgatatgactttattagagaagaaaagtagggagacagtttgaaccataaattaattatctatgagctaaaaacaattgaggtgatatggcttaatgaaagaagaaaaggtatagataatttggaccatagattaattatttaagcattaaaaatagttgatatgatatggcttaatgagagaagagagaaatatcattaactaattgaggatgaactatataggtatataggatattattaaaataatgaagatatatattgaaatattttatgaattatgtgagatgatgatttaacatgcttgcattataaagctctaaaatttaaaaaattataaaattatatataatatagcatgtttgcatgatatttaaatgtaatgattgtcaatggatattgatgtggcatgttgttagtggatgatgatatgacatctttacatgttaagctttaagagttagtgggttataactttatagtaagagaggattgggtagtatattttttctctttaacaaagcaggagtattggttcgattaaatatatactatcaagagatttttctctactactattgtacaagatatactagcttatattcttaatattttttagtgatgtggactgcaaaagagtttgctatgcctcttccagagaatttggaaggtgttaagctgatttaatttaataattagagtaggcatttccttcaaaaaaaaaaaaggaggcatgcgttgaaagtttcatgtttagagaaatgaataacgcaaccgaacattcaattcatttttttttcatagagaatgtatcctattaccaacgaatgactgaaaattaattgcataagctctctgtacatgattgcaaataattatattcatttcaatcctgctggcgggtatgttattagtatcaccccagctgccgtacgttcaagagtcacaatctgaacatatataacatggcaattcagtagaattaattccttgctcgagtgactcgaggtacttaaataggcaaaatgtctgcattccttttccttaaaaaaggagtcaatagaagagctatggtctgtttctttcggcttgagattattataatctagattattgagttagattactataaactagattgttataatctgtagtagaataagcggttagttgtttctttcatagattattacagtctagattatttggtttgcaagtctaaagagagagtggggtggcatggtgggtaatttttcatccaataatctggaaaaagctcatctaaatgagcttatcagattataataagctgggctctagattataataaactattttaataagttgtctgtttctttcagcttactcccaataatctagattataataatcataagctgaaagaaacagcacctaagcacatcatgtagccaggggacgttcggtagtgctttccagttctgcagtagccacagcatcaaagaggccagttactgtaatgccgcggctgcagctaggagcctaggagcgagcttggcttgcataggctcaaactcggtacaagcttgagccaagcctttaaaactttcgagttttcagatagactcagttcgatcttgactatcgagcttgatttgtaagtagaaaaatatatattttaagaataatcttttaaaaaaaataatttctaatttatcatattaatttaagaggaaaaaataaaataaatatatgatgctaatacaaagtaatttgttgtatgggatgcatacaaataataaatttgattccttaatttattaaataacaacagaaatcatatattgttaggcattagaagctcaaacttggctagacaaagctcatgagctttgcaagaggcttgggctcggctaatctgaagctcaagctaagctcgaattgagtttaggacaagtcaagctagagtagcccatgagtctcatgttttttttttctttgacagccctagctgcaacacagccgcagcaagctctaacaaatcaagaagcaaggttgcagtgttcgtatgtgtgctagtcatcagagcataataaatacaccctccattttaggcactaccatcactaatgcaaatactaagaaaaaaattatcaccacctcgattgaatattctcgatgcaggtaaataatgtgattgcagggtttgatagtagagcatttaaaataaaaacgaatttacagaagaagaggtcatatttcatgtatgtatgcatgcactaaatatattatgagatatggagaaaaaatggttgcgccgtatattttatgatagagtgagtgtagttagggtgtgttcagaactgcaggtttctaatctctctttttccgcacataaattttacaaactattaagttgtgtgtttatccaaaaaccttttataggaaagttattttaaaaaatcattttaatctaattttatgttttttaaattaatatttaattaatcatgcgctaatgagttaggctattttacttgcgtggaagccaacgacctttttgccagttgtgtctaatcggtaaaataccagtgttgacatccaaatttggtagcagggataaaatataagtttggccacatttgaaatatggccaaatttatattacccgagccttttatatgggggtctgactagcggcatgaggctggtcggaccggtggcataggggcggtccgaccgcagttacttagcaggtccaactggtggcctctgagttcaattaagataattcatatgtttctttgtatgagcccaagaaatttctaaccttaataagacgcgaagaaggccttgtggatgcaaaaccaacctctttataaaggctatggctgattcgattctaaacaccctgacaacaaccctaacaacaatcgaattgttcttttaattctacttttcagcaatgttttctactttacctagttcattcatctttgccaatttgcaccgtaaatcgtatgccttcactgcgagagtgcaataccctttgtaggtttgttctgtaaaccttccgattcactcacaaaacgggtttttacccccatatcgatctaaatcgacctagaggctggtctaatctcaaaatcggctccactagctgatcgaatattttctaaacccattttgatcgagagatttctagatcgaggtggttggtgactctattaacaccacaaattttcagctgggtccgtggttgccgaaaagttgccaacatgatgagtacatcctccactattacccgctggcaaagacgcaaaagtcgagcggcgactgtgtgagcctctaaataatcccacatttcttagcttgggaggaggaagccaccttaaaagggagagccaccattcccctattgtactagtcttttagggagattgggtatttcccctattgggtgtgccaaagaactattggggttcaggcaaccttaatttgttgggcctcagccaaccctagctggaccggattgttatcacaacaaccacattattagaaggtataactttttttgtttgtctaagctatatagatccgaatccactagagaggagaccaaatttatcaatactgccgttggatttggaccaatctgaggcatccttctattcctacagatgactacagatgagatcatggcacctcaccctctcctaattgactcccatgatctggtaaatttggagggaaaacacttctgtttttaggtgttgcctccataaccaggattactcccgtcaacacaatcgaaaacatataaatcctcttctttcccaaacaacatatgtgagattcaaacctaagacttctcaacacatgcaaaccaatcttacctatagaccacatgttgatatatatgtcatcagatgttattcttttaactattcttgtccaaatatgaaactcaagatgacatgaaatgagaatgctttcaactacaaagttgcagatctcatcgagctctaccactttagtgtaaggtatgtctcatccaagatcagttgaaaatttcaaaaaatatttttgaaatagaacacatcacttataacacatattcagggatgaaaacaattttaaatgaaaatattttcaactaggttatagatctcaccaaaccctttgactttgatataggccatgtctccatttgagatcatttgaaaaattcgaaattacgtttttcaaaatagatatcaccacttataatgcatatttgggcatgtaaactatctcaaattcaaatgttgtcagcacttgcaaaattacatttttcgaaatagatgtcagcacttataatgcatattcgggcatgtaaactatctcaaattcaaatgttgtcagttttaaagttatagatctcatcgtgatctacaactttgatatagggtatgtttctatctgaggttgtttgaaatttcaaaaaattgaatttttttctcatctgtgacggttcgtaactacgttatccgtgaagggtggtaattaagatctgtcacggatgagtgctctcatatttgacgggtcatctcattacatccgtcacggatgacatgctatccgtgatggggcatggttgtgacacgttataggtcatccatgacgtgatagaattacgacccgacaaagatgaccttatatcagtgacgggtcatccctgatagtcatccgaaatgaggtcgcattagcccgacacagatgtttcgtcaaggatgcccggatctatactagtgtcacatcttatcctttaaatatgccatacaattagatagtgaagaacgtataactaacatattatgggttgatgcatagatgctaatagactatgctttatttggtgagtataggccttcaggagtttccgtaggatttaaatactttcgagaagttgtgattgtttttttgagttgctctgttgtatgatcaaactgcagagtccctcgaaaggttatttgaaaattttctagcattatataatcaaaatcacccaaaaatcattttttactaatcaggacctaaaattgtgaaaggctattgatcaggtttcttatgaacacaacacacagtttgtgcacttgcatataaatcacaatgcaataaaacatccaggctaatgcgattagatgtgttgtgtttgtgctatgctacaattattttgtatgcaattagatgctatgctatgctacctcttttctcatgtaaaatttattttccctcatctcgagtaaaacaattgtgcatagatgtgttgagttgaccttgggtaaagccctaaagctaaatatgtggaggtgagacctttgtgaattcaagcaagtttccagttcattctatgtatttagccataattaataatggacaatttgagaggaaaatatttctatggaaactaaaagtggctcttaaaacttgtgtggtatctgctcaaaggagtaatattaactaaagataatttagtgagaagaaattggaatgacaaaaagagatgttatcttttatgaagaataagatgatttatcatttattctttcagtgtcattttgctaaatttctttggaaatcactacatacttctttttgacaaagatcccatattacttctcatatatctggaaattagcttatggatattgattaaaaaaactaagaaacttattttaaatggagtatttgctatatattaggctggttttgatgaatcctcatctaaatcttatgtgataattgtgcttttgatcttattctgaagtctaactactaacttggcccctcttttccaattttgctcatttgatcctgcttttcaaaaactgacccacttctacctgcattgctaggagtgttattagaaaatgcatttagagaattaacaagaccaaaatgccccccggaaatatatgtcaaacctacatcagtttcatcacatactttagttaaattccatcgcatattttatggggactaagtgaaaaacctgggtcgaataaacaaaaaaaaagattaggatcaaatggcaagggtataaatggtattttccccttatataacaccgttagttatcttcacgaaatagggtcggacctgatctccatttttgaaaaagagggtcaattgagcaagctttaaaaaacagggccaaaataatagtttggcttaaaaaagggtaacaacgcaattgcccccaatgttatatgcaggcaatgtaccggcctcagttctagacataagttgaaagatgtgatgagtacaatgaactattggatgctacgtgccaaaatctagctagagtcaacggttatgcaaatatttgctaacttcgtgtggagatacaaatagacttgaataaacgtttacctcctttagtattggtgctatgagtgttgcatcgtcatttcctgggttttatatgtactctctgttgagtggaattatatggtggttgtagctttgcaaaagctataactcatttccattatcttaaaaaaatatatattcgaccaatttaccctgagatgtagcatcattttttaaaaaatgttactatctgaacttttgtacgtatgaatatgattttgtagtaacacacaatacatcttcaagattaagttgctgagacgacgtacattacaaaacatcaaaattgatgccgcagggacatacacccatacaaaaatacagttcttatatctgaaaagggcttctcaactttcttcagtgaaaagcaagcagggtgtacttgtctatttgggcaccaacccacatcatgcaatatgtgggggcgaaaggcactggtgtcacgcctcaatctaatgtgttgttatatatcaactaagacatgtaagtagcttaaacatcgtatatatatttatgctttattgcttccttctgttctcagctttcttttcctttccattaattccatctctgtcatgcttcgtccggacggtgtgccgtccatttctttttatttatgacagtctttgcattatttatgcattacccagatttttaggtgattttctggtggttatttttttgcttgtactgaaccggtttggagtgtttcaaatcataccagcattaagtggaacttagattggtcaagcaatagcagggagtgaatgtgaatcatcggacttccattgttgtgacctggttatagccgacattaccgtcggcaaattacctgaatgctgatggtaaaaagccaaaggtacacagtacactcttgatcacatatttcgatatcgccgatgcactactacacgattgatttttcctagacgctgcccctttagtttccatgcggttcgtaagtggaaccgcacggaaaaatatgggaccggcgtcgggttgttgcccgcacgggatttcccgtgcggtcctcttaaatgaactgcacggaaaaataagccgatttttccatacgggcctattaagagagccgcacgcaaaaataatcattcctcttttccctcctacccacttcaaaattttccctttttccacgcctcggtcccctccctctcctttattctctcacacattaagtgctctctctctcctattctctcctcatgcgtcacgcgcgcctctcctatcctctcctcactcctctctcctctcctcccgcggcgacagagacgacggcacgcgacgggtgtaggcgagggcggcggcccgtggcgacggcgacgacggcgcgtggcgggcgtaggcgacggcggctgcccgcggcgacggggacgatggcgcgcagcggcagcgcggcggccgtggaggcgcaggatacggtgggcggttgcgacgacgaggtggcgtgcgacggcggcggcgcctccaaccgatggaggcccccccccacgcggatccggtggcgtgacggtggcggcggccgccccccgcatggatccggcggcggtgcggccacccccctgcgtggatcctgcggcatctggccctggtggggtcggccgagtcccaataacttaaggttccccggaccgcaacagttcataggcacacccactcagggaaagggctaatctcacacccactcagggaaaggcccaatctccctaaaagactattcctacaggggaagggtggctctcccttttaaggactcccta

SEQ ID NO: 15928 - DNA, 691 bp, Oryza sativa
cattttcataatgaaatcttgatgatgaaaagatgtattatacaatttgttacctggtttgttccattggcgacgtcgatctcggtgagccagatggggagcttgagctgcgcgagcgtgtccagcgtggcgcgcatgaaggggatgtttggggtggcaccgaagtggctctcgagcccgacggcgagcttcaggccgccgttgccggggaaggaccgtatctggttcatcttggcgacgtacttgctggccatcgccgccatgtccaccggctgctccacggtgttgaactcgttcatgaacagcggcgtctcgccgtcgatcttccccacctggtggtagatcgccggatgcatgtattgcaaatatgttttatataaaagttttttaaaaataaaattaatttatttctattttttatatttaatactcaattaatcctgtgctaatgacttgcaccattctgcgtgcattggataagctcacccaatgaaattgatcgaagtctaaagtgggagataaatgacatgacaaggtgtcaaaataatatatttgatattaaatctctaataatatatgaataaataaaacacataatacattatagaataattaattcggtttttatctcaggtgcgtgaaaaagagaaaaaaaagaggaacgtggggcttggtgcatgaagtaggtaca

SEQ ID NO: 15929 - DNA, 7039 bp, Oryza sativa
ccatgagattcatagttgcattacttatagcttccttattcgtagacaaagcggattcggaattgtctttccttccaaggataacttgtatccatgcgcttcagattattagcctggagttcgccaccagcagtatagccaaccctaccctatcacgtcaatcccacaagcctcttatccattcccgttcgatcgtggcggggggagtaagtcaaaatagaaaaaactcacattgggtttagggataatcaggctcgaactgatgacttccaccacgtcaaggtgacactctaccgctgagttatatcccttccccgtcccctcgagaaagagaattaacgaatcctaaggcaaaggggcgagaaactcaaggccacccttcctccgggctttctttccacactattatggatagtcaaataatgggaaaaattggattcaattgtcaaccggtcctatcgaaaataggattgactatggattcgagccatagcacatggtttcataaaatctgtacgattttcccgatctaaatcgagcaggtttccatgaagaagatcttgttcagcatgttctattcgatactggtaggagaagaacccgactcggtattcttaaaaaaagaggggaagcagaaccaagtcaagatgatatgggtcgccccttcttcttgcgccaaagatcttaccatttccgaaggaactggggctacatttcttttcaatttccattcaagagtttctatctgtttccacgcccttttttgagacctcgaaacatgaaatggacaaattccttctcttaggaacacatacaagaaaaaggataatggtagccctcccattaactacttcattttcatttatgaatttcatagtaatagaaatccatgtctctaccgagacagaatttcgaacttgctatcctcttgcctaataggcaaagattgacctctgtagaaagactgattcattcggatcgatatgaggacccaactacgttgcattgccagaatccatgttccatatttgaagagggttgacctctgtgcttctctcatggtacaatcctcttcctgctgagccccctttctcctcggtccacagagaaaaaatggaggactggtgccgacagttcatcacggaagaaagaactcacagagccgggatcgctaactaatagaatagtactactaactaatactaatatatagaaatagatatctagaaatagaaacgaactaatatatagataatcgaaattgaaaagaactgtcttttctgtatactttccccgttctattgctaccgcgggtcttatgcaatcgatcggatcatatagatatcccttcaacacaacataggtcatcgaaaggatctcggacgactcaccaaagcacgaaagccagttagaaaatggattcctatttgaagagtgcctaaccgcatggataagctcacattaacccgtcaattttggatccaattcgggatttttcttgggaagtttcgggaagaaattggaatggaataatatagattcatacagaggaaaaggttctctattgatgcaaacgctgtacctagaggatagggatagaggaagagggaaaaatcgaaatgaaataaataaagaataaagcaaaaaaaaaaaagtcaaagatagaagagcccagattccaaatgaagaaatggaaactcgaaaaggatccttctgattctcaaagaatgaggggcaaggggattgataccgagaaagatttcttcttattataagacgtgatttgatccgcatatgtttggtaaaagaacaatcttctcctttaatcataaatggaaagtgttcaattagaacatgaaaacgtgactcaattggtcttagttagtcttcgggacggagtggaagaagggcggagactctcgaacgaggaaaaggatcccttcgaaagaattgaacgaggagccgtatgaggtgaaaatctcatgtacggttctgtagagggacaggaagggtgacttatctgtcgacttttccactatcaaccccaaaaaacccaactctgccttacgtaaagttgccagagtacgattaacctctggatttgaaatcactgcttatatacctggtattggccataatttacaagaacattctgtagtattagtaagaggaggaagggttaaggatttacccggtgtgagatatcgcattattcgaggagccctagatgctgtcgcagtaaagaatcgtcaacaagggcgttctagtgcgttgtagattcttatccaagacttgtatcatttgatgatgccatgtgaatcgctagaaacatgtgaagtgtatggctaacccaataacgaaagtttcgtaaggggactggagcaggctaccatgagacaaaagatcttctttctaaagagattcgattcggaactcttatatgtccaaggtcaatatggaaattctttcaggggttttcccttactttgtccgtgtcaacaaacaattcgaaatacctcgactttttcagaacaggtccgagtcaaatagcaatgattcgaagcacttctttttccattacactatttcggaaacctaaggacttgatggtatggatatggaaaatacaggatttccgatcctagcgggaaaaggagggaaacggatactcaattttaagtgagtaaactgaattccatactcgatctcatagatccctatagaattctgtggaaagccgtattcgatgaaagttgtatgtacggcttggagggagatttttcctatctttcgagatccaccctacaatatggggtcaaaaagccaaaaaaataagtgattcgtttttagcccttataaaaagaaaacggattcttgaacctctttcacgctcatgtcacgtcgaggtactgcagaaaaaagaactgcaaaatccgatccaatttttcgtaatcgattagttaacatggtggttaaccgtattatgaaagacggaaaaaaatcattggcttatcaaattctctatcgagccgtgaaaaagattcaacaaaagacagaaacaaatccactattggttttacgtcaagcaatacgtagagtaactcccaatataggagtaaaaacaagacgaaataaaaaaggatcgacgcggaaagttccgattgaaataggatctaaacaaggaagagcacttgccattcgttggttattagaagcatcccaaaagcgtccgggtcaaaatatggctttcaaattaagttccgaattagtagatgctgccaaagggggtgggggtgccatacgcaaaaaggaagcgactcatagaatggcagaggcaaatagagctcttgcacattttcgttaatccatgaacagaatctaggtatgtagacacatggatccatacatctcgatcggaaaagaatcaatagaaggagaatcggacgatatctttctcgaaacaaacaaaaaggaaaagaaagagaaaacagaaatcatgatcaactaagccctctcgggggcttgcttaagaataagaaagaggaatcttatggaaatagcatggaataaggtttgatcctattcatggggattccgtaaatatcccattccaaaaatcgaaacaatcgggacttttcggagattggatgcagttactaattcatgatctgacatgtacagaatgaaaacttcattctcgattctacgagaatttttatgaaagcgtttcatttgcttctcttccagggaagtttcattttcccagaatgtatcctaatttttggcctaattcttcttctgatgatcgatttaacctctgatcaaaaagatagaccttggttctatttcatctcttcaacaagtttagtaataagcataacggccctattgttccgatggagagaagaacctataattagcttttcgggaaatttccaaacgaacaatttcaacgaaatctttcaatttcttatttttttatgttcaactttatgtattcctctatccgtagagtacattgaatgtacagaaatggctataacagagtttctgttattcgtattaacagctactctagggggaatgtttttatgtggtgctaacgatttaataactatctttgtagctccagaatgtttcagtttatgttcctacctattgtctggatataccaagagagatctacggtctaatgaggctactatgaaatatttactcatgggtggggcaagctcttctattctggttcatggtttctcttggctatatggttcatctgggggggagatcgagcttcaagaaattgtgaacggtcttatcaatacacaaatgtataactccccaggaatttcaattgcgcttatatccatcactgtaggacttgggttcaagctttccccagccccttttcatcaatggactcctgacgtctacgaaggagtgtggttcgttcgacaaattcctacctctatatctatctctgaggtgtttgggttttgcaaaactccatagatatgcagaagagaaatgctatccccactccgaccaagacagaacttttaccaaaagtttattgtgatctttttgttcaaataacaattaaggtgaagcagggtcaggaacaacgaatctctttatgataaacagatccattttgcaagctcgttattacgggtagttcctacaaagaatcggactaatgacgtatacaatgcttgaattatcgacgtagatgctacatagtgggttctcatccttcagagactacgagtgtaataggagcatccgttgacaaaaggatcaccctaagatgatcatctcatggctattgggaacgaatcaaatcagatggttctatttctcaacctttctgacttgctcctacggaaccaaggtcgaaaggattgaaaaagtcagtcattcacaaccactgatgaaggattcctcgaaaagttaaggattagtagttctttttcgaaatcgatttcgaaaaagaatggattcggtcttatacatacgcgaggaaggtaatcaaaaaagaaagaagacaagttcttctttcttttatcacttaggagccgtgcgagatgaaagtctcatgcacggttttgcatgagagaaagaagcgaggaatcctcttttcgactctgactcccccactccagtcgttgcttttctttctgttacttcgaaagttgctgcttcagcttcagccacgcgaattctcgatattcctttttatttctcatcaaacgaatggcatcttcttctagaaatcctagctattcttagcatgatattggggaatctccttgctattactcaaacaagcatgaaacgtatgcttgcatattcgtccatagggcaaatcggatatgtaattattggaataattgttggagactcaaatgatggatatgcaagcatgataacttatatgcttttctatatctccatgaatctaggaacttttgcttgcattgtattatttggtctacgtactggaactgataacattcgagattatgcaggattatacacgaaagatccttttttggctctctttagccctatgtctcttatccctaggaggccttcctccactagcaggtttcttcggaaaactctatctattctggtgtggatggcaagcaggcctatatttcttggtttcaataggactccttacgagcgttctttctatctactattatctaaaaatagtcaagttattaatgactggacgaaaccaagaaataaccccttatgtgcgaaattatagaagatcccctttaagatcaaacaattccatcgaattgagtatgactgtatgtgtgatagcatctactataccaggaatatcaatgaaccccattcttgcaattgctcaggataccctcttttagctgctaggtctatttcttagttcaagatccctcttactaactggaataaaagaattagtagatctgttccgcccaaaatgggaatgggcgctagggtaatgaacttataatcatggaatcgactcgatcatcagattataagttcattccataccggaccagaccatgcacattcttattaagagaaggggtcattcgagcctatggaaataggatactctgtttacatagaaatccccacgtccttacattctatttaggattaggaataggtgtaatcagacctgcttttgacatatctatcctatccttatttgggtaccatatgcacctctttgggcttctattgaatcgagaaattggattgtacatctttttgattttgatacatataaggtgtcctacggataatgcaaatcgaagctatttgatgtctgactcaggcctatatgaccgatcgatcgaaatactccaagactccacctttgtcatatattccatatatcacattagatagatatcatattcatggaatacgattcactttcaagatatcacattagatagatatcatattcatggaatatgattcactttcaagatgccttgatggtgaaatggtagacacgcgagactcaaaatctcgtgctaaagagcgtggaggttcgagtcctcttcaaggcataatacggagaatgcgcattcaatgagcattccccgtagagtattccggaaatctgcgcctggcgctctcctctatcttctgagggccttaaccacttccctgagaaaaggagacagtaaaagccaaaatagactaaatatagcctgaacgatcctaaaaatccctcgaaggagataatataataaagaacccaaagcagacagtatcctactgcaagggtggtgttaagaatccaaaagaggttgctcataagagatagatgtatcccaacctctattgctctcgcgtaaagccttttttttacgcgacaggaaaaagtgactacgaattcccctttttgtttgcgaatccctgtttgtatcctttgagcgcacgtccataagtagcgatcaaggaaatcgatcaaacgatcccaataccgtgaaagagaaacttcccagatccaggg

SEQ ID NO: 15930 - DNA, 8939 bp, Oryza sativa
atatatatatatatatatatatatatatatatatatatatatatatatatataaagtgcctgtaatatcatgaatcgtcatatattcaaatggtacgatgtaccagttgtgaattaatgatgaagtatatattaattacaattcggtatccatcggctaataggttaagttgttattaatcccatgacagatcgagttgttgtatgcttgctttaatatttttatccaagattagtttagcccctccaagtacaaagtacagagcaacgatactaccctttaacaacggaaattatatagtagaaacataaaaactactaccataagataaaaatacacgtctgagattaatttgtccacatgaccatgagtaaaattaaagttttactaggggtaaagttttacatatggtgaggtggacaaatatcatatgttcatttttatcatatagccggtagtttatacgtttccagtacatattttcgtactttgtagtagggataattttttttagatcggtatgcaggcatgttaattcgagaggggtgtgacttatcaatcttcttccgttgctcatttgcgatctattaggttaattatataattgtttgagtttttttcatgcatgggaaactacggtaaatatcatcattttcctttttcttgataatatgccaaataaactttttcttatttataaacaaaattttccataatgtctatctcctaattattggaggtggactctgagggcagatataccaacacatattcaagccctacataggaccaactggacgtcgttttggcttagacagtacaacacaaatcttggaggaattatcttttagatcatgacaggtttcaacaatatcaaagtgtctcacggatttggaccctactagcttgcagggtaaaataagactaaatttcatcatataggtagacaagacaagaactggtgacttaattattcggttagccaaacgtgtcacaactaacggcaaagaagttcaggcggctgttcatgttattgtttactactaacggcaaagaagttcagagtagtataattgctcgtagcacacagccatacaaacactaatctacccatgctattctggctgctatctgctctgcatcctcctgctttatccattaggtatttatattattgttgttaggcgtggtaattgattactagttagtgtgaaagtggatgaagtacggtgctcctacctgtcatgatggggtgccagatttactattagagatatttagaggagcatatatataagtgtgttaaaattgaatcattatacgaaataggatgtgtgcgtgcagtttgtcatgtaaaaatttacttgtagtcatagaacagtagaagtatttctaaactgtacatcgcgataattaagttgcatggagtacgtagcatgttcatctctaaaaagcttaaattatgcttaagctcgcagttaacagataaatcaattgtactaattcgatatatcatatatatacaccttacatgagtgtactgttcaggtactaaggtgcgcaagaagtggaggattcgaatttatttcaaggtaaacggatcagcggtccacttaaagtcttttattgaactaagccaatagatggatggaatggtcagttatgtacatcttgtcgaaacaaaatactccctccgtatatgaaaaaaacgtcgttctagccataacctcgtttgcgatttaaacgacgttctgaaccgcagcaggctatgtggacggaattacccttgtctgttcgatagccgctcccgcaattaatccgcagcacgcccgcgctcgcctcgtttaattccttaagcgtcgcatgcaggcatgcagcacgccgctcaacctcgccgctcacgctcgccgccgccgcttgcgtcgcgctcgccggccctgctcttgtcgctctcgccgccgccgccgccgccgctttcgtcgcgctcgccggccgcactctcgtcacgctcgccgccgctgctctcgtcgcactcgccaccgccgccgcttgcgtcgtgctcgccggccccgctctcgtcgcttacgtcgcgctcaccggccgtgctctctcacgctcgacaccgccgccgccgctcgcattgtgctcaagatgcttgacgagaagcgcgaacgtgagctcactcccaggaaggatgatgccaaagaaatggtaagataacacaacttaataatcgcattacaaggatgtctctattaattgagtgcggaagctaactagcttcattctaaatgttcgatgcagcaagagtagccttggcttcatctaggaaagatggttgacaaactgatctgcaacaactcttgtatctttcttgcctagtttcctattcttgcttctagccaacaaagcttgataaacttgttttctcacttcttcggtcatgtctttccttccttcgatggtttacttcaacgggagccacgacatgttctagcaaaaggaagaaaatcaagttcattgatagtacaaataaccatggcatgttctagcaaaatctaattgtatcaaaaagcaagttggcttaccagcaaggtgttgtacataatcgaaatcgactgcaccaaattcatttagtggcaagttcaaatcaaaaccagttaaaaaaaaaggaaaacaatgatatgagaaacgatagagaagaagagatagtacagttgccgtacaaacatgcacgagagaagaaaaatcctgtcaaacagagaagaaaagtaccattgccgtgctccaacggaggctcgttcagatcaaaggcaaactcgccatcgccatcttcggccatgtgtactgcaatagtgagagaaagctagctagaagcctagaactagaagatgagatggctcagtactccaaacgtgaaagcaagttagcgtatatacgggcaagcagtaacccaagcgtcggcattctcagcacgcgcgcgcgaaaaacttaccacggcataggcgcgcgaatagcggtaacgagcgccaggcaaaaaaatttaagcatcacgcgcggcagtgaacccaaactaaaaaagcaaaacaaaaaacgcgcctaaacgccacctgcatgagcgccatgcagtcaaccaagtatccaagcccgcctaaatcagtgccatgcaaaaccaagcaaccagctcgccaggattcgaacctgggtcctgcggaatccagcctcggcgcactagccacttgagtaaagtgtttttctcatatggaaggctacgcgcaaccgtatttaataggggtagacagggaaaaatacctataattaatcacttcttggtatgctaaatgctgtcctaaacgtcattttttactagtatggagggagtatggttgtgaacttgtgattcctcttaacatcagtgagggcctgcatatttaaacaaaatatggttccgaactggggtagtgcagatcacatttagcggtaaaactttcggaatattagttaattggttcactgacactatactagtaatatttttgacaaactttggagatgtttggtagcctaatacccaaaaaagcgtgggcaactggggcatgtgccacagttgattttttcagaacaacaaaaatataatccattaaaacagtcgctaacgctgtacattttaattattagtgaaaacgaaatatacaatattgtatactgacattaatgttattatcccaattaacaaaacacgagaccacattttatactgacacatgtggcctgtagtaagccgagcagaccgagcaaagcgcccccacgtaagccgattcgcgacgagttcatcaccgcgcctcggcacacgtgcccccacaccaattaaaagctgcgcacgtcggccatcgtcgccgtcgaccaccaccgaaccaaaccaaacctcgcgccatcgatcacctccaccttccattaactcagccgccccccaccacgcctcgctcgatcgctcgccgccgccgccgacgacgaccttgctcgcttctgccggcggcggaggtagttgttgagatggggaactgccaggcggccgacgcggcggccgtcgttatacagcacccgtcgtcgtcgtcgtcgtcgtcgtcgtcgtccgggaacggaggaggcggcggcggcggccgcgtcgagcgcgcgtatggcgcggtctccgcggccgccgtgatggccgccaaccccggccactacgtcgccgaggtcgttcgtcccgttgccaccgcgccggcggcgacggcggcgacggcgtcggcgcctgcggcgaggcggcggctgaagctgctccggcccgacgacacgctagtgctcggcggcgtctaccgcctcgtcaccttcgaaggtgcgtctacactacagcctcttcttgcatgcgtctcccgccgccggcgagcttgatactcacacggatgacggatcaatggcgatgatcatctgcagatgtgctgaagcagttcgtgtcgaagcggaacgccacgatgagccgcgccacgatcgccaccgctgccgaggacgacgatggtcaccggcgacagggtcaccgcggcggcgaggcggcagcggcggcgccagcgaaggtacgaccatatccaagcattcttacgtgtagagatgagatgagatgagatgacgcgtatggtgtacgagttcttggtcagccattaatggcgattggtgcgtcacaaggaacaaccgagacgaacgctataattagcgcgacttgttgggagctgtacgagcattggttgcgagcttggtgacgtgagttaattaattaattagcgaaacatttccatcgttttttttaatttcccttttgaggtagacgacatgtcggcatatgcatatcatccttcgtttttaggtaggactgtagcgtcccgaagtactcaaattaacctactacagcgaacactgcacatttgaaagtcaatatcagagcttgatatatgtgtatgaaaaataacagccaaaataaattgcatcttgttatatcaggaagaccgtaaagtcaaaatgtaaaattaaaaagacaacagatgaataattttctacaagttttattgtcgtgatatagtatgaagaatacataataaacaaattctaggttgatacatatatgctaagaatataaagctttttagtatcagacacacttattgaaaaatctgttttggaatataagaatttttttagtgttggacatagtcattaagaaagtacgtgatcaacctataacatgttttttttttaatttcaattatataaaagacccatactattatacacgtactccacagtaaacaatcgtttaggctgagttcgttttgaggagatgggaacaaatctcctgcgcacggaaaacggagcgatccatcagtatgtgattaattaaatattagctatctttttgtaaaaatggatcaatatgatttttttaagcaacattcatatagaaattattttgtaaaaaaaacgcaccatttagtagtttgaaaagcgtgcgtggagaacacggcggggaggagttgggaacatagccactatattattgcatacaccacttattttaattattagttcagtttatttcttgaaatatttaatttattcctataattaaatactccctctgtcctataatataagggattttgagtttttgcttgcaaagtttggccactcgtcttattcaaagttttttgaaattattatttattttatttgtgacttactttattatctacagtattttaagcacaactttttattttttatatttgtaaaaaaaattgaataatacgagtggttaaacgttataagaaaaaaaaactcaaaatcccttatattgtgggacggagggagtagataatatgtaatccgctcaagaagctatatcaaactcagccgctttatatgcctccaaaatcaacattagtttgttttacatgttgagtggcccaacatacatcttacttgtactttcatcattgttttatgtattaaaaaacccctaatagatgatggttgggaacctacataggtagcaaattttctaaccggtgccccgctatgcggcactgataacaagcatcatgcacaatatatcatttatcgtaagacatatatggggtagcaaatcgagcatcatacggcaaatctcgacttcttttcaatagatagagaagcaccaaaattaagtagtaaatgaaaatcaaaaacgaatcaaccacatcatacgaatgaactgcagacacacgtcactaacccaaagtcaaatgttaaaccattaaattattactactagctagctcagtactccacatgacacacactaacaatcctactcaatgtatacacaggtggcggcccagtctcgtcaagagaatccatccagcccaagcccgaccgatgaggcccggcctgagcctgaacccgagcccgagcccgatctcgtagcgacggccatggcgctcggcgggaggatgagcctctcccggcacgggcagtggaggccggcgctgccgagcatcgccgaagggagcgtcctgtgcttttaagggagggagatggctgaccaagtgaccatatgttcaaaatatgttacactctgatctgcagagcttgctcactgcagccgtgggttatattagctgtcgtgttatacgagagtctctgcatatatttttctgccctgttctgtttgaatttgaatcggagtttgtcagtttgaattagtcatggcatacgtaggagataattgtttttttgtgacggtacgtttaacacacatgtatggacctacttcttgacttgtaattttattttattttgtcgtcacccatcgatctgtgcctaatctcgtcgcagaatatgtagctcaatgatgggctgatctgtaatttatgggtatgttcgataggctattgctgcagcattctaggctgtgctgcaagttttgccttgggatagcaacggggcgggtttggggctgggttggcttggaacagccccgtccccgacccccgaactctccacccgcccccgcccccgcccccgcccctgcccccagcctctctaggcctcacaacccgaccggggctccgcattgagtaacaactccatccagtcgtctgtgcaccgctgccatctctctgcacgccgtcgtcgccgtgcctgtgcgcctatgtgcagccgccgcgcctggggcccaccgtcgtgcctttgcactgcgccgtgcgttgcccgtgcaccgtcccgcatgctgccgccggaggagaggggcatgcgaccggagtccagaggggaaaggaggggaggggactgtgaagagggcaaccagagggagaggggactggggagagcggtgagtcggcgagatccgaacttcagattcgaagtctgcgcgtgagcgccgagcgcgtatgcggctgtgtacggcgcgcctgtgctgtgcggcggcgtggtgggtggtgggaggggaggtctggttggggtaggttaggtttttttttccttaaatatgttgattctagtgggcttcttgggcctgtattcctgtaatgggctacattttaagagttaatatacctctccagaggcccacggggtcacccacaggtggaatgttctccccatcccctcacccgcaaaatgcggggcccctgccccgatggacccgcggggcagaaatgtcacccgcccccgcttccgtaggggtgggtcctcgcagggaacccgccctgtgaagaaaattgccatccctggtttagccattcggcttcaggaaacagctgctagctactggatggctgtatagtaactcctatagcaaccggagggagaggggactggggagagcggtgagtcggcgagatccgaacttcagattcgaagtctgcgcgtgagcgccgagcgcgtatgcggctgtgtacggcgcgcctgtgctgtgcggcggcgtggtgggtggtgggaggggaggtctggttggggtaggttaggtttttttttccttaaatatgttgattctagtgggcttcttgggcctgtattcctgtaatgggctacattttaagagttaatatacctctccagaggcccacggggtcacccacgggtggaatgttctccccatcccctcacccgcaaaatgcggggcccctgccccgatggacccgcggggcagaaatgtcacccgcccccgcctccgtaggggtgggtcctcgcagggaacccgccctgtgaagaaaattgccatccctggtttagccattcggcttcaggaaacagctgctagctactggatggctgtatagtaactcctatagtggctggctagctggctacagcgtagccgtaaggctgctgcagctagatctttagaacaaagggttatggattttctacatctagttactaagccatccatcatttgcacgtgacttaaatagttacagaaaaaattaaaaatttaataacattaattgagatgatccataactagagaaacaaaaataataaaatcgggtaaatagtacttgtaaagttgctacccactaatactcctaaaacacaacctgtaaatatgccacgtcatcacgtactagcaactattactctaaagcattacatgattaatgctgatcacaattagaaccaactgtaactttcttactcctttccatcccacccactgaggcatgcacatgttttaaggtttaagtccttaaatatttaaccaataaatagtgtggagattatgggtatcccatacccacacggcatggttatccgactagtcataggggatagcttatatctatggaatatgtaacagatcatgacttggatattacgtttccttttatattatggagcggcctaaagtcctgatttgataatattgt

SEQ ID NO: 15931 - DNA, 22356 bp, Oryza sativa
  unsure (1)..(22356): unsure at all n locations
ggattcaaatccccaaacaggagtaaggtattacctctcattgagagggcctgaacctgtctaaatccttgtctctgcatccatccacttttaggtctcgtgcactaccccttttattattgccgaattcatgtttcgacagttggcgcgctaggtaggggtgcgtcgagtttcccgtcgaaaagtgtgatggaatcaatttctccggtatcatatttgttcaagcagcctagattctaccgctgctggcatcatcttctgatcaaatcaatctacgaagagatattgggtttgtcgttccaatttaactctcaatagattaatttttaattatagattgatctacgtactcgggtattatttttgttaccagtgtcgtcgtcgttgccgagcaacaatatcagcctcctcccagtgcaaatccgagcccacacagtgcgagttcggatctacgcctacaccgggaaccactcggcgaccacgtgacatgctaaagctcgtaggcctggatcggttgctgccttgctgctacctgcaactcagtacacaggagatttggccatgctgcatgccgagcgagaaagcacatgcctgcatgttgccttttgcatgtcacctgatgattgttctcgccgggattcgtgccgtatattggcctgagtgcacatctcctgaccgtttcataattttccatatttagattgatttctaatctcaaattaatctctcgttgtttttttttgttgttgttcgcatataattacgcggcactattgaggcgattaatgctggtcatggactcgaggcgtctcagctttccggtcgatcagccgcgagtccattccgccggcttgtcgtcgccaccgccattgctgatagcaacaacgacttcaccgccggcttgcctccgtcgccgccgattggtgtctccgcctacacggctagcctgttatgccgccgtcgttgggcgtctacggcttcaccgccggctcgcttccgtcgccgccgactggtgtcaccgcctgcacgggtggcctattatgccgctgttgttgggcgtctacaacttcattgccggcctgcctccgtcgccgccgactagtgtcctcgcctatatggttggttggtcacaccaccgtttatgggcgtccgcgtcttcaccgaccgactggccttcgccgccgccgactggtgtctctgcctacatggctagcctattatgccgccgttggtgggcatcttcgctttcaccgtcgaccgccttcgtcgccgccgactagtgtcttcattgttattgatggacgactttcttcccacattggccacctctgccatcaccaaggggaatattacaaagctaagtcatcattaattttctttatatgatattttcctttccttctgcctcactacatcaactgtttcgccgttgactagtgagtcgggggctacagatgttatgtaatatttttaaacaattttcataatatctatcttgattgcttgtgaaataatccgagtaacaataaagttcctatcgagttatggagttctatcttcctatgctttccgtttggtttgccgatggatagttgtttttgggccgattcctagcacccgggggctcgttggatggaccgagtaacgcaaggtgctaagtattattcggaataaatcaaaagcatagagataagataaatttattttcttctcttaacaattgcaaaagtactcgagtagtaaattcagattcgtgaaacttttgttccattattgacgaactcatgtcactcatatgcatgtttgggaagtgcctaggctgactcccggtgcttgggggcaatgactagtcggacagagcgtttaaacgtaatgagtcatctgctcggggaaatcaaaattgacaagagaagaaaaacatattcacaaacgttttaaaatgtttgaattttcctcgagtattatatttatatcagatactactcatcctatatgtttgttctgtaggatccagatcctgataggcacaaaagggattcatggctttaagcttatctcttacgctctaggaatggatcagtcagaacatcaccaccggcttgccgtcgtcgccgccgactggtgtttccgcctgcacggctggcctgtcatgccgccattgttgggcgtctacgtcttcaccgaccggcttgccctcgtccgccgccgactggtgtttccgcctgcacgactggcctattatgccgcctttgttgggcgtctacctcttcaccgactggccgcctcgtccgccgccaactggtgtttccgcctgcacggctggcctattatgacgccaactgatgctaccttcttcacggccggctacgtcgccgtcaccgctaataggcgtcatcatcttcaacgcaagctgtctacgtctgctgccgactagtttattcacttccatggctacatgattctaccagtgttgattggccttatcttgttcaccgccggtcatctcgtctgctgttgactagtgccctcgcctctatgtccggtttataccactaccactactgatggacatcatcgtcttccgtcgccgactggtgcttttatcttcacaactgcgcgtcttcaccaccggtttgcttctgttgccgccgactcgtgttcacttcatcacagctatgcaactttgtcaccatggtgaagcgacttcatctatattatcttcggcaccggcaaacctaattgccgctacttcgcaagttttgctacttcaccaaccacgacgtctacaagagcttcgacatctcggcatgcacttccatattcgatgtcgtgttattctactacaacaagtggtgttccaatcttcaatatttctactcggacatcttcaaacgtatcttcactcaactgatggctactcgatgacatgaagctacagttctcgactctatgttcagttgtttctcaactaaccaaagagtcgggggctacacaaataccagactcaaaatttgacaagctttatgtcaagacaaagcaatcaatcagccaatgagttctatagaatctacctcgggagtcatcagtttcgtcttcgcttcagagcagacgttctacttcagcaacatcaattatctttataaatcaagtttgatggattattgtcactgacatcatcatcagcacatctacttcatcggtcctgatgtctccgccgttgctaatgggtgactacgtctttgcctccggttgcttccgacattgccgacttgttatttcgccttcacggttgatctattattgccgatgagcgtcttcgtcattatcatcggctgctacaccgctattgactggattaccgacatcgtcatcttcatcatcttcatcaacatcctgtcaagcctcttcaacatagcccactctactgctattgatgggcaacttcgtcatcatatttaatcatctctattgccgctaatcatcattatcgtcggatgcgtttgccatcgccgactattttcttcatcttcactgttagttgatctgactgctgtcgactggtttcttcgcttccatgccgattgcatcagctatcactgatggacaatttcaactactccaaaaggataagctatatgctcaggggcttacgagctcaagcacaaggatcatacctttaagccggattgtgttctagatacaggcaacatgcactcgtagtcctgagattattttctatgttcgaagactggaccaatcattattccccgtaagcccgtaagggctatcaaccgaatacttgcgccagtcgggattcaatttttatatctattttggagtatcctataagggataatcactcagatcagaagctattcatatgagctatacttggtctatatcacccggaagatttattattcgggagcatgttacatgcgtcatcctttaaagggtgtcgaaggcatattttttggcctaagcctaatatgtctgcagcctatattttcaggtgtggcctgtcacgttcttttagggacttaggcactttttgcttaggccaaaatgcacgtgatcaagtgcccaataccttaaaatccttttataccgcagttactcaactttttaggagttggtacaatgcatcttaaaaggtgtcaaacagtaaagctttatatagctgtcccgctgacttttttatatagtcatggcgctgtttgggtttatcaagcaattgattgaatacaataccattgctttttgcaatgtaagtgtacacttttattgaccaatattatggtttaggctgattatatactgtggtcattttccaggcggttggtaaatcctttatgagtttatttactcggatgttacaccacatatgccatatattttcaggtgtggtgaaaccatgtgtcttttagggacttaagcacatctgttaaagtagtgtgcgcatggcgtatgcccaatactttaaaaaattctttattcacgtcatacaaggttctttatagctatttttgctatgtgaatttttaatgatgtagtcaactttatgttgtacacatcatgttttacaaagcagtcggtatatcacttggattatattattcggggattcacaatgcacatgctatatattaatatcaagtcgcttggttgactacaattatcgaaaccactttgttggttggattatttattccttaactgtatgcttggtttgttcaattaaccacattgtcgggggcgacacctattaggtgcatctggtcgatgcacctgactttatttttcagccctccacaatcttcagatttggtaaaagtactcgggagaccatggcaaagatgattgaagcactcggctttggagtaatctaattcgagagaagattatcttttcgactgtgaaggtctcaggggctactgtggagattatggataccccatacccacacggcaaggttatccgactagtcataggggatagcttatatctatggaatatgtaacagatcatgacttgggtattacgtttccttttatattatggagcggcctaaagtcctgatttgataatattgtaaaatagatttaggaaaccgataccgtcttggttaaggtttctatcttgtaatcctgccccccatcctatataaggtgggcaggaggccctctagggggcatgagcacaactagatcgtcagatctatactacactcggcggattcaaatccccaaacaggaatagggtattatctctcattgagagggcctgaacctgtctaaatccttgtctctgcatccatccacttttaggtctcgtgcgctaccccttttattattgccgaatttatgtttcgacaaatagtttattataaattggattttatttcatgaaaataatatcatccgattctcatttaaatttactttcatatgattttcattttgttgctataaacattgtagtatataaaaaattataagtcaaagaaagtcttaaagatcgtgccaagtttgaccgcgtcttagtgagtgggatgaagggagtaataaattagtaaataataattagtcaacttgaaaattttaaatttatagttgaaagtttcaaaatttgtaattgaaagttttgaattttagaattgaaagtttcaaaatttgagttgaaggtacaaaaatctatccacaaataacttcaaaataaaaattttaattaacatcaaattcgcaaaatggaaaaaatattttgaataaatagttgcctactaattggcccacaaagagctggcccaagaaagcaacaacgtgctgctgtgcctgtgctagcccacacgcacgcaatgttgacatagtgcgcggaataagtctattttgcctctctcatctattacccctgattgaagcgcatccttcaactacaaaatggctcccccatctttgaaaaccggtgcaaatcgactattaatttcagtggtttgggaagtggtttatgtaggcgaggcccacatatcaatgaggtatgacaaaagatatgtggttgcccttttatgtcaattccttttcttcttccccacctctccgtctttcttgtctctccttgaaagcagcagctgaggtgagaaaacgactacgtggaccatctcacgaagttctcaagcgctgagaagaccaccggaggcagcacagcaagaacccgtcgatagcggcacagccgtcggaatccagaaggagcgtatccctcgccactgcactagaagttggagcacctctattgccctatcctcccctccttctcatccccgctcctctcctcctcaaacaagacccatcctcatccatcttctcatgcctcaccaccgccagcctcgccacttcctagggatgagcccgtgcgttgtgctggcttaatatttagttttcgacgtttgtatcggagggtgccgtaccaatatttctgaaaatttgaaaaaattttggtcaaatttaaataaaatattacaaaattcacaaaaaagaaaaaaataaaaaaattgattgaaataatatcatatcgggaggggggggtctgatagaactgaaatttcattatgaaattttgaatcctagcgttgcctggagaggggtcaccgctcgctagagggatctagcctcatgcaccgtgccgtgccgacttgccaatatagttggccatgtgggccgcccggcacggcacggcccaggcccggccgtgcctgggccaaggcttgtcgggccggcacggcccgaccgacgcaccgggccgtgccgtgccagcccacgtgccgcactcacggcccaagcacggcccaacacgcctcgggccgtgccgggccggcccgaaggcacgatgggccgtcgtgcttttcctcagaataagtctaaatttcctccctcctattgggctgtgacatatgtacagctacaaaaagtctattttacctccctcttctttgggctgggtatataaatagctaaaataagtctatttaaggtccctattctttagacagttacatttatatgtctatttttagtccccatactttatgtaccgggcctggcctgccggcccatcgtgccgggccggcccgaccgtgccgggccagcccagcgtgccggtggggaggcccaggcacggcccgacggtcgggccgggccagcacgggcccgacccaagtcgggccgtgccgtgcttgggccgggccaaaaaggcgtgccgtgggccgggccttcgggcctcgggccttatggccaactatacttgccaaccaccactgacttgtccagctcgtccgcctacatgctgcctccaccagtctgctcccacgcggctccactttcgccgctgtctgtggtgccgatgcgcttggccaaaacgacaccgcccgagtagctgcagctccccacttgaaaccagcctgagcgaggtacctagcatcattggagaggcagctatggagctcgattaggccatccgggataagaccaccatggtcgccgtcaaccaccacgacaacacgaaaaacacaacacatccgaacaaccatcatctagctagctatatggagcttgaggaggccgtgcaggatgatacccatggcgatgcacattctcggcagcctcgtcacactagcaccacgtgacattaatggcgacaacctgatcatctcctagctctcactccacgtgacgctggcactcctcaactcggggggaggggggggggcggactccacacggccatgatactccctgttcttgtcggtgatatccccgcccactgcgacgagaggaccccgaggaggatctgtggtcattgtcagtggacgtgcttttcgacaacaccggaggcagagggagcagcttcggagggaatgcgacattaacgtcgctgccacattatttggaggacttcacggggagccggaagcctctgtcgaccctgaaggggttcggcatggcctcactcgcgtgcagcacgccgcactcacgcgccacgcaccgcctctgctagcgccggtgctagtgcatcctctgcagcggagaagaacacgagcagtaagagggagaggtaggaaatgagaaaagatactgacatgtaggacccacaatatatgttttgtcatatctgactgatatgtgtgcggcgcttacagaaaccgcatcccaaaccattatagaaatcgataaatcgatttgcaccggttttcaaagatgaggaaggcattatagcttgtaaggttgatggatgtgattcaatcaacaagagagaaggggcgtaaaattagacttattcctagatgcggtaactagtctgctgctttacaagtgtatccgaaatggggaatccttcagtttatgatgggcctaggaggccataacctagaaaaaaaaatcctcccaataggccatgagcaatcaagttcacccgccatccactcgtgtagtccacgccagccgtccgattgatccgtcaggacctaccattcccctacatgagcccattcataatagcccataatggttctaaatctgtagatgaacaaaactaacaaaaaaaaaagaaaaatagcaaacaacatttttcaatacattatatcttacatgtagcattttacatgcagtattctggacaattatgattatccaccctagcaaatttttgtaatgccaaagtgtcaattctagaaatcgggcctatggactttttgagcatgtccctcttcttctctctcaacgaccaacaccgtgcttaccacctgagtgtgttatttttttttagtgttggctggagcttaatcactattaccgaagggaacatctttaaattttttagaagtttccctttaatttgacactagtcaaattaattagatgcgactgaggtgtcctaattgatctcattcgaaaaacataataattgctatgagtttgccaaatcctccgtcaaatgggatgggtctttccgtgtccgcccgggcatgcatgtgcagttgacaacccaggaactacatgacccgtttggctgtgcgcgacccgtctagtcacaccgtgcttgggctgctaaatggcccagcgtgctaacacgagaagtgcatgtagcaagctagcacggcatggcccaggaatagcacaacacggcctggcccatgcaacacgatgacgaccgatgactggcgaacaaccccattcatgagcaaaaccattaagcacgtcggtcattgggggctcactagcttgagacaaaggaagtaggaagtgaagtgccacggtggtgcttagcgacgaggaagaggaatgtgctatcaggggcagaggacctcgctagagcttcgtcggagtttgtgcaacaggatgcaacaaactttgtttgtatttctttcttggtgtttatcatatttgggctaatcggcctccacatagcccacgtaccttaatcatgccaagccaacacaaaatgacccgacatattactaggccgtgcctaggctccgaccttagcatatgggccgatacgacctggcctgttcggtgactcctgcctaattggaccgtgcccaaatgtaactattatttatccaccatctcaaccttatctctactattataaaaattgaagatgtttttgccggtattttggtacgtcatccgtgtttgagttggttttatgttcgctcacttttgaaaatacagattcatgtatgagtccgattttaagttcgtttgcttttagaaaaaaacaaaatgagtcatataagaaatctctttaagaaaactcgcatactaacttgagataaaagtcggactcctgattgcagctcatgattttctaagaaaaatatgtccaagcgaaattccacggtgaattttatcctagctaaaccgtacaacaataataagattataataatcttcacccgttgcaatgtacgggcatttttttctagtgtataaaaaagataaaacaaaaatccaccgttccgaagatccaaccctaggagctccatttggaggatgagattatgactaatgaacattatcctgctttaaaaaaatacattatttccattttccggatttacaccctttgggtagggtggggatgggatgtgcaatcctggtggatctaatgctaggcgaaattacaaaactatcatcggcattttgaggtaggtatggtttggcctcagtcgtgcgtgagttatccgtcagtttgcccaccgcctccgcctccgccgatccccatccaaccgcgacagcgagcgagcaccgagcaggttgccgtcgttcgtcctgctccatccgcccgcatccatcctggtgagcacatcctctgccaccgccgcctacgccgatccctgtaacaccccgctcgccggcgtaagagatttggccgccgcgagccgccacccgccggatgtgtgaacacgcgagggaattgggggtagttcgtctcttttcttacttttgataatcgatgaggttacagccgtgttccagacataatttaaacccctcagcacgacccaccggtcaggcctaagcgcgcgcgcacacacacttattacataaatacgctttcttcacaggaagacgccttttcctcaatccgtcttccctgtatcgttgctgtgtaatgcctgcatcttcaggtgccacacccaccggtgtgacactgccgcccccatgagaaacaggatgtccccaaactgttgctaacggaaaatgagctcgcagcacagaatagtcctcccaagtagcacactctggtggcaaaacacccaaacgaacaagaacttgtgttagagccgcattccctttcttgaccaaacgacgatccaatatctcagtgggttctagagcagaaatatccaactggacagttgtcggcaactcagagaaaactggaacatgtgaaggaacaaaatgcttcagttgggagacatgaaagacagggtgaacctgactatccacaggcagtttgaggcgataagccacagaacccactttacttagaatttcaaaagggccaaaatacttgaatgccaatttaggatatggacgcgatgccactgatttctaaacgtgtggttgcagtttgagaaacactgaatcacccactgcaaactcacgaaaagaacgcttctcatcagcatattgtttcatgcggttatgtgccttagctaactgatgctgtagcatttaagagaaaagttgtctgtcctccagcaaagactgaacgccagtatcatccataggtgcagcatcaggaagcatgtcaggaaggaatgcataccttggatccatgccaaatagagctttataaggtgtgcaattcaaagatgaatggtaagttgtattataccaatactgggccaaaggaagccaagagcaccacttagttggagaaacagaagtagcacaacgaaggtacatctcgaggcactggtttactcgttctgtttggccgtccgtttggggatgataagttgtactgatgagtaaaggaaccttcattttggcgaacaacactttccaaaactggcttgtaaaaatggcaacgcggtcagaaaccattgtcttaggaagttcatagatagaagctactctgtccagaaaaactgaggccacatgttgagcagtataagggtgttttaagggaataaagtgtgcaaacttggtaaaacggtcaaccaccaccaaaatcacattcttactgtcagataatggtaagccgtcaatgaaatctaaagagatatcctgccacacaccttgaggtacaggcaaaggttgaagtagcccaggtgatttacataattcatgtttagcttgttgacatatgagacactattgcacaaattcctggactgagttgcgcaaattagaccaaacaaacaatttatgaattctttgaaatgtggcttgcacaccagaatgtcccccaattgctgaacaatgaaaggcagcaatgattttagtttgcaaggctgaattttcaccaatccaaactcgccctttatgtttaatcaaaccccccactaactcataaccttgatcattaggagaaataacagccagctcctgcagcaacttctgagcctgcatatcaacggcataagaattgactatctcctgtatccacggtggctgaaccaaagatacacttgaacaagcaaagaattgaccaactcttgaaagtgcatctgctgatttattgtccacacccttcttatactgaaagtgatactgagtccaattaacttagtcattgctttcttctgcatctctgaatccaggacatgagtatcaagatgacccagaaatttgtgatctgtcttaataacaaatgggcctcgcagtaaataaggtcgccacctgtctactgccatcataatagccataaactccttttcataaatagaaagtttttgattagcagtacccaaagccttgctataatatgcaatgggatgncccctcctgagacaaaacatccccaatgccagtgtcaaatgtatcagtctcaatgacaaaaggtttactaaaatcaggcagtgacaaaactggggtagtgatcatagcttgtttcaaagtctcaaaagcctgttgagtgacagaactccactggaatggtaaattcttcttcaacaattcaatcaagggcttagccaacaaaccataatacttgacaaattttctataatacccagtgaggccaaggaatcctctcaaatcatccactaaactagggacaggccaattttgcatcaccaaagttttagcagggtcagtagctactctagttttagaaataatatgtcccaaatactccaactgctgcaaagcaaaagaacacttactgggtttggcaaacaatttatgttgctgcaacaatgtaaataccaattccaaatgttcagatgatcctctagagaatggctataaatgagaatgtcatccataaagactagaacaaattttctcaaataaggaccaaagatagaattcatgaggcactgaaaagtggcaggtgcattagtcaatacaaatggcatgactttaaattggaattggccatggtgggttttaaaagctgtctttggttcatcacactcttgcattctaatctggtgataaccacttcttaaatctaatttagagaaatattgtgcccctgcaagttcatccagcaactcatcaataattgggaggggaaatttgttcttcatagtaatagaattcaacttcctatagtccacacagaatcgccatgaattgtctttctttttcactaaaagaactagagaagcaaatgggttgagactaggaaccaccatgccagactgaagcatctcagccacttggtgctcaatttcatccttctaagcaggagagtgttgacgaaaaaatcgaacacaccggcctaggagatctgcttagctccagtgcagatccaaatatgatgagatgcgggcgtgccagtcagtttgaccctgcaactaacaagatatgtaaacggtagatcaaatagccgatcggctgacaagccgatggagtagttctagccgatagccgataatagccgatgccgataccagccgatagtgatagggtttaagcaatcggctatatgtccaatatagataatgatataaaggtaatcagctgatgatgatgtaataaaataataatataatccagtataaaccaatcggcaaataatgatatgataaataagcatcgatccgaaggttaaagcacacatcggctggaggtccgatgtcatgaaatctacaagattagattgaacagtgaaacctttgttgtcatcggctaaatccaacttatatgtatatgcaatccttatgagccgatgcaacgtccagataactcaccggctgaaactccaataaaacccttattggcaatcaggaagtaggctagagattatggttctaagcatgacttagtagatcaaacttaactgatgcagcactaagaatgaaaagaaacataatatctagacaatcaagccgttgactgagttttcagggtggtagatgtctaagctaatctaatctagcaatgcgatttagctgataccggcagaaaccctaaaacgagaagcagccaatagagctaaattgatatgctaagactagattaacaaagacatatgataaaataggtaggcaaatatatcatccaaaccagagcaatccaagaggtcaaatgtactgatgcagccttgaacgacgccgacgtaaacgatacaattgcccgggccagcggaacattggacttaccccttagccggagatcgaacaccgatgcagccccgcgtcaggtgccaagtcccgccggacgataaaataaagtagaaaaggtaaaaggtggcgatgcgccgaattgtattgatcatgaggatagattataatgaccccgggtttacatatttatatccatgggtagatactagtccttgtaggacgagaaagaaactttcctaaaaaaaaggaaaacataaagtccttataggacactaaacacactttcctaaagataaaaagaaaactaacaaactattcctaattaatagatacaactgccttcttcggactcgatctgtacgtggcaatcacgtcaactcaatccgacaatgattccaatatcaccttgccggaatcggctacatcggcttgccttgttcgatttggtaactgccgatgcacactgtagccgatgcggttccgaagccgattcataccctgtttccattatcgatttcctcccaaatccgcttcggccataactccaaattcgatgtaaatttactaaatttggttgttaacagagagtacctatatggcctggtgttaacaggagctgcattagggagcagtgtaatagcatgatcaaaagtcctgtgtggaggtaactcagtaggggactgaaatattggttgaaacttctgaattaattgctggacagcaactagaaggatttgctgaggtacatgctgtacttgttgaatgacagccactgcccagatctcattgccttgatgccacatcaacaactgctcacctgaaattgcctgcaaggactgagaagtaggagcagtgggtttaacaccttgcaattgaatctgctgccctttatgatcaaatgcaatccacttatctacccaattacaagtcatagggctgtgttgtgttaaccaatccatacctaatattgcatcatatccccccaaatccagaattctcatatcatggcaaaaagtatggccctgtatccaccactcaaaatctggtaccatctgctgacaaatgacttgctaaccattagcaaatggggcatttgtaaatttgctaccagtttttttaatattgcaaggataccactcgaatgacggttctaatggcatttttgcaattttttagtggcagttttgcaataacgattcaatttgatgatatatgatgaaatcacaataaaataaatgataattacataattttttttaataaaacgaatggtcaaaacatatctaaaacgttaacagcgtcagatataaaaaaacgaagggagtatgaaatgagctttgtactataaaaatttacatattttgctacatggagattgactattgaggcaatttgctgtaatcgtgtaggtgaattttaggccatcacgtttcactctgtttctcttcacgagtgcgtgaatatattgcaccccaacgtctgcacctatgccatttaaatggtagctatgtcttaaaatatagtcctctatttcaaattgatcatcatataatatcatataatatttgtacatcaatatcaaggataatttaaaccacatcgattaagacgtcatgcataatatattaatatgtatacattctcctattctcctatgttgtgttaattatgctatgataaaatccgtgtttatataacatatggttatatgaggatcaatttgaaaaattttagtttttattatatgtcgatcaatttgtgaaggcacgagtaataagttttaaagttaggtgcgatattaatgcagtggctaggcgtataactgacctgacatagattaagctgaaccaagtgatccaattattattcactaattaagcaaaaaaggaaataaaaacaagtacaaaattgtttgacaaaaaaaaaatcgagcacgctagcacgaggacaatgtacgtgtcacactctcctagaccttaatgttgaccaggcgctccgacgccaacgacgcggcgtccaccgtcatggcgcggacggtggcgttcgttcccagggacgggtggctcactgtcaggttgtagtcgccgtgtgggaggtcgagctcgacggcgccgtcggcgccggtcgtcgccgccgtcttgtgcgtcttccactcggcgatcagcttgtcgacgagggtcccaacgggcaggttcttgaagctgttgtccgtcaggcacatcacgtagcaacccttggcgtgccacgccgcccacattatcatcccgttcaccgacgggtgcgcgtacccttccctcagcacctgctccaagaacttcacctgattccaccatgccaaacataatgttattaggtaatgtataacttaatttggtgtgtagatttttcactactaccagggttaaatcttttgttttcggtattcatatcgggagtgccgatatagcgatattttagaaattttcgaaatcatgaacaaaatttagtcaaatttggacaatattgccaaaattcacgaaaaattaaatcaggctgaaataatatcttatcgggggattgggttcatgatataaccgaaatttcgaaaatttcagtgcggaattttaaaccctgactactactattgcagaaaatgacatcagtgtcaggtttacctggttgggtcctttgacgacatcgacctcggtgagccacatgggaagcttgagctgcgccaacgtgtcgagggcgctcctcatgtaagggatgtttggggtggagaagtggctctcgaggccgacgccgagcttgagggcgctgttgccggggtagctctggatctgcttcatcttggcgacgtacttgctgggcaccgggttggggtcaccgggctgctccagcgtgttgaactcgttcatgaagaggatggcgttcttgtccagcgcgcccacctggttgtagatcatcggcgacgcgttcggccccagcttggtctcgaagaagttgaagtgcaggttctcgttcaccacgtcccagtggatcaccttcccggcgtaccgcgtcaccaccgacttgagccgcttctgcatcgccgccttcagctggtccaggttcagcggcgtcacccacttcatctgcgagttctggtcgtcccagaatacgttgtgtcccctaatcttcaatttgtaacaaccaacaaaaaaaaaattaatactccctctctttgtttcatattataagtcatttaacttttttcttaatcaaatttctttaaatttaactaagtttgtagaaaaatatactaacatttttaatacaaaacaaatatattataaaaatatattaatattaaatttaataaaactaatttgattttgtagatgttgctaatttttttcttaaaaacttgatcgagtctaaaaaaattttgactaaaaaaaatatcagacgagttataaacgaaggaagtagttagtaaggtacatgtgctggtataagaatgtcgtgagacagttgggtcaatatccgatgtcaagctgaccttgatgttgtacttttgggcgagcttgagcatggcgtcggcgacgcggtagtcctcgttgttctgggcccactcgttgctgtaccacttcatctcgttctcgaacgtggccaccgtgaagcgcgacgtgaaccacttctcgtacgccggcaggtccaggatctccttggtcagcgcgttgccgaacgggaagccggcccggaggagctcgacgatcaccgtggcgttcgccatgggcgcgccgtcggcgccgcggacgaccaccctgacggtgctcctccgcaccttggcggccgactgctgccggtgcgcgtcccactcgtcgaacgtgaacggctgcagcgacacgctgtccatccagatgtccaccggcgcgtcgctctgcgaacattatgtaaagttgagatcgatggaacggctggaacgtacgccggcgatgtgttcgacgaaattgcatcgagtggctgggtcacctcgaagaagatctgccctgggccggaggagtaggcggtcatgccgcccttgagcatgctccagcagccggactgggcggagacgctgccggcgacgacgcgctcgccgttgggcgtcttgacgaacgccttcacgtgcgcggcgccggccgacacctgcaaccacgctgcggcgccgcggcgcgccggcgaggcgcggctcgtcagacgacggggaccacgcacgcacgcacgcacgcatgcatatgtgctcgagtgctatctagttttgcacgtacgtaccggacagcgagtagtgggtgtcgccctgcagctggatcttctggtagacgctgcgcgacggcacggcggcgccggagagggagtcggcgcgctgcaccacggcgaacttgttgccggacggcgagctgctcaggccggccttgatgtcgcggtgcgtggaccagcccatgaggccgctgttgaactcgccgttctggatgatgccgccgttgtacagcggcttcatcggatcgcgaaggcactgcagatatgtggcatgcatgcaagctcgtttgaacattacaggaacatttcaatttttttaacggtacacataaatgccgtaaattttgctttttgttgacctattcactgattagagatgtttcagtttacaaaatagtcgagtgatttggattttgattgaaccaaattaactcagggtgttaatttcctgggaataataaaataattttgcgttttttaacagcccagctctaatcaatttttggcaaaccaaacaattttggcatcccagtcaatcttggcataaaacgatccagagccttacattttaaaactagaatacaactgattttaataaacaaattatcaagttttatagatagcagaagacgagaataccaactatcgatttgcaatttaaaatctgtgagacgagacggagataaaaacgtttaacaaagtcagagatttgcacattttgccaataatctcacatatggcatctgtttgagaaaagagcgatatatacaaagagaacaattaaacaaaatcacttgcctcaatacttgctgtatgatcatattctaaagattgcaccacccatcctacatcaagaatagatacattaatcttcaacgacatttcaagatgaaattatgtgatcaaaacaaatgcaaaaacgaacaagaaaaccatgcgcattttttttgaggaaaagaccatgcacattttgaaaacattaaatcaggaattcgactaaaaccaacataatttacaaaccagctgaccttggcagagtgaaatacatatcaaggagagcaccagtactttctccatgaaaaccttctatgtgtcgtctgtcactctcactgctaacgaagacgattcagctaattatgcagagaagcgaatatatataggcttgcaggattgacttagctagcactaattatgatttacgaaaaatggtgcgttgttttcgatattttgaattgaatcggtacacaatcggcgagagaaacggtacacagagaaacagttgctggatgagtggacgcatgcaggtgagtgatgttatttatagacatgtactgggcaattagttcacagagaaatagaatggtaagatccgtagatttctctgttgctgcgttcaatgaacaagggtttagttgcaaaataaatattgaagatttaattntgagttaaatttggatgtctattattcatatttgcagaaagttaggtggtcccagaataacattagtatagtgaggggataacatcgttggggtagccgtggcgttgggtacacagtatctagtttaaatcctagtgtacacacgcacatggaggatttgctttcagtaagaattttgtgaggtttgtcagtataccataagtcgcggctattaagagtgtgttaaaacgagatatattcttggcaagtttggtcttatgtttaggggtggatctatattgacaggctaacaattaacaattaacattggtgtcactcgatcccgatgacttatagtaaagaccactctaaaagtgctgcgataactttttgggtggaaatatattaaatataacgttatagtgcaaatatagtgtaattatattttaaactaaattttataacttatatgcaacttgcatgtaattattatgaaatctgggtaattttgctcccttggtaggcatggtcatgagtttaatcacccgcccccatgcgtgattttatttacgctcggtgtgcatctgatgacacagaaatagatagaatccaaacaaaaaaaacttttagcaattctatttggtaaaatcacaaaactacttaaacattgaaggtaatactgaattggggttttctttgtatggatggaaagctaagaagataacatatccaatgtgtatatatatatatatgtatatatatatatagatacccatatgggactctatggtgcccgggctctaaggtataaaacacacaaaatcactcaaattttttaaaaaatttaaattgtgagtatatacctaggtctataaatttgattcataccaatacctaacaacaaaataactcaaactcaactttatttcacaattcattattacatacctaacgaattatatgtttggatgttatatacctagaatcaaaatctaacaaaaaaaaaagttcaaactcagttcaaacttgttagtaaagaagttaatgttcatacctaaaacatttaaaaaaaattcatactcattcaaattggttatatactcaatttgaatcttggagccaatactccatgtagcacgagttaatttacctatatatatatatatatatatatatatatatatatatatatatatatatatattaaatttgtttggtgctccatggtgcccgggcaccattgttgaaattgagtatatacccaattcaaatgagtatgaaactttttcaattacttaggtattaacattaactactttactaactagttcaaagcaagtttgaactgaacttgaacttgtttttgttagatcttgattctaggtatatagcatccatacatataattagttaggtatgtaatcatggattgtgaaataaagttaaatttgagttgttttgttgataggtataggtatgaatcgaattattataactaggtatatactcacaatttgaaaattttaaaaaatttgagtgattttatgcattagataccatggtattcatatatatatatatatatatatatgaatatatttttaatgcatgaaaaatatatacatatacaaagtttatataggacgtacaaactttgtatacgatgaatataaactttatatacatacgtattaaaaaataaaaaactagaaaatacacaacgtatacaaaatttgcatacgcgtatacaaagtttatatacgtacaaatacaaacttggtatacatacgaatacaaactttgtattcctacaccttaaaaagagaaaccagaaaaaaaaggaaaaaccaaccaaacagaaaccaaaaaaagggaaaaaacaaaaaaagggaaaacttgctctctctctctctctcctcttagcgcggcgcgtccgccgtcccctctccgcgcgcgacacgtgtccagtcgcgcggggaggggcgcgcgcgactgatcgctaactagccttctcgcaagttgacgtctagaatctgtcctggcgttgcgtcaccgtatttgggcctttgggccgtgtatcgtgttggaacccattagggttgcgtcaatggttggttgcacgaccctaaactctatatatcagtacctgccgtcacccttagggtttgggttttgcttagattattctgtcaagaacattttcgccgctagatcggtttgtaagaacccaacttatgagcttaatcattcatctgcaattttggttgtattctaccttattcttgtttgtgttcttcgattcgcaaacagagattagccttctcggcgagatcatccgcgtttcgacacgggtgataactagaggagatgtggt

SEQ ID NO: 15932 - DNA, 11302 bp, Oryza sativa
aacaattattcaatttgacgataaacagtgctttgatatattattatgcaatagtgttttatttttctttaagctattcttccgtgggttaataatcttcatatacggctttgtttggatggactacggccagccggaattgaggcgcaacccatgtatatcattctacccaaggtcattttctctacgaagactgttgggacatttggatggagccaggttggcaaaagtcccagcacaatccgccctagcccacatagggaagaagtctctccacggtgatatgaaactcttttcttgcgtcacacttagggcatccacaatgtagtctaaaactagtccataagcaataaaatatttcattcagccacctaaccacattgtggaacagtccatagcaagaaaatagcaaaagccacccataagcatatgggttgcccatatagaataaaatatgttatttgtctctatttcctctctccttttaatactagttgctatctatatatattgtcaagatagcaatagttatagtctatatatgtgggtaccatctatatggactacttttgctatatacattgttgttgcccttacagcattacactcgacctttttctccttcatagacaaggtgaattccaccgcgtcatgtgagagacgatgtgccacctcctatacgtgcataggaaagagaggaagaaatttgggtgttgtctcctgagttggatgtgagtaccgttgtatgtttggatttcgatttggattttgaaaatttgcttaatggctgatctggatttgtgagaggggaaccgtggcctaaggattgtgtttcctagattattaagtttttgttttccaacatttctgatttttcactgtatttttttcagatggttaaaaactttatcttaatcttctgggtgttttctgaattctatatgttctgaattttgaataacaacaatcccatccattccacccactatacaaacaatgaaagggaaggggattggcagagatggatttggcgagaggatggggaaacccacccatgtgagcataacctctacaccaaatattcttcatctcaaatattctgttgtgacggactctagaataaaaagtactctctttctctccgtttgaaattataagtgttttgacttaaactgctccaagtttagtcatatctgtagaaaaaaagtagtaacaatatcaacccaacacgaatatattatggagatgtattcaattatagatttaatgaaactaatttggtgttataaataatactatatttatgtaaaaactaggaaggaagcccgcgcagatgcgcgggcaatttatttattgcctacaaaaagaatactaaaagaaaccatatccaccatattcactataagaaatagaccattgattttgatatggagtaaatgatcaaaatggttatcatatccaaccaaaactcactttatcccaattatatataaattcaacattcaccacaacttattaactttgttttgaagtatgaatattttcttaatcgatggaattgcagctgtatcgaaaaaaactcaatacataattaataccataagaaattaatctccacatcatacccaagtgcccatgtctcacagatccaaatctatatataaatatttaaaaatatcgcttctaccaattaataggataaaacaattatacttatatatgaatgctcctctcacgatcgggtgaagccgactatagccgctaaggatttttctctaatgccttgattcatgggtcccacattgatatagtcgtgctcctcaacggtaacataattttattggtaagtagcaggccagttaagcattattgtcaacggtaacatcttacttggaccaccttaaccgaataatgcatactcctatatagttactacaatgtagccagttgagatccatacttagcatcctttatggaatgagtgaaagaagatggaggtgataaaaaaagtttttttttgtcttgagttgatttattatatagagtagacataatttgtttaaggtgttaatcaatagtactaaattttagttgtatagatatattttttttaaaaaaaatagcagggttgatcattcaactatctaatagcttcagtgatgaggaccacgtaaaaaatatttgctcacgcagtgatcctttgctaacttacaagttaatataagttttgattttttttcttgtattatacatctaattcacctatgcatgtatgcgggggttaatatgcgttggaatttgagctaatttttaaaattgtttggatgaggatgacaaaaaaatagatataatgtagttatatgtacgttttttttctagcgaatagtagtctctcgtacatacattcctttttatgaacgaatatttttctaacatagggatatggtgcacgtatgtgtattcattgtgtgcatctgcacatatctatatgagctcatatgattgacttttacattcttagtaaaaaaatactttcaagaaaattgacgagatgagagtgaagcaatgggtggcgtgaggcagcgctgtggcatggctttttttaccacctcgctaggagtggttgctatgtttatatatcctcaatttgggaaaatcttagagcggtaaagaaaaagcaaactaccagatgggacgaatcatatacagactcttcttttttttctttttatctcttgtgtacgtaattatataggagttgtgtatatatgtagagacagattttcatagattatctctaatttattagagtattacgtgatatcttaggagcatttgtagaagtgtagtaatggtattacttatagttgtaatctacttgtagtcaactattgtttgtatcgtctacttactctatagtttgttgatggttgcgcactttgtatcgccatttattttcagtgttggatgacacacatgctcattgaatataagctaatttttaagtgcattgtgcatggataccttgtaaataatattatttagcgatcagtggatagtggcttatgaatagaacttagatacatggggatcactgaggacataggtttgatattttaggctatgattgaccaagtatacaaatttattgtatattatatattaatgttttagtacctaaataatacatttaaggctatgttctaaagtaattattggattggctactcccttatttatatcgagcatgtttcccaaactattaaatggtatattacgcggtgcgtgtattgcaagtacttttttatgtataatttttttaaaaaaataaaataaatttattttcattatttatatttaatactcaattgatcaaatgaagtccatagtgggagataaaggacaacggcacggtgtcaaaataatatatttgatatttaatatctaataatatataaataaataaaacacataatacattataggataattgattcggtttttatctcatgtgcgtgaaaaagagaaaaaagaaaagacgtacgttcatgcatgtatgtgggccttttaaggataaatctaattggctattttattatggatccaatggttaaaagtaatagctccaccagattaaatgaaaactgatgattagatttttttttaatttctctaaatttattagaacgccacatggcggcatagaagtatttggagagtaccatatggcgtagtatataatacattgatttagaagatagaacattgattggatatttattatagatcataatttaactaaatatatttatattagtgaagtaatatattttatgtttataatgtacaaaatcatattttaaacaccatcgatttttatggatctatgttttatttatgtctttttatgtagatgcgtatggttttttttttcttctggccaacattatgtaagcattattgttttcaatcgtgtatgtacatacgtacggaagaacaatagtagtagcgtttgtatagtataaagtcatacatatgggatatataatatgaggaagttattactttttaataatagttctaatctaatggtgtaaaataacggacccaccaatttaagttaaaatcaatggcgagattagatagtgccatgtggcggcttaggagcgtttgtaggagtgccacgtggcgatttaagagtgtttgtaggaaagttaatggacttttaatatataactaggaaggtagcccgcgcattcgcgcgggcatgcgtcgtacgctaagctagatacactataagagcaaaatattaaccaaagaacatctgccatgatttctccataaattatttttgtcggcattaattgcttttataattctctaacctatgagctttatcttatatcatattttagtaatatctacaagtgattatttataatcttcttcatcatttgaaaagaaggtagaatttttttctttagaaaacatgtcaacaaaagataaagtaaggtgtttttctctttttttaattgcatatatattatcatggtttaatagaggagaattgggtaggacatgaagatccactaaatgtatgggtttatatagcctaatatagctgatgtattttgagaggtgatctatctaaaaacatttcatttagagtaggtcaaagcctccacacagcttaacgtgaatactataatgacaaaatataattgtgcagtattagttttgaaatgttatagtattcatattactatagcatgaatacacgcttgttttctatataagatagatataatgataagaaatgatggttccacaggtttaaaaggcataggagtattccaaaattgtagcttaaaaattatgtttgttttaatactcaatattattgcaaagtgagtgtagctcaactggttaggttccttgtagtggaacatgccaccgggttcaagtcatagactttgacatgggtgctcgtatttatgactaattattttttcagtggtaggtgacgtatccatcgacagcgagacgtccatggtgatttcttaaatctcaaaatatgtcgtctaatcttttggacatactcaaatggggtaagctatgtgtttgtgagttcataggggtgagtgtgcgtccgttaagttgtgagcgcctacgtttgttgtgtgtttctaaaaaaaaattcataggggtaggctatgtgtttatgcattcataggggtaagtgtgcatgttttgtgagtgcctgtgtttgtaatatgttcctaaaaaatatccaacattgattgtttttcttttagtttgagagctaaacaatatgaaggggacgggctgtgttgtgcaaatgtgagggcgaggaggaggtggaagagattttatttttgtaatttttctaaacgatttaagtgataaccgatgatggggtgtttcattttttaaagaacttctaacatactttctttgttttaaaggatgtggcacatggcgatttaagattatgtttaagaaatagatttaatagttaaaaatattggaataatggatacatcaatttagttgaattttttttagaatcttaggatatgatagccagtgacttatgagcgctcaggagggagtttaattgatttttgttatatacaatgatttactataacatactatatattttcaattaatttttggttgttaggatattatttttctaatatagatattatgggtcctagttttgagttatatatttttataaatacatttaattttagatctattagaaaatactttgggtgttgtattttctaattaaaccacttagattgttttaaattgttctactggaagtacatgttattaatcagatcagaaggtttaaaaatctacttgatattttcttcaaaatgtatgaatcggtgaacaatagttagtccgtataatatatatgacacaaagtaatgaatttctttaataatatacttaacttggatcttcagttttaaattttatagtaaatattataatggtgtgcacaaaaaaaagtagatatatgatttagataatatagttgtttaaaattagttttcataaaacatttttccatctaactaaaagagaaaaatacgagagaaagaaaataggtggggaggcacgtacgtactgaatgtgaggggtggatatgcagtgcttgttttcttatcctctatttgataaacaaatctaatggtagaaaataatgggttataaaatattttttccatctaacaaatttaggaaaataggagaaaaataggagagaaggaaaattgctgggactggggaggtacatactggtcggggtaagtacgggagaggtttgagatatgcgggtcttttttttgtttttatccttatctatttggataaatatccattgtatattagtgaaaatcgacggatggatgttttatttattctcagattttttgtgatttttaaatttattaaaatgccacgttgtggcgtaggagtgttaaaaggagcgccacgtggcaatttgagagcatttatagcacatgtgcggaaaaagtctgaattacacccttaaactacaacaacagtacgaattgtcccgcttatatataaactcatctatcaccatcgttcctaaacatatgagttaatatattttttgttttgttttttcttttattatacatttgattcacttatgcatgttcatgggtatcataagatagaataatctatattgtcaaaattatttgtgctaattattaacattatatagatgagaatgacataactaaaaaaagatataatatggttccataagacactttcgattgaatgtgtatatgttttttctggcaaatactaagcacgtactttttcctcttttttttggagacaaatatttttttctcttagggtaggtgtgcgtatgtgtatttatatgatagatgtgcatacgtttatatatgcgctcgtgaatgccttttatatcattagtaaaaaaatactttcaagaacattggtgagatggagtgaagtggtgctgtagcggcgtggattctttgacaacctcgtcaggagtggtcgctactcatatgcacaatttgaggaaaatctatctcatagctgcaaagaaagaaagaaagagaaaactactcgatgcagctgatcgtatacacactcttcttgtttttttccttttatgacatctcttgtgtacgtatatagtgagggattacttgaatatatatatatatatatatataatggttgaaataatatatccacaggttatgtataaataaatagcttgattttacctttttaaattttttttcttagataagcacgggttatgtaatatataatacttaattaatcgctaatgatatactttgtttcgcgtgtcctagatatgctcttccaatgtagaccaaatgattactaaaagataaaaggacatccacatgctgtaaaaaaatatatgattgttaatttttttaaaaaaatatatgaataaagaaacatataatatatgaaaaatacattcatggcgattggatatatcagtattacacagtatggagtgagtaaatttttagagagctactcacaatttaaattgtttttattttgaaaatataagtccaatttaactatgctcttcagtgatatacaatgatataatccacaattttaatttattattattattattatttgtggatgatttgatgagatgcgctatttagaataaaacttaaaataacatataattttacaacttaaaacatatggttaacatggatttttttgagttttttctctaatatctactactataaaagttgaagatgtttttgctggtacttcggtacgtcatccgtgtacgagtcggttttttaggtttgttcgctttttaaaatacgtatttgagttgggttttaagtttcgttcgctttcgaaaatgcagaaggagtcgtataagaaatatttttaaaaaataactcgcatgctaacttcactcctaattgtagctcatgattttcaccttaactaaaccatataacaataataaaatcaaaatagccttcacccgttgtaacacacgagcattttttctagtctaagtatacatgcgagaaggaaaaaggaaaaaaagacatataggggatatgtacgtacacggacgtacggacgtacaggtccatggggacacgtacggccaggtaacgtgggtttttttagatagatttatttggtattttctttaaataaagatctaatggttaaaaataatgggtccaccagattaaatgaaaaccgatggttagatgtttttctttttaattagaatttctatgatttattaaaacaccacgtggcgatctaggagtatttgtaggaacgccacgtagcggcttaggagcgtttgtaggaagtttaatggacttttagtatataatagatagatagatagatagattagaatttctatgatttattaaaacgtcacgtggcgatctaggagtatttgtaggaacgccacgtagcggcttagaagcgtctgtaggaagtttaatggacttttagtatataatagaaatagatagatttaatcttaaagtagtttaattttgacgacttataatctgatatggaagagtacagatacttagcccctgatgatgtattctacttgtgattcgaggagcactaattcgcctcgtgaatattctacgggctggatccacttatactacaacactcctgttcctacaccctgatgtctatggcgttctccgacgaggatgacgatgcgtccacggtcagcgtacgcacggcggacgacacgagcgacgggtgggtcaccgtgacgttgtactcgccgtgcgcgaggtcgagctcgacgacaccgtcggcgtccgtcgtggcgacggccacggggtgcgtcctccactcggcgatgagcttgtcgacgacgtcgccgacggcgaggttcttgaactcgtcgtccgtcaggcacatcacgtagcacgccgtggcgtgccacgccgcccacatcaccatgccatccacgttcgggtgcccgtgcccttctctcaacacctcctccaaatgctgcgcctgcacgtagaacaatagattacgattttctcattttcataatgaaatcttgatgatgaaaaagatgtaattatacaatttgttacctggtttgttccattggcgacgtcgatctcggtgagccagatggggagcttgagctgcgcgagcgtgtccagcgtggcgcgcatgaaggggatgtttggggtggcaccgaagtggctctcgagcccgacggcgagcttcaggccgccgttgccggggaaggaccgtatctggttcatcttggcgacgtacttgctggccatcgccgccatgtccaccggctgctccacggtgttgaactcgttcatgaacagcggcgtctcgccgtcgatcttccccacctggtggtagatcgccggcgacgcgtccgggccgagcttgccgtcgtagaagctccagtggaggttctcgttcaccacgtcccagccgatcaccctgccgccgccgtaccgcgacacgacggacctgagccgcttgtccatggcggcccgcagctcgtccggccccagcgacctgacccacgccatctgcgtgctctggtcatcccagaacacgttgtggccgcgcaccctgacgccgtgccgctccgcgagcgccagcatggcgtccgggacgcggtagtcctcgtgcccctgcctcccctccgtggcgtaccacttcatctcgttctcgaacgtcgccaccgtgaaccgcgacgcgaaccactgctcgtacgccgggttgtccaggatctcccgggtcatcgcgttgccgaaggggaagccggggcggaggagctcggcggtcaccgtggcgttcggcaccggcgcgccgtcggtgccgcgggcgacgacgacaccgagggtgctccgccgcgccctgccggcggattgttgctggcggtgcgcgtcccactcgtcgaaggtgaacggctgcagcgacacgctgtccacccagatggccaccgctgcgtcggcctcgaagtagagctggccttgcccggaggagtaggacgtcatgccgcccttgatcatgctccagcagccggacttggcgacggtggcgccggcggcgacgaactggccgtcgggagtcctgaccaccgccatcacgttggccgtgccggcggacacctgcaaccacgctgcacggccacacacacaaacacaacaacaacaatggtattaaaacagcaaacacatgtgacacagaaaattaggaagcactagtgattgatgatgaagtaatgggtgcataactgtattcaccgaaatttaaattctagtgcttgtgaatattacacacatgtagataagatgtagataaggtttcaacaggattttagtcagatcagtgatatatttttagtttttgtctcttataacgtaggttagggacgcatatacgggacaacgagtgtagtgatttgtgcgcgtgtgtgtttacgctgtagtcgaaaaaaaaataggtagacatgtatctttttgtacctgagagggaatagtgggtgttgggctgtatctggaccgtctggtacacggtgcgcgacggctggccgtcggtccgcgcctcggcgaacttgttgccggacgacgagctgttcacggtggcctggacgcccaagggcacggtccagtccgtcaggcctacgttgaactcgctgttttttatgacgcctccgctgtacagaggtatcatcgggttgctcaggcactgcacaacacaaattgaaattccacaataaaacattgccttggttgagtggcggagccagaaaatcttcacacctaaaattaagctaataaaaacttagatatttctacaaattacattgtattttttaattaagattataatggggattatgaagttaggtatggggctcaggccatagttgccccatgcttgtttccgtccctggcttggttaatccgtctaattttggaatatgcttggttatatcttctctgtttcaagctataatgattttttacgcttttcaagatgtatctattcatatgatgtctaatatattttgtaaatcatatacaaattcttatattttagaatagagggagtatttagggcctgtttggtacagctctaactcctaaatttagctccaagagttgggtctggagtggagttg

SEQ ID NO: 15933 - DNA, 17466 bp, Oryza sativa
gcctaaacccagctccacaactctagttcattttgtgagagagctccacccagctccactcccagttttagtggagctgaaactgtttggctgagctccagctccaggaggggtagagctggagctggagctgtgccaaacaggcccttagagccgaacagtttgaatagctctggtgtaaaatcggtaaagtttatactatcaaagttaattaattagatagatctgatcgtgcagatcaactataggcaaatctgacatttaaaattgcacctggaataatagccccaaattaaatattgaacaattaaagtgattttttttctgaaatggcattcaatgcagtaatggaggcaaaagaaacagatgaaggatctcggagccaaagatattaaacgagaatgcatttttgtatttcgcaaactgctccacaaagttcggaaacgtaaatccatatctgattgagcagtgtgcctctagacttatcgatagcgatatctcttcctagtgcctaggccctctttgtttaggcttagacttattggcctagacttttaagtcagcttattggcttatatgatttataagccggtggatttaatgtcttaagtgtagtagttgagtcatacatctacctcacataagccaaaaaaagcttctccaacctagtttttggcttaatagtgttagagtggcttatggcttcaaaaaagccaaacggaaaaactacttgtttgtttagacttagactttttgacttataagttgtcttataagcgtaacaaagagggccatagtatactactcctggatcagttttgaccaattcaccatcgtaccattatttcgtggttttggagagactgaaatgaaagataaaattgatcatttttatccatttgatttgttcaaaatacacgaaaaggaaaaaatacatgaataaataactaacttagtcgtgtagtatatgcatgtcttgcaacagagctcaaattagaattatttgcgtcacatggttcgtactaaatattgaaataaaatttcttgtgttttttagatccagaagctactaagttcaatctttcaccgaagaatttatagaatggaaaaaaaatgttatgctagggtgatctgccatccaatgcttattactatttgtagaaagaaaccatgaaaaaaaaattcacaaaagagagaaaaaaaaagcttgcctcgatgcttgccgtatggtcataaggaaccgattggaccatctgacctacaaaaatcatggaggaaaatgatatgtatgtgcataaatatccataatcttttcgtaccattacaaaaaaaaacaaaatgaaatatgccaaatggtgtaactgaaaaaatgaacagagcaaaaggtaagtctgaagataacactacaagcagtgcacctctccatataaaaaaacgaatttcgtctgccccttttcatatgtgaaagtttcctccttccacatactgacatctcccaaaaaaaaatccgaggataaaaaaactaaaccaggaggggcggttggtccgtactctctctacatcatgttgcgaaaaaaactgacctctgaaggagagtagcaaaatgattccgagtttctccatgaaaaccttcatcgtgtgtcctgttaccactaatatttgtttctagctacaaatctggacagaaataaatttggatagaaatgaagtctttttggacagatggagtaagtatatacaactagctggatgccagctatttcctaacttatatgctaggatgtcagaaaaatgcccataaatagcaagacttaacttaatccagacaatcggtgtactgctaaattaccgtttcaaatcaaacggataagtatattattctacggctgtatcttcgacgagtattaattacaactactatctcgttgcctataaattcatttttctcctctggcaaaacggacctcaatcaatctatctattaaatattagtatagagatagtatatatcaatcaatcaatctatcttctatttatatactaaaagtccattaaacatcctataaacgcttccaagctgccacgtggtgctctaataaaatagagaaaatcctagaaattctagaaaaaagaaaaacattcgaccgttgattttcatttaaattggtggacctattattttgcaccattagatttatcttaggaagaaacactttccatcgttagattagattgatctaacaggactcatggtcaagcgcacctcgcccctttccgtgcgtgagacgcaccgtacacacacctcctctcctctcttttgctgcccctcccctcccctctccataattctcttttctatttgtaagaaatattttttatcaagaaatcaacagtttgatgagttcaaaataattactatagtttttaatatattttgaaagcaaacaatcagatcaagaaaatcctctcatgcacctacccactgctgtgtcaatataagcgatgcaagcaacttccatctctttgtttgatctctcacgccttaccgtgcttgtcactttgattccatgtaatagtaatagtacagaaaggctatctttgatttcacataaatttcttgaagcttatggaaaataaataaattaatttttaggcatttgggttatcaggtggttttcaagcaagggtgccctacctcttcctacgtatgtgcctcccttgcctttacacacttataagtcttaacttatacatttgatttctgatccgtttaaaacatcacattctttacgattaaatcaacaattaaaaactcagttttgaatatattttaaatcataaagatataattttgcatactaaaagtatattaaactccctacaaacgttctcaaactgccacatgacgttctacaaatgcttttaagacgtcatgtggcgctctaataagtttgaaaaaaaattataacaattctgataaaaaagaaaaaaatctaaccattaattattctttaaataggtggacccaataattttaaccattagatcttaaaaaaatcaggttcccccaccgtatgtgaccacacacgtgcgtattccttcacccttctactctcctctaggatcccaatctcctcacctatttaatttctagctaacttttcctattttctagctaatacaaaatatataaaaaataacaatagctaaatgatcatgactctcaagtcatgtgtacttttctcattttatttgattttctatgttattgataattaaatacatactccacgatccatagtgcccatatttactatataaaaattagataacttggttgttctgactacaaatatttgagcaaaatataactttgaaaatgatgaatgaatttaaatatgtgaatctaaagtccaggttcaatcactaccaaggagcttggaactgtgatacatactctgaactcaaaggaagaggagctacaagacattattagccatgtggacaccgatggcaacggtagcattgacttccacgagttcctaggcctaatagcgtgctagataattaggtgaaggaaaagtaatgagaggaggggaagagggagatgttccgcgtcttcgacaaggactagaaaatggcttcatctctaacgccgagccccgccacgtcacgtgcaatgcatcaggagaggctcactaatgaggaggtcgacgagatgattcacgagaccgatggtggcaggtggatcaactacaaggagttcgtaagaaaattcagaaaaaaaataaaacaagcaatttgattaaaatatacattaaaaaataaaaagaatcattaaaactataaaaaatacaacaatattccatgtagaatataaaatattaagagtccatataaaagtatgagttataaatagctaaaatttggaataataaaacaagtattacaagagaagtccaaacacaacacgcaatgagatcaacacgctatgagatcaagtacaatttaaaatccctaaaaagacaatttagagtaaaacaataatttgatttgaatacaaatttgaaattagaatcgaataactaaattcaagatacattaaatattttttaaagaatctttctatctttattgattcacatgtataacgaattgcatatatatgaagcaattaaagagagcgatagcagggtgggaaaaatacatttattacagtttatcgacatttcttgagaaaaaagatacaatgaacactcaattaaaaatagaaaaaaaatgttactttaatttaaatttattttgtttgaactattttcaaaataaaccaatacgcatgcccgcgcgaatgcgcaggctatcttcctagttattatatactaaaagtccattaaacttcctacaaacgctctcatgccgccatgtggcactctacaaacgcttctatgccgccacgtggctctctaataaatttagagaaattaaaagaaaactaacagtcagttttcatttaatctggtggacccattatttttaaccattggatttataataaaaataaccaattacatttatcctaaaaaggcccacgtacatgccccacatacgtgcatgaatgtacctacttcatgcaccaagccccacgttcctcttttttttctctttttcacgcacctgagataaaaaccgaattaattattctataatgtattatgtgttttatttattcatatattattagagatttaatatcaaatatattattttgacaccttgtcatttcatttatctcccactttagacttcgatcaatttcattgggtgagcttatccaatgcacgcagaatggtgcaagtcattagcacaggattaattgagtattaaatataaaaaatagaaataaattaattttatttttaaaaaacttttatataaaacatatttgcaatacatgcatcgcttaatataccatttagtagttcgggaaacatgctcgatataaataagggagtagccaattcgataagcactttaaaacatagccttaaatgtattatttaggtaggaaaacattaatatatacttcctccgtcccaaattataaggcctatatttttttacatggtcttcaactacatactttgaccattaatttattcaatgttatattcccaataaatatgaaattaacatcacatgaaagcactttaaaatataaatacagtgatataacatgcataataattagcatatactccctccgtcccaaaatgtaagcatttttagctatgaatgtggacaactgtgtgtccaaattcatagccaaaaattgctatattttgggacggggcagtatatgattagtatgattaatagtcaaaagttaccgagtttgatttttcttaaaatgaggacatcctatattttgggacggatggagtaatatacaatatatttgtatacttggtcaattatagtctaaaatatcaaacttatgtcctcaatgatccccatgtatataagttctatatataagccactgtccactgattgctaaataatattatttacgaggtatccatgcacaatgcacctaaaaattagctgatatccaatgagcatgtgtgtcatccaacaccgaagataaatggcgatactaagtgcacaaccatcaagaaactatagagtaagtagacgatgcaaacaatagttgactacaagtagattacaactacgagtaataccattcctacacttctacaaacgctcctaagatatcacgtgatactctaataaattagaaagaatctacgaaaagttatctaaaaaagtaaatatctatccatcaatttacacttaaatcgatgatccattattttcaaccattaaattaaattagatatatgaaagtaatccctctgtcctaaaaaccatataatctgtctctatatacgtacacaactcctatataattacgtacacaatagatataaaaagaaaaaaaaaggaatagtgtgtttatgtgattcgtcgtagctggtagttttctctttcttctcatttcttctcagctctaagattttcccaaattgaggatatatatacatagcaaccactcctagcgaggtggtaaaacaaaccatgtcgcggcgctgcctcacgccacctattgcttcactctcatcccgtcaattttttcgaaagtatttttttactaacaatgtaaaagtcaatcatatgagctcatatatatatatatatatatatgtgcagatgcacattatgaatacacatgcgtgcaccatatcctatgttagaaaaatattcattcaaaaaaatgaaaaaaaacaaacgtatgtacgagagactactattcactataaaaaaacatacatataactacattatatctatttttatgtcaccctcatccaaatagttttaacaaattagctcaaattccaacgcatattaactcccgtgtacatgcataggtgaattagatgtataatacatggaaaaaaaatcaatacttatactaacttgtaagttagcaaaggataactgtgtgagcacatattttttacgtggtcctcatcactaaagctattagatagtcgaatgatcaaccctgctatttttttaaaaaaatatctatactgctaaaatttagtactattgattaaccccttaaacaaattttgtctactctatacaataaatcaactcaagacacaaaaaaaactttttttatcacctccatcttctttcactcattccataaaggatgccaagtatggatctcaactggctacattgcagtaattatataggagtatgcattattcggttaaagtggtccgagtaagatgttaccgttgacaataatgcttaactggcctgctacttaccgataaaattatgttaccgttgaggagcacgactatatcaatgcagaaaccatgaatcaaggcattagagaaaaatccttagcggctatagtcggcttcacccgatcgtcagaggagcattcatatataagtttaattgttttatcctattagttggtagaagcggtattcttaaatacttatatatgggcacttgtatataatgtcgagattaactttttatggtattaatgatgtattggggtttctttttatacagctgcaattccatcgattaaaaagacacacatacttcaaaacaatgataataagttatgatgaattgtgaatttacatataattgggataaagtgatttttggttggacctgatagccattttgatcatttactacataacaaaatcaatggtctatttcttatattgaatatggcgagatatggtttcttttagtattctttttataggcaataaataaatttcccgcgcatctgcgcgggctttcttcctagttatataaaagacgagcattacgtaccgagctagctgtgaaaatccatcctaatggattaatggctgttagagacaaagttacgttcggatgtcgcaaccctcgtgggattgttgctgatgcgcctccctctacattatcaacatgatcctccgatcaaaaaccctgtctaggtctccttggcaagctacgatattttcaatgtcgtaaccttattggaggcatcgttttagatgtgatgtttgtttttgtagcttttcagatcatgggcatatgggcaatctgttaagcatagcagcgtacggcttgatgctaggctttttcctcgttggtgtgcgggtttttttttggcacatggcgaggactataaccttatgatatttttcatgctatatcaatattaaactttatattgtttcgtgtgatgtgtttaaaagaatatattgtgtgaagcattaaacgcaggccagcatttatgaattttcgggtaatgtcagttacaatataaccaagtatgaaatgtgctgtatatctcataactaagtaaaacttgtacccatcacgcattttgttggtgggttcaactgtaagcgagtaaattttcaccgtctagtgctagctagtgaaaaatatacattcctgaaaaatgatttttgacggctaagcctctttcactatgtaggtggaatgtattttcagctccgaaggcccacctagtgctcttcctccgctcggccgcgcccccgttacaccggcactgccgccgccaggccacgccccgctacacgggtgcgccgctgccgctcgcgacacccctccggccgaccactgtttcgtcgtcaccattctaatggagaaattttttttgtgtgtgtggtgatgcgcgggggcattctaggcatttcgaaaaaaaattcaccactttcagccaggaaatgataatgcatccggtgtactaaggaaaatttcacagtttttaagtgtcctagagcagtgtcacgttttcgcggtgtccctcagctaattatacaattttactttttttatttttttattttaaaaataaactcttttaaaactttttttttgaccgggaaacagtgggggaagcccccacggttaattttcatttatatagaggaaaaaagaaactgtacagaagaagatacgaaccttttggccactagcgtagcaaaacaatactgtcacacatgtcttgctggtataatagtgttattcggccacgtcggtctcgctggcgtggcagagttatttggctacgccactttgactgacgtatcaaggcaaaactgtcacgcccgctacaggtgatgtgtcagtgttatttcgtcgtgtcaggaagggctggcatgttcaaaaggtttagattttagaaatatatttttgtaagggtttattttgaaaatttaaaattaaaaacgttcaagaaaataaaaaaaatctggttgaacgtggttagcatctgaattaggcaaggtacattggttaatgcagagctatgaccggaagaaagaggaagaaagcaagtgtgacatgggaagtggagggggtacacggagctacggagaggcgatttgagcgaggaagctccactaccacgtacggcggcaagccggcaatggagccggccaatccggcgagcgccataccaggcgagagatgctcctatcgacgaggcgccgttgcatctgagccgagaccgcacaggagacaggaccgtcgcaccgagtcaacgggctgagcagaccgagcaacgtgaaggagaacagagcaggtgaaaggaagggccgggccggcacagttaggaaagcccaactagaatgctaggaggccttcaaaccaacggacgggatttggctgtgtgtccatgtgaacaggctgccatgttagaaacccgagtggtaaaagagccgtggaggaaaaggacctcaagtagatataagttgggaaatgccaggcgccggtgcatcgggcgcgcctaccgcgcggggggccccacgcctgtgctgcccatgtgcgtctgtgctgcttctccacgtgtcttcaccatataatcaattacaacaaatcacccacatattttgaaaacactctattaaggtaatttggtttattttttgttccacaaaaaatgtttcatctagcgtactcacaatgtttcactatgtatggataatgctacagtgaactgaaacattctttcgctatttgctgaaacattgtttttatataaagtgaaacaacgttcgatttaaacgattgaaacatttttgatctacttagtgaaacaattccgaaaaacctggtggaacatcgtgcaacatttaaaaaaaattcaataataagctacaaaaatttcgtcagaatatatccatgtgtggttttttttaaaagatttaattgcaacgaatttaatggttcaatcggatcatgatttggataaataatttttaagaaaaatttgttcatgctgacgtcagcgttcgatttttggagatttggatcgggcgaccgatccctagtcacctccatataaagtttgtcatgttattgttgaaactagaaagcattatacttgcatgttagaaaccagtcgcgctttgttcagtacggagcgctaggaaggattcagagcaagtataagagcaggtacaatagaaggccataagccagctataaacatattttaaagaaaaaaagaggagagagaatggcagcaactgtagcacggatatcaaggtgcatgtgtgtatgataggtgggaccagatattaattatataatatatgtttataggtaactattgtaagaattggctatgaagttgactatagatgatttagagccaacagttggctacactattaaacttgctctaatagtgagctataagcttacgtggagtataaaggtagcaaaaaattaagagtgttggctctcatgcaagagctagtttatcacaagttctaagacaaatacattaaatgtataagtgagagatagagaaatgagaagaaaattatagccaaccttacatgctaatagtagaaagtgagctctattattatccttgctctcaggaattttgatggctctcaatggtttctcaagagatgatgaacacaagcctatcagaatatggcatccatattttattttcttgccatttgtcttctaagaaagtgctgtggttttctgcatactaatatggaaaaggcgcatggtgataaaccttaaatgtgcaatatttttttatttaagttcatgcaattgttcatggtttcttttcatcctttgatagagaaatgcaccaatggatttgtgtgcagactatcatgtgccactgtcactgtggtctgcagcacaatttccctgcagaccttgcttgaaatttgggttaacaatggcacagcttccctgaagctggtctagagaaataacctgtgtactgataattgtgcatggctgtcctatgcccttaacctttctgatgaatacttgaagtgactgtccttcttgtttgtaaagtttgcagcagctgccttctccaagaaatatttgcaacacagacccaattcaccaattcagagggaagatattggaaaccataaagatggaagagtatcacggtaagtacatcggagcttgttgcgctccacagagcaagtcgcaattccctgcactcaagattatactgtacgcttctgtattgaggaagcttgcagcaaatacatggaactcatacaagccaacaaaacgttggcacaagaacattacacagcagtatttgtacagtagacaggctaattttgacaattttgaatgttttacaggctttcactgggacggtgaaacttgctcggtccgaaccttaaacacgggcatcatcctcttccattcaaggtgaatgaagatggagatggcggtgtgcagttcaggcagcagctagcttgatctccgttcaaggaagatggtgatgcagcgtctccggcgacatggagatcatctgcagcaggctggagctcgagaacgtctcctcgagggatatctcgatcttgctgctgctcccgatgttgttcctcacgatctgcatcagctccttggcgacgccgagcatgcagagcccgttctcggcgctcagcaggcacgcgacggcgagctcgaacaccttcctcacgtcctcgttcggcgccggcagctgcttccccgccaggagcgtcacgtcgatgacctcgtgcagcctcccttccctcaccttgggcgccaccgagtcgaacgggtgctggtgcctcatccccgtcagtagctcgatcaggaggtggccgaagttgcgcacgacgtcgtggtcgtacgacggcgcgtagtagtagtaggcgaccggcctcgcgagcttgtagccggcgatcttggcggtgaggttgtcgtcgaggaagacgtcgctggacttgaggtcgtggaggaaggtcggggccgtgtcgtgcgcctgcaggtacgtgagcgcgctggcgagctcgatggcgatgttgacgcggtggtaccagctgaggagccggcccttcacctgccgcaggtggtcctccagcgtgccgccggcgaagtgctcgtgcaccaggagcagcgcgttgccggtgccggagtcggcggcggcggtgcagcagaagccgacgacgcgggcgatgttccggtgcgagacctcggagaggagctccaccctgtccaggaccagcctgagcttctctgccgtgtcgtacccgatcctctgcaccgcgaccacggtgccgtcgtcgaggacgccggcgtggaccgtgccgccgccgtccacctgcacgttgacggcggccttctcgctgtcgtcgaacctcttggtcgcctcgtccagctgctcgtacgtgaactgcctcgcgttgcacacgccaccgaggatcttggggatgcacgccgggtcgatgtcccacagggtgtccttggaaggctgccttaggaacaaccaaaacgagacggccgccgcgaggaagaagagcgaaacgaagaaacctgtttttcgtgcaatgtggatcatcagctagtggagattgatgtgcaaatgtgatgcaaccaatcgatgaacacacgggagtgtatgatttaccggcaagagcaactgacttcttggagcaaaaccttccctggcaacactccctgccgtcacttgcctgcccagaattgctgcacgctaaaacatgcatacatacaagcaagagcatcatgtatttgggctggaaatttgtcgagctcgcagtcatggagtacttacatgtgccttttgagcagccggtgccatgtgcgaagccgtcgccgacgagccccgcggcgcacgcgcaccgcacgccgcctcgcaccgccgtggcattgacggcgaccgcaccgtcggcgcacgccgccatctcgctgcccttgggcaccgcccactccacctcgatccccctcacgacacccggtgcggcggccgaccggttcttgacccagctcgagaacccccggcatccgaactccgcgaaggcgccaagcccatcgccgggcttccacacgctgccgtcggacagcggatagcagcaccccgacttagcgcccgcggcggcgccaccgcggccgcaggtggcaacgtcttcgcagccagcgcggcagagggaggagtcctcgcaggcgtagaggcggagaacgttggccggcgtgacggcgaggaatgccgcggcggcatcgagagcggccgccggggaggacgggcgggagaacgcggcgtacgcggggtcgcacggggacgacggcgacggcgacgcggcgggggcgtagtcgaggaggatcgatcccgacgggaggaagccgaggacgcggaacgtcgccgagccgagcggcagggtgagcgtggcgttggtggtgtcgcaggagaggcgaaagcgtgaggaagagttggtggtgctggagacgcaggaggagttgaggtggaacgggaatgggaggaggagatcgccgcagcgttcgccaccgccacagctgctgctgctgctgctccgatcggcggcagcctgggcggcggacgtcgcaaagaggacgagaagtacagtgaggtgtggcagcggcatagggggggacatgggtggcggcgagccggcgacgccgacgcggatgccgcgagcgactcgcgctgtcacggattgagtctcagtgtcagtcacatctgcgtgcttctgatggttgagcaacgagcttaattagcaggcacctagctagcaggacgcgcgtgcaactaggcagtagcacatgatatgagcacgtcacacgcatggttcatagtgcagtacgtggtagctagcttaattgggtgcttggctacttaattaggcaggcaaaagcaaatggtgtactagcaggagccgagtactaagacaagcaggacgtaagagatgaatcttaatgaagtgatttgcattggagttggatcttcccagcttatttgccccgctcttttctgattaacatacatattttatctcgattttcgttagcacatttttcaaccttctacacaaaagttgatttatgatatggataaatctatttttctttcaagtttgtaataattaaaacttaattagtaatgcgctaacggctttttaattttctgtgctctaacttcagctgtatttttggaagaaccgaacaacactatctagctagctcttgctaaaatttcaagaagtccatgcatcaatagacttacccaggcttggaaaattttatggctctgacagtggatgccgctacagcttgctgagtgtcaccaccaagatcttcctggcggcaaagtgtgtcactaaaccaggaacaagcctcagtggaagtgagtcaactgtggtattatcagccgtgctttgttcagttcgcagagggaggagatgatgaaagcttgaacctatatatcagaatatggcatccatccttttgttttctctgccattttatcttctgagaaagtgctgtgattttcttcctactaatttagaaaggcaaaaggtggtaaaccttacatgcgggatttgaaatttcggtaatttcagcacccaccggaaaggtcaaaatctccctgaaattttcggtttttgccaaacatttgtaaatttggtcaaaatttgttcaaattcagtcaaaatatgttataaattcaaaaaaaattggacaaaaaattctaaaattactgaaatttcggtgatttcggttgtttcggtccctagcggcaaaaacacaatttcggaaacaaaccctgcttacatgtgcaatatttttgtacttaagttcatgcaattgttagtggtctctttccatcctttctttttcaatatttgatggaaaaatgcaccaatggatttgtgtgcagattatcacgtggcacttcggtttgcagcacaagttccctgcagaccttgcttgaaatttgggttaacaatggcacagctttcctgaagctggtctagaaaaatagcccgtgttctggtaattgtgcatggctgtccaatgcccttaacatttctgatgaatactgcaagcgtctgtacttcttgtttgtaaagtttgcagcagctgccttctccgagaaataagttgcgatggcctattcaccaattcagagggaagatcttgggaagcagaaagatggaagagttaccacggtataagtacatcggagcgcttgttgcgctccacagagtaagtcgcaattccatgcactcaaagattacactgtacgcctctttattgcagcaaatatatggcagttatactagccaacaaaacattggcaccagaacatacacagtagtattgtacagtagactggcttttgacagtttgaatgtttcgcagggtagaggcttgactgggaaactgaaacttgctccgtaccttaacacgggcgtcatcctctcctttcaaggaagatggtggtgtagctccatcagcagctctcccttcaaggaagatggtggtgcagcatctccagcgacatggagatcatctcgtaggattgaaaatcacaagaagtaagcctactagagaggggtgaattatagaaattaaatacctaaaaaccgaaagcttttagcggaactaaaagttatcctcaaacttgatggtgattcgatctaaccgacatgtgagcacaggtttgaccgtgtgccgatgccgccggtctggctagtatggatgcttctgtctaaccacccttcgagccgaaatcgtctgtcgtagttgccagtctaatcaccaaaccatcagtttgactgtcgtcaaactattggtctgaccgccatgcactcgctagtgtgactgccaaacccgaggtaaaacacaaatcgaagaactcttgaaaatatatcaactttattgcttctaattgtatttacaaagtgcaacaacagcactcttactcttctttcagcttttgactaaagtaaaaatatagactaagccctaatttttctctcaactatactctcacaaaaatcgataccgagatacctgaactcctcttctacacacaatataacttaactattgacaattttctccaagaaaatttatacacatgttttttctttctttttataacgtgcgttgcacatgataatataaaaagtagtggttcactttttcactagatgcacccagcaaaacaatatataaaacaccattatcccttttcttagccatccgatgtattcatcagatggcaccaaactatgtaggcatcaatttcttaggatgctacattgaatttatcgattgccccaacgagtggaatgcacaacgtactcctcccgctgacaccgccgcggtgctactccatcgtgttctcctcaccgccgagctcgccccacccccgtcgctcccaatgcatcatttgcaaggaagaattgaataagatagggaaggaaagaggaggagctaaatatgtagcagacctagagcagcgcctcacgcaggcgtggtgcggccttgccaggaacaacgaggccgtcgcgggtaggagcatagcaacaaagaaatcggggttggtgtctgcagcatagctcggccaccaacaacatcgatgctccggtagtcaagctacctgcctccgcggtggcggcggcaacctctagccttaaccggcaagcatggcctaggggacgacgcccttcgagtttggagttgggaagcaaaccaatggagagagtagatcaggtggtgagactggaggctagaggtgatggcgttctagaggagggtgttggtatttcttaatgatattactaaaaatataattcccagcaatggcgcagaaatagtcttgatatatttatggttacggaagtgatccgcaagcgcatggatataccattgtagcatttcacccggaagtattccaaggtattatatttatttaatcccaagggaagattaataagagaagactatgctaataatttacatggtacttgtataagttagagtctaagcagtggttaataattcaaaggtagagtgacacgaacaagaagaactaagtactctcattaaataaatccttggctaagtggagaaagaataaaaaaagaattcatcataatacttctaatatacatgtatctttaatttacactctttagtatacaatcatgtagccaataccccctaactatgctctcttagtgtttcgagagaccgcgcctgactgccgagttccttacgacaacccgtcatggtcatctaaccggaaatgaatacggaggagtacctataccaggaaattaacttatgactatatactaaatacccgtactgagctatcaccatcagcggcccacctctattgtcccgcatcatatacccccaaataatgatatttaataatctaagcaccatgcttacattatcaaatactactctatatccgctagcatgacataaatcaatcatttgcatgaacattatacccacaccattgcatat

SEQ ID NO: 15934 - DNA, 2219 bp, Oryza sativa
tctcattgagatacatggatatgtgcttgttgttgtatgtaggtggatgcataggtttccaaaaatcagtttgtcctggagtgcgtgtgcgtaggtaggttcctttgtgctagacatgtgcggagcaagaagggcggcatcaacgctggcagtggtaccatgccgttaattccactggctgttagcatttgcggatggcatggacacggtgccgatgttgattttcatgattgattaggagacatgatcagtaaaagttgttatgcacgcgtgcatgaagaggcaatctatatgtaagatacgatgggtgttacagcgactatgcatgatttaaccaaagcacaaagagtaaaatggataaaatactgacgttacacactttttagagaagttaatattaaggagtaacaacactactctgtctcatgcatatcatgtattaggagatgtattaggaggttttggtttgtaatcatccaagtatccctgtctcacgccgacaagctctcaaaactcctctctctctctctctctctctctctctccctccctccctccctctacctccctctacctcctattaggcgatatcttccaagcaccatcttcgccgatgaacttgcatatgcagcttcaaattgcctcatcgagtgcggtcccaaaggtaacaacccctgccgcttttatttcccaccgttttctgctgcattatgtagattgaatctagctttcatccttttttttcttatgtgttcttcatgttcacctttactattcctttttttcactgtagaatctgccaaaccatatcatgtttccagacttaaaccgtccgaccttttattatatgggtccaatgggtgacaaagatcccatagatttgattaatgccgaaaccaataggatcccattcaaacaatctagcatggccactatagattgttataatagctttagatctggccatcaaagttgataggatggagaacttggtatagacggaatcttgccaccaaacatgatctgtgaaccgatctaggcatcgttcaatgcattggcctctcctgagctgagatggataaagatgaatctttcattgtaccggcttgctacttccggcccgatacattgaacgccttcctcttcagtcatgggcaagggcgccaaacctgatggaggtcactatgatcagcggccttggtactaaaaatgccgacggttgggccaactacattactaggcatgcaaaaacttttggaacattttccaaccgagagcaagttgccttccataacttatggcttgaaagatttgtcttctgcggatcaaccttaggttcgatagcaaatatgcaacacctagcataagcctcgctaatggaaggactatgcccttgggcaaatatttcgtaggggccacttatcatctgctgcatcaagtcgaaacaaagctattggttagccagcccatctgccatatatgcggtccatggtagtttatctagttatggctaaagctttacaccgttgaagttgttatgaaaatagatgcacaacagagacacgaatttttacgtggaaaacccttgcgggaaaaaaccacgggcgccgaccggcaatgatcactatagaggagatgattacaaacgtaggggaataacaatgggaacgtcaccccttcccgtacggcttacaagagtatatataggggataatagaaagacacctaataggaaacctaataggaactcctactaggaaactaatcctactaggaaactaatccgaatatattgtgggcctaaaattcggattacatatttaacaatctccaccttgagacgaatttcctcttgtagcataaaaacatcaatcaccaaaaaatacctcatgtaggtaaaatcaccgcgcgccaaatagtctctaggactatactgtaacaccaaccaagcttgagcaaagctcaaacttagtagcaggaactggctttgtcatcatatcagctgggttttcatgagtacttatcttgcataccttgacatcaccttcagcaatcacacctcgaataaagtgatatctcacatcaatgtactttgttctctcatggaacatctgatcctttgtaaggcatattgcactttgactatcacaaaatatattatgcaagacgtaactccacaaagctcagtgtacaaacctctaagccaaatagcttcttta

SEQ ID NO: 15935 - DNA, 2369 bp, Oryza sativa
aaccccctgtggaaggcagctacgtctgagctaaacttggatatggaagtcttctttcgtttagggtgaagtaagaccaagctcatgagcttattatcctaggtcggaacaaattagttgatagtgataggatcccctttttgacgtccccatgcccccccccccccccgtgtggtgtggcggcatggggatgtcaaaaggaaagggatggagtttttctcgcttttggcgtagcaggcctccctttgggaggcccgtgcgacgggctattagctcagtggtagagcgcgcccctgataattgcgtcgttgtgcctgggctgtgagggctctcagccacatggatagttcaatgtgctcatcagcgcctgacccgaagatgtggatcatccaaggcacattagcatggcgtactcctcctgtttgaatcggagtttgaaaccaaacaaacttctcctcaggaggatagatggggcgattcaggtgagatcccatgtagatctaactttctattcactcgtgggatccgggcagtccggggggggcactacggctcctctcttctcaagaatccatacatcccttatcagtgtatggagagctatctctcgagcacaggttgaggttcatcctcaatgggaaaatggagcacctaacaacgcatcttcacagaccaagaactacgagatcaccctttcattctggggtgacggagggatcgtaccattcgagcctttttttcatgcttttcccggcggtctggagaaagcagcaatcaataggacttccctaatcctcccttcctgaaaggaagaacgtgaaattctttttcctttccgcagggaccaggaggttggatctagccataagaggaatgcttggtataaataagccacttcttggtcttcgactccctaagtcactacgagcgccctcgatcagtgcaatgggatgtggctatttatctatctcttgactcgaaatgggagcagagcaggtttgaaaaaggatcttagagtgtctagggttgggccaggagggtctcttaacgccttcctttttctgcccatcggagttatttcccaaggacttgccatggtaagggggagaaggggaagaagcacacttgaagagcgcagtacaacggagagttgtatgctgcgttcggaaggatgaatcgctcccgaaaaggagtctattgattctctcccaattggttggatcgtaggggcgatgatttacttcacgggcgaggtctctggttcaagtccaggatggcccagctgcgccagggaaaagaatagaagaaacatctgactctttcatgcatactccacttggctcggggggatatagctcagttggtagaactccgctcttgcaattgggtcgttgcgattacgggttggctgtctaattgtccaggcggtaatggtagtatcttgtacctgaaccggtggctcactttttctaagtaatggggaagaggactgaaacatgccactgaaagactctactgagacaaaaagatgggctgtcaaaaaggtagaggaggtaggatgggcagttggtcagatctagtatggatcgtacatggacgatagttggagtcggcggctctcctaggcttccctcatctgggatccctggggaagaggatcaagttggcccttgcgaatagcttgatgcactatctcccttcaaccctttgagcgaaatgtggcaaaaggaaggaaaatccatggaccgaccccattatctccaccccgtaggaactacgagatcaccccaaggacgccttcggcgtccaggggtcacggaccgaccatagaccctgttcaataagtggaacacattagccatccgctctccggttgggcagtaagggtcggagaagggcaatcactcgttcttaaaaccagcattcttaagtttaagatcaaagagtcgggcggaaaaaggggagagctccccattcctggttctcctgtagctggattccccggaactacaagaatccttagaatgggattccaactcagcaccttttgttttgagattttgagaagagttgctctttggagagcacagtacgatgaaagttgtaagctgtgttcgggggggagttattgtctatcgttggcctctatggtagaacccgtcggggaggcctgagaggcggtggtttaccctgtggcggatgtcagcggttcgagtccgcttatctccagcccgtgaacttagcggatactatgatagcaccgaattttgccaattcggcagttcgatctatgatttcgcattcatggacgttgataagatccttccatttagtagcaccttaggatggcatagccttaacgttaatgg

SEQ ID NO: 15936 - DNA, 10093 bp, Oryza sativa
agaggtacctatgctcatctacataggtgtcggttctactattcaccgtcaaaagctatcataattcttaaggtttaggtgataaaaaaatcattgtcacatcttaacaagtgtaaagaaatattgccatatcttttttaaagtcaacaacatatcggacctacttggttatatataacggaatattatcctgactatggctgtaaccaaacggctaccttcaaacttgtctaatcgtagacgctacacactgcgttaaaatgtggatgcaaccaaacaactcctacataacattgctataaaaatattctctatgtttcaaaatattagtatttataggttatcatggtgggacagtagttcttatattttggaacgaatagagtatttataggcatgacatatcgaaatgggtagttgggagcaaaacgagaagaaatttgaatgtgaatttgaacgaatagaataggtgtaaaatagaaagtttttgaaatcagcgtgttttatgtatgtgtagtaagaataatccgtcgataacctatcatctacaataaaaatatagggtcatttttctacccgatgatatgataaggacacgcctacgctgtccgagaatttagcccgatctttcacggcacaaaagaatatgaaaatagcttctctgaattttggtccaaaataattcagccttaacaatattgcactctggagctcttctcggcaatattgtaaataattgagtgtatgaatcctcacggcaaatataatatatttcataataatttaattggataataatcaatggcctcaactacagaatatatcaatatccagtgactcagcaatagtagttctcggctagaaaaaattatccagcgaccaaacaaaatcagattattaatgtcacacgcacgtatatcaggctcccaattgacgcacgtacgacaaaataagaccaactaatctgattatccaaatcaaacaagagcagtagcaataatagatgtaacgatagcagatggatttgtcttgcagagatgcaatccaaaccctagataaatcttccacccgcggtcacgacgaaccatgatcagaagagagggaattccaaaaaaattccgatctgaacccaagcagtagcttgatcacgaccttctcaatccaagttggatcggcagcagatagatgtaggaggatgcgcctccagggttcctagtgttccagcacagaaccacgaagaatcaccaaaaaaaaaacaatctccccttcataaggccagacctagaccatattaattaaaactagcaataatcgcgcagcgtatgtgcgtaagatgatacataatatatggttgtcagtgatatttttaattatacgtaagatgaaaaacttatatgtaagcaagcataatgattgcacacagctggcacttgacaaacattcatctgatgaacaaaatatatacacatctccagattcctgtaataaaacatatctccagactccacatatatatcatgggcatttattggaatcccatatgccatcagctccaattgttttggttatctagttaactacaaccaaaggactttcggaaaagacaaaaccattaatagtattgattggtaccatcagagaataaaaggagatcataaataagacggttaatatcaagaacacatcacccgtaaggcacatactgaacttggtgatttctcaacctggtgataacaattgagaagagtatgaatctactacagacattacatctcttgatctatctctgctctcagtggtacacacatatacatatacatatatatatatatatatatatatatatatatatatatatatatagacacacacacatatacagatatattctaatctctcccattaatgcttataactccaaacttatgtattcaatttctaattaatctgtttgaactaatgttttatataatcaaatatattattttcttctaccctatagagtccaagagatgtaagctcctcaatgactgatcaattataataaattaattagatacagtaatcattagtagtacttcagatatatgtgacagggcgatcgatcagtcacgtcgcgttggaatttcagatatattcgcagtggattcagatcatgtgcagtactgcagttatagctatgactgcaacttaagaattgcatgcaatttcagccgtccatttatattatcaacggttcagatctagtgatacagtgaccgcactaacagtattctgtgctacagtatttatgctacagtgctatgaatagtgcacctcgctgatctggaccgttccatctgcatccgttgatgaaaactggtactgcctaagttgcagtcccagtagcgactgcacctgatacggattcatgtgcagttgcaggtttctgttgtttaattattaatgtttgttattactgtaatgtggtttttacctccaaattgtttccactaattagtatttatattaggccctgtttagttccaaaataaaatttttcacctgtcatgtttagacacatacatggagtacaaaatgtagaaaagaaccagttgcacagattgcatgtaaattgcgagatgaatattttaagcctaattgcgcccaagatttgacaatgtggtgctacattaagcatttgctaatgatggattaattaggcttaataaattcgtctctcagtttcttggcggaatctgtaatttgttttgttattagactacgtttaatacttctaatgtgtgtccgtatatccgatgtgacacgcaggggcaaaaaaatttgccaactaaacaatgccttatttattattattattattattattattattattattattattattaaccttatatagttaagtatagactcttacgtccccacccaatttatcctttaataaactatgataatatatatgcaattaaaaaacaccttacttttacttttgttggcatgttttctaaagaaaataagtctaccttcttttcaaatgatggaaaatattataaataattgcttatagatattacttaaatatgatataatatgaagctaacatgttagaaaattataaaagcaattaatgtagacgaaaacaatttatggataaattgtggcagatattctgcggttagtgcttacttttataagtgtctcaaacttagcgacgcatgaccgcgcaaatgcgcgggctatcttcctagtttttatagaaataagaagtcaaagttgtgttttggagaccgtgtcgctatccaaaacgacttcctttacgagtacggagggattacgtattcaacataatggtttctttatattaattaaagtatattatgaccatattaatctatactttctatatagttggtaccactaacttctaaagctcaacatgcaaatgtgccacatcatcatccactagcaattaatatctagagtattttagatctcatgcaaacatgatatatcatttgtaacttaatatacaagcaatgttaaatcatcatcttcatattatttaaatatatacatctaatatttttataatgtataacataaattcatccatatatctcgcagaaaaaaacaccactcaggattctagcatgacccaagtaggctctaattagcgcatagctggcccattacaggcatgtcagatccatattaattaaaatatagctaatcattattaataccggcaacatatagaaacatatattaaactatccggccacgatgcaaatctcaccattagcattagcattatgaacctcgtactagcacttgcatgcagcatttttggtcccaaaaatggctcatgtgaagtcgacctgaatgcaaccaatttggatatattttctttgcttcttttcttcccttttcttgtgaaaattaactcctcaaaaaaatatatatttgatgatagacaagcgctagtaaatttctccatatttttgccaaatttctcatcaaaataaatagctccaaattaaagaccagatgatattagagaattaccaactacaatatttaaattatcgctagtcatgtctccatgaacatcttgacgagtcatgggctcatcatcctcccttccttgaaacaaagcgacggtttgacttatatttaacatcttctaccttagccggcctcactctctagtgcaaccttagaagctttgattgtagtctcggatagcatagtaaaatcatatttaatggtgcaagcggaaacataaaaagaattgccatcaaaattcccataagtaccaataacattcagaagtgcgagcaattgcattctcacctgagctctcataagcaataattttagaacgtacggtcacatcattctctccctcttgaagtaaagccgtcctcggctttgaggtaggagcaatagcctttttcttcactttcaaagcagcaaacacctcagccttaagggcaagtactatgatgcttaatgtgttgcccctaaaaatgtcatgtaggattgaatgatgaggtggaagtaataattgaggaaagagaatgtgagccacctctcatgcaaggggcaacctccacacaaaccccaagaaaaaggagatgaaagaaagaggggattggacaaacaaataaaataaaattatttgggttataatgagagaggtggtgtagatgtggtgtattgtatatatcaccgcttatcttacatggataaaattagatgtgacaactacccctactataaaacttgccctaatagcagtatccggcatcggtttgagcacatgatatatgcccttgtacataaaagaaaaattattggaacgaccaccgtgagtagcatcgagatcaaactgccgaggtctacccaacaataaatgacaagcattcattggtgcaatatcacagtccactatatcaacataatttccaatggagaatttaactctcgccttatgagtaattttgagtgtaccactttgattcatccattggacattacgcggcattggaagcctccgcgtagacaaagacaaagcatgcacaatatttgaactaatagcatttgtgaaactaaccaccatcaataattactctgcataccttatcttgaattttgcacgcagtctgaaatatattagatcgctgccctttcacatcaacaggagtatcatcactgtgtacttcccatgccatcatagataaaccatctgaagcatcattagtatcatcaattttatggtcagactgaatatcacaggaagaatcactaacatgcaaccccaatgtagaagaaagattaccactctcatgcataactgtctggtcaagcactgcaccctttagcaataactgagaatcttcttcatggaattctttagaactatcagttggcttggtagctagagattgtaggatagcagcagcaacaaccttttccagtgaatctgttggaaatttagtcataattcggcatattttaattcaaaataacaagataataaacatgatatttacaatgggatttgatccagtgatagtggtgaatgtaatcaacatgagcatgcttaatgtagaataagcatcaacaatcacataataacacaatgttgacattgcgatgaacattaacagtaaaacttctaattgaaataatgtaagaaggttataccccaagaatggtcctccgctggagtttgaggcagtattgcctccgttggtgttgacgggagcctccttctccttgtatccagtgttgccgttgtctccagtgttcgacatattggtgaaggtgaagtagatgttgatgaacagtgagtagtcgcgccttgcgctccccaaaaacctgatcgcccgcccgtccgtgcaaacgtcgcagcagcgcgtggtttcggaggcctactctcccaacgcgtgtgcacacactcgtcgggataggattaccacagcagcaacagcgttggaaaatggatgaaagtgtgtctcacaattctcgcgggagatcaaatccattctcattttataagaggaatggaagatgaagagtaagagtcatggaataggaagaggaatagagcaactaattgtcatcaactagccatgaaccatcctccactacacaaccatcaaccaacaatcaattaggagtaattgatgtaagttaccaatggaataggaagaggaatagagcaactaattgtcatcaactagccatgaaccatcctccactacacaaccatcaaccatccatcaattaggactaattgatataagttaccaattccctaaacaaatggattaattctcaaaacttttcatcctattgatatcctataaaagaatgaatacacatgaattcctagcataatgaaccttggaatttatttgatttaattgatttaaatggatcaattacccaattaaatctaacagaatcaagtgaataaacaaattttcgtcgcaacacaaatgtcatatcttcccatgtctgacaagggtcatccacatgaagccaccatagcaaaacatctttatcaaatgtctcttctgcataatacatctttacgactgattgaaaaccacggccctcaaaaaaattctccatcgcatcttgccaatcaaaatactcacgaggacatgtttctagagatagctttggcatacatttcattttcttgagcaaaggaaaatgatccttcttaccaaagaagccaaaagaaataccgagctgtaccatgagcaacccaggctatgcctacgctgtccgagaatttagcccgatctttcacggcacaaaagaatatgaaaatagcttctctgaattttgaaccaaaataattcagccttaacaatattgcactctgaagctcttctcggcgaggtcaaccgggttttggcacggttgataactagaggagacgtggtgttgcgattgcgggactcagtagcgtgttcgttcagaagccggatcgagttgtgtcgcgactccacccaaatcgactgtttattagtacctatcaaaagatcgagacctaacatcctcatcagttggtatcagttggtaagggtgtaaatggctaactttgctcctcgtagcttctcatagaatctccagctattaaaagctccccaaccagtctagattttcacctagattctaagaagctatagttgtagaatccaaaaaatgaactaaaagacaaatgattctcacaagcttcttttcataattttaagctccttaaacatggtctaaaccactaaccaacttatgttgatatataagtgggttcacgggttagtcacttatacacccctactgataggtttgtaggctttttgaacatacaaagcaaagaggctttatagtttcaaaagaaaatttttgggtattacatcagacgtttgaccagatgtcggaaggggttttcgtacacgaataaaaaaactaatttcataacttgcctgaaaaccgcgaagcaaatttattaagcctaattaatccgtcattagcacatgtgggttattgtaacacttatggctaatcatggactaattaggcttaaaagattcgtctcgcgatttccatgcaaactttgtaattagttttttttaatctatatttagggcatgtttgggggagcttaagattctgagaagcagctggttagaaatcagcttctaagaatctggaaaagctggttttccagcttttgacttctagttcattttctagattctacaattatagcttctcagaatctggaccataagctgtactgtttaggggagcttgtgattttaggagaaactgcaacagctagaagcttcttcaaacaagcccttaatgctccatatatatgtgaaagattcgatatgatgtttttaaaaaaaattggaactaaacaaggtctaaatggaagacagataaaatcgatgtcggagccacggacgcattagtgccctgtccagttccgtcgcctaaaatagtttgtactactaatcgttttattttttttaagtggtaaaaacccatattaaaagaacatagaacatttaagcatctctttaaaacatagcattgagaaaacgtaagaatagaaaaaaaaaaggaattttttaagtataaaatagaggattgtaaaacataaaatcataggaaaaacgtgaaaacatagaggagagataaaagactcgaagaaaagatttcatgagcttctacctcctattattttttccttaaaatttgtatagcacgaggtattccatagaaatactgttcattcctttgcattcaaagggtcatctatgaaaaaattccgtaggataaacaagtttaatggtatagccaactactaactccaaatcacttatagtcaacttaatagccaattcatacaatagttatatactacactattaatacctagtctcacctattatacacacattgtatcttaaagtccgtgctataactgactataaatctgtagtccgctgcttttctctctgttttttcatcttcttaaaatatatttatagctgtcttatagcctgttattgtaccggctctaaaacacctggtatacaactttcatttaaatcaaacatttgtgccaccataccacaactagcctaagagcaggtacaatagcagactaatagccagctgcaaacatattttaataagataaaagatgagagagaaaagcagcgggctatatatctgtagccagctgcagcacggaccctaagacgcaatatgtgtatgacatgtgggaccatatattaatagtatagtaagtaattattgtataaattagctattagattagctatagatgaattggagccagtagtgggctatactattaaacttactctaaacttagttatggcaaagttaggcatcaaccaaacatccccttaaattttaagattggggtcatgagccaatagggagttggatgaccaaatgaccaatccatggaagggatgggattctgagtggacgacctggctcatatcgatatggcgcttcattttcacccttttctttgagactaccgttatcatagctcgccgtaccctttcaaattcgtgtatgtcactgcaggtggaccccgcggtctccgggccccgccatgtcagtgggagctgggggaagcacggcgaggtgcgtgaagcaataagcttcacctgtcgccatcaccgtctcgggacagctgcctgctccttctccatctctctcaccgagcgccgcgtcccgcatccttgctcccggggccgccgccgccgacgacgcctagcagcttcgggttgcagcggcgctgagggcgagggagggagaaggccggccgtcaacgaaggtggcagttgggggtgcgcgctccggtcgctagccagctagggcaagggccggaggccgcgagcgccgccgccgccgcccgtctgccaccacctgctgccgcgggtcgtcgttgcgggagccgacgtccgcgggcgcttcgagaagcccgtgcgtgagcacgccgccgccgaggaggcggacaagcgcggttctccagtcgtacgccgcgtcgcgtcgctctctggcgcggaggaagccaggaaggccctgccgaaacgtaccggccggccacctgctgctccctctgctgcgtcacgcgccggtgagggagtcagggtcgaagcgcgcgtccgcggcgctgagcttcccacactgcgcgtcaagtcgagggaggagaaacctgcgcccgccctgccgcgcgcccgcctcgaggcacaggtacgcactgatccgctcgtccgcctgccgcgcacaacacgatatgcgccgccgccggccatttcgcgcagcttctgcgtgtgcgtgcgactgctgcgcttatgcgctacgcgcgctcaccttgtcaatgcagtgcccgtgcctcatagagaagagatgggtggattggccatcaggcgaagcaaaacagctacacacacatactgcagccacgcctagttatttctgagttctgagcgctaaaacagaagacaagtttggttac

SEQ ID NO: 15937 - DNA, 597 bp, Oryza sativa
gatgtggatgcagcgagggtgatgaaaagggagttagtacaagaggggcttgatctaagtgaacatttgtcggcgagtgttcattggtcgtcgtacggagtcaaccctgaatacccgacagaagtagcaggccaatatgtgaatccagatgattacttttatgtcgaattgagtggtggtcacgattctgtctcagtagaagtcaatagagatgatgttgacgaggaggcaagtgttgagcaatatgatgttgaacttgctgaagactctgatgatgaccgtccattccctccacttactaataatgacaagttagcattagaggaatgtcgtgcatttgagaaggtgtttgggaggaagccggacattcctgagtttagggacctaacacatgcccatggtgcactagtagatggcggcatcaacctagatcagttgccagaaccattccaggtggatggtctcagaaagggtttagagttcccatccatggtcgcattgaagctatggctccaggagtacgccatcgtgcaccatcgtccataccgtgttgtcaattctgccgcaaataggaggtacactgttaaatgtgaaaac

SEQ ID NO: 15938 - DNA, 1316 bp, Oryza sativa
attgagtggtttcccataccacacaaatgaggctttaaggcctgacccttgaactcgatgtgcaatcgagactctgactatttcatgtaccagtgcccattgatttgtttctgggcagttgagtaccaccttccgcaccgtgtcatgcgacagttcgggaagaaacaagattggccggttgaggacatctcaactggagttgaattacataagtaaatatttcttatctttgtttgctttcattgtcaatgttcaattttgtaccatttaacccttgtcgatgctcactactatttcatcaccttctacttgtctaggtatgacagggtgagaacaaagaaggtgaaagactgggggctagagcataatagatacattgatgaatggagaacagccggaaggaacgataggtacatcgaaactatacaccaaaatcatcttttctcagagtaccttcgttggctgcataggacatatagactgttcctccgccctacttggacggaagccgacatagaggatgaccgcgactccgatgaggggcggaattcctatgatgtccggactagagttggatatcaaatggagcacgccccacttagagacagagtcgtaagttttcttgcatttatcaaagttacttacatttgcaccctagaccctaacatatatcttttcaagctttcagtcgagagagctcctcaggagtgtgaatgaaatggggcatgccctccaagctccgaggggtggtgaggacatggagaacacgctccgcaatgttttagaggtaaaatttatttagcactttgcattacttgagttattcctaacaaacttcttttttttttgaaatgcagaaagttcgtcaaaggtgccggaaacttgcagcaagattaggttgcaggtcggttggattggacgacgtgtaccaaccggggagactaccaccaccactacctcaatccgcgcgtccaagtactgctcgacactccatcaggatagaagagcgtgaaggagttggtggctcgtcgtcgtcacgcattaagcaagggaggggaaaggggaaggcgccggctccacctagcgacgacgatgacgatgaggacgaggaggatgaggactacgtcgcaccagacgccgaggagatagacatgtcacagcttcccgacgcgcctcaggggacgcaacccacgcaatacaacttgcgatccactcgggcagcgaaaaagaggtaaaatgagcttaccattctcaaatgttatttgatttcccttattttgtttttaaaatgttttaaacattggattttcaaatgt

SEQ ID NO: 15939 - DNA, 656 bp, Oryza sativa
gagaatggtaagctcattttacctctttttcgctgcccgagtggatcgcaagttgtattgcgtgggttgcgtcccctgaggcgcgtcgggaagctgtgacatgtctatctcctcggcgtctggtgcgacgtagtcctcatcctcctcgtcctcatcgtcatcgtcgtcgctaggtggagccggcgccttcccctttcccctcccttgcttaatgcgtgacgacgacgagccaccaactccttcacgctcttctatcctgatggagtgtcgagcagtacttggacgcgcggattgaggtagtggtggtggtagtctccccggttggtacacgtcgtccaatccaaccgacctgcaacctaatcttgctgcaagtttccggcacctttgacgaactttctgcatttcaaaaaaaaaagaagtttgttaggaataactcaagtaatgcaaagtgctaaataaattttacctctaaaacattgcggagcgtgttctccatgtcctcaccacccctcggagcttggagggcatgccccatttcattcacactcctgaggagctctctcgactgaaagcttgaaaagatatatgttagggtctaaggtgcaaatgtaagtaactttgataaatgcaagaaaacttacgactctgtctctaag

SEQ ID NO: 15940 - DNA, 1549 bp, Oryza sativa
taaatcattatatgtctataatctcaacaatccaaaaaccttattataggcactgtgattttactatggctggttttgccgatgcactgaggccggataaattcaccggtgtgcattttaagagatggcagatcagggtcactctgtggctgacagctatgaaatgcttctgggtgagtactggcaaacctgaaggagttcttattgctgaacagcagaagcaattcgaggaagccactactctctttgtgggatgcattcttagcgttcttggcaatcgtctggtcgaggtgtatatgcatatgaccgacgctaaggagttgtgggatgcactgaatactaaattcggtgctactgatgctagcaatgatctgtatatcatggagcagtttcatgactacaagatggctgacaaccgttctgtagtcaaacgggctcatgagatacaaaccatggctaaggaactcgaactccttaagtgtgtcttacccgacaaatttgtggccgggtgcattattgcaaaactacctccatcttggagaagtttcggtactgcactcaaacacaagagacaggaatactccgttgaggggttgatagcgtctcttgatgttgaggagaaagctcgggaaaaagatgccgcgtctaagggcgatggtgggcagtccagtgccaatgttgtgcacaaggcccagaacaagagcaaggggaaatacaaagctcagcagaccaccaacttcaagaagcagaagaagaacaacatcaatcctaatcaggatgagaggacttgctttgtgtgtggccaagttggtcatctggctaggaagtgtccacagcgcaaggggatgaaggcacctgcagggcagacttctaagtctgctaatgtgaccattggcaacactggagatggaagcgggtatggtaatttacctactgttttttcagttaatcaatctactaattggtgggttgatactggggccaatatacatgtttgtgctgacatctcattgttttcttcttatcaggtcgcacggggttccaccgtcctaatggggaatgggtcacatgcttctgttcatggtgttggcacggtagatctgaagtttacttcgggaaagatcgtgcagctaaagaacgtgcagcatgtcccttctatcgacaggaatcttgttagtggctcccgtctgactagagacggatttaagttggtttttaagtctaataaagtagtcgtgtctaaacatggatattttattggtaaaggttatgagtgcggaggcctgttccgtttttccctttctgatttctgcaataagtctgtgaaccatatttttggcagtatggatgatgaggctaatgtttggcattcacgtttatgtcatattaattttggcttgatgtctcggctttccagcatgtgtttaattcctaagttttccattgtcaaaggtttaagtgccatagttgtgtgcaatcgaagcaacctcgcaagcctcacaaggctgccgaggagataaacttggcaccactagaactcctacattca

SEQ ID NO: 15941 - DNA, 1266 bp, Oryza sativa
gtctgatcgcggtgcggagtttttctcgaactattttgacttagtctgtgagaaacatggcatcatacatgagaggacgcctccctattctcccgagtctaatgggattggtgaaaggaagaaccgcacactgactgacttggtgaatgccatgttggacaccgcgggactgcctaaggcatggtggggggaggcattgttgacctcaaatcatgtgttaaacagagttcctaacagaaataaggacaaaacaccatatgagatatggattggtagaaaaccatcactttcttatttgcgcacatgggggtgcttggcgaaagtcaatgtaccaataacgaagaagcgcaaacttggacctaagactgtggactgtgtttttctgggatatgctcatcatagcattgcctatagatttttaatagttaaatccgaggtaccggacatgcatgttggtacaattatggagtctcgtgatgctaccttctttgagagttttttcccaatgaaggatacacatagtggttcgaaccaaccctctgaaataattcccaattcaatcacaccaccagaacaaactgaacatacacatgaacttgtctctgaggaggatgtcagtgaagctcctcgaaggagtaagagacaaaggacggctaagtcttttggtgatgatttcactgtgtacctcgtggatgacactcctaagtcaatttcagaagcatatgcatctcctgatgcagactactggaaggaggctgtccgtaatgaaatggattccattatcgctaacgggacttgggaggtgacagagcgaccctatgggtgtaaacctgtggggtgcaagtgggtgtttaagaagaagcttaggcctgacggtactattgaaaagtacaaggctcggcttgttgctaagggctatactcggaaagaaggcgaagatttctttaacacttactcacctgttgctagattgaccacaattcgtgtgctactttccctagcagcctcacatggtcttctcgttcatcaaatggacgttaagacagcttttcttaatggagagctggatgaggagatctatatgtatcaacctgatgggtttgtagttgaaggtcaagaaggcaaagtgtgcaaattgttgaagtctttgtatggtctgaaacaagctcctaagcaatggcatgagaaatttgacaaaacattgacatctgcaggctttgtagtcaatgaggcagataaatgtgtgtactatcgccatggtggggg

SEQ ID NO: 15942 - DNA, 10995 bp, Oryza sativa
attgaaaagtacaaggctcggcttgttgctaagggctatactcggaaagaaggcgaagatttctttaacacttactcacctgttgctagattgaccacaattcgtgtgctactttccctagcagcctcacatggtcttctcgttcatcaaatggacgttaagacagcttttcttaatggagagctggatgaggagatctatatgtatcaacctgatgggtttgtagttgaaggtcaagaaggcaaagtgtgcaaattgttgaagtctttgtatggtctgaaacaagctcctaagcaatggcatgagaaatttgacaaaacattgacatctgcaggctttgtagtcaatgaggcagataaatgtgtgtactatcgccatggtgggggtgagggagttattttgtgcttgtatgttgatgacatactgatatttgggacaaaccttgaggtgataaatgaggttaaatcattcttgtctcaaaattttgatatgaaggatttgggagtagctgatgttatcttaaacattaagctaattagaggtgagaatgggattacactcttgcagtcccattatgtggagaagatcttgaatcgttttggctacattgatagtaagccttctccaacaccttatgatcctagcttgttgcttcgcaagaacaagagaattgctaggaatcaactagaatactcccaaatcattggctcgttgatgtacctggctagtgcaactaggcctgatatctcctttgctgtgagcaagttgagccgatttacctctaatccgggagatgatcactggcgtgcgcttgagcgagtaatgcgctatctgaaaggtactgtggaattggggcttcactatactgggtatcctgcggtactggagggttatagtgattctaactggatctctgatgtggatgagatcaaagccactagtggatatgttttcacactgggtggtggtgctgtttcatggaggtcttgcaaacagaccattttgacgaggtcaaccatggaagcagagctaacggcactggatactgctactgttgaggcagaatggctgcgtgatctattaatggatctgcttgttgttgaaaaaccggtgccggctatccttatgaactgtgacaatcaaacggtaattgtcaaagtgaatagttctaaggataatatgaaatcgtctagacatgtgaaaagacgattgaagtctgtcaggaaattaagaaactccggagttataacgttggattacatccaaacagcgagaaacctggcagatcccttcacgaagggactatcacgaaatgtgatagacaatgcatcgaaggagatgggtttgagacccatgtgagttatactatggtggtaacccagtctatgtgatcggagatcccgtgaattagatcctgggaagaacaaaccattaataaactagaggagagtaccaatatatataccctctccaagtgaagatgcatatactctcgtgagctgcaaggcaggttggctatgtcttaatgagttatgttggctttaattagcgaagatgttgtcctgcagagcattcttgaaagaactcacctttgtgagcttgactgttggtcgcagtctatgaagattttgggtgaatcttctaggaagcttactaaagacctaggagtatgacttatacgctccatccgaggggtagtctacagacggtctagtaccagataagactttgagtgaaacttgcttgcacaagacttgcaattcaaggcgtagtccattgttcaagttgtgagtaagtgtagcttggagttctaggtggatgttcaaccttaattggtctccatcgaaccgctggtatataaacagtatattggaaaaggcaaatctcagtgggattttgagatttggtgggggattgttggaattaatgaatgggccttagcccactcgaagattaattctttggaaaatcacaaaagcccacctcatggggtggcatgcatgtggagtttaataccaccttgtttattctaggagagggggacctccttaaaagggaggatgccctcctagccacttgaagcatgtgtggtggagagaagaggggaaacacgcgcgcgctcgcctcgcctcgccgggccgggccgggccgggccgggcagcgcgtgcacgacgtacgcgtcgaatggtccgaaaaattggctcctcacccttgcgcagatgcagcctccttttgcagttttgttttgctgcaaattcggattcgtttttgttttggaaacgttccgaaaaatccggtgcgtgcaaacggcgtggagtccggataagttacgcgcgacttatccggttcggttacgcgcagtagagatcgtgcgggcgccctaatcaagcgacccttctctatataaaccgatctgccgtcttcacgcaacatatgcgaaatcaatctagggtttgcctcctactctgtactgcgccgtcgctcgtagactactccatcccgctcgctggcgtgcaccggcgatcgggagagcaggtctccgaaacctctgccttcgacgtcctgcaccgggagaaggcggcaataaggtttttgggaagcgcttcgtgcgactgctccctgtttgttcgcgacggctcgccttcctcttcgctcgcgtgtttcgtgccttcgtagacacctgcgaaaagtttcaaccaatcagccggtctttccgtcatctcggtacgtgttcaatatgttgcgcatatttgatctgttcatgttatactgtgtagtttacatgtatagatctaatgatgcgttcatgctagttttcttctgtaatgtcatgatttatttatggaatagattaaatcattatatatctataatctcaacaattttgacacctcatcgagccagtaatctacatggattgtttgttccactaatgatttgaatgatggtcctgaatgtaattcagttcactgatgtccgctcggcagcctacttcaatggacatcaacacaacatagaagctccccatcagaatcgtaaaaaagaataccgaatgagaacatacattacatatggcattcatataatgctactggatctcaaacttgtatattgctgatggtgtgtttctcattttactttttacagctcaatgttttttctctatgccattcttattctcagtttgtttgtcataacattagtaaaacatcactcatcgtggtgtacaattgtatgacatgtacagtccaaacatttggaaatgaagcgagcagatattaacagtagctgaggtaagtcgattacttccactctgaattaacttgacagattctataaggaattataaatgcagctgttaatttgatttacctttgtacatgattcaagattcaagtgcaggagctgaaaggttttttttacccctgatcaagaagaatatgaaccttaatggccagtgtttactgtggttttacatcatgattcacttgatggatgccaaagtgcaaatataagcccatcaaatgtgtccttacctaaatgtgtatttgcctacgtcgctgattgggacaggttctgaacttctgtcatgtccctttaacaacaattatttttggcatttagtatttttcatagccacactttattcatgtagataaacaaaacctcttggtgatattgctaatttcagttgaattaagtataataaagtatgctagagagaattatctctccctcactgctgacaaagggaagaattggttcaaatgaactatgagtatatgtagcacaagaaggaagcatttctagagcaataaacttgtctgcctctacttctattagaggtgagctgaaaacaatctataattctacttgaatacaattagcatataaatacatgtcataaactcacagtgtatgaacttttgtatttgaattcagaatcaacaacatgatctgacacgcacatccaactaaggggagcataagacaggcttgcaatgaacaagctttcgaagaaatgggtccattcaataagatgattttttttctcgacagatagaaaccgcacttcatgacttcaacttagtttgtataggcagtaataagccccataaaagacaatactaagaattttttttgggtaaaaatgaatgttttttccacataagtttcctataatagtaatatgatcgaaccccttcctcttttgatatgggttttcacttgcaacttttcttgtttttgcagcaaacttatttgcaaagcactcaattcactaccctgcaattgcttcacaagttaaattcgtgctttgaaatttatacaattcattcataaatagcccaccatccagctgcaattaatagtttcgatgttgaaatgcttcgatataacattggaacactgggctatccttttcttagcgatgtgaactgctctcatcaaggggcaacattaattggaggtcggaaagtgtgaggaaaaaaaattcatggcatcagcatttattcagctggatacttacagttttcttttttaccagaatggaaatactgagtatgtcctttgtacaaacaccaagggcagatgttgtaaccaataaaatactgcgcaacttaagtgcaggatggacaatatatttcttcatggcagtctctaatcagttagaaattggcctaccgattcagcagtacatgtcatttgatgtgaaactttgttggttttaggtaattagcttgttcgtttgatttatgtgtacttttcccaatttcttttttgtaaaataggatatgtttgataaactcactattgtggagggctcatatattgttgttgttttatagtgtgtgtgtgtctgagattttcatctaacacgcacatatgagatttgtgtataacaacgaagctaattatttgaatcatcgaagagttcatactttgcgccaaaatttgatctttccaaaacatgtattgcacgtgcatgattactagttaggggggggaaagggagaaaccgggaaaaaaactgcaagaaaaaaccaaaataaacaactagagaaatttaaaaaacatatatgaaaaaaaggccacgcgccacttgccctcgcgccctcccatcgcccctcgtggttgcgccgcgcaggagagggcgcccgcccctagccgcctggtagccttttcaggcctcttaccgtgcaagctatggggccgtacccttagctcaaaaggttgacaaaaacacccatgctacagtacaagcacccatatatatgtggcttaattggatggagacactggtaaaaggtaccaagcccacagtgagcgtgaccctaccacgaggagacgggggagcgcaacgaaattatttcctcacctaccctcgcctgcgcgtggactcgtttccatcccattacatcgcccttgcccctccccgccgcttcttctccgccccaccgctcctcctccacgcgcggcggctttcttcctcctcctcggccgccgccgccatctctggcgccgatggggaggcgcggtgtcggtcggaacccgctctctcctcggggcgctcgtcctctgcgtccgccacctcctctccctcgttcttggcggcggctcgccggtgcgcccgcagccaccagttcttggcggtgggaggcgcccccggctgccgcggcagcgttggccaccaccaccgtcgacctcgccgccacccaccgcgtcggccaccaccaccggcctcgatgcgtcggaggatttggattgggagttcactagcagcagcagtagaagacaacacaagcgcagcagcagctgcaggaagggaggatggaggagaagcagcttcaagaatcaccaacaaagagtgagcaagagagagagagaggtgagaaaatggtggttcttttgatctatatgccctgcttctgtttgcagaaatgcgtgtgtgcttgcagtattgtcttgtgggttgtttcttgggtttttttaattgtatgtatggccattgttgttgtgggaggaggaagaaagggtgagagctctcttgattgcttggcttctccaggtccatggcttgtttcagtggtagctagggataaagatcaagagaaggccttttccttttgcattgcatacttttttatttccttttcgtgcactctttgtttcatgtctttgtggtttctttgatctgaggagcaagttcagtccctttttttaattgaaaaaagccaattccttttgaatcctctcatttccatcttgttcttgcaatcttgctaaccccaaacttaggaagaagctagtacaatgcgggcaaggcaaaaatccagcgcaggagcggaggaatcggtggcgggagaaggaaatcggtacggcgggagaagattttggaggatgaatcggagatttcgccagaggaataggcgtgaggccacgggtgggctaagccacgctgccacagcgcgtgttcctgccgatttcgtcgccgcacgcgccctcgtctctgcgaggtttcgcgtcgctctgcttgggtacgagaaccaagttaggttccgggcgcgcgctccacatcagcggaaatcctccgtggcactggtaggtaacgcgctccagctgtgtgcactgtgagaggcctcacaagtagaccgttgtatattgggtggtattacccgtaaataatgcaaactttgtacagaacaaagtgtattacggtttttctcttttctttaagtaactagtataatgcccgtggattgcgacatgttctaaataaaacttattgacatgaattaaaatactaagcctaccacaattgggcataaatgatgaaacaaatataatcgtagaaataacaacatgaaacaagtaactttgacctgaacgaatacgaattcaatatcatgaactaaatcattttttatttagctatatacaattcaaatacgaggaattataagtttcagaaaaatttaatggatcaaatactgataaaactaacactataaatgaaaaaacaacttaaattagctagaaattaaaaaaacatatttaagcccataaataaatgatccattagtttagaacggttacccatttcattgacataaattagtatgtgagtgatataggagcatggttgggcttaactgagaaggaatattgccgaacatgaactgttcatcgtctttcttagccaaaggcaagaaatagaagaggggaaaatggacgttggtgatccagcgaccaaacggcggtgaggaaggttgtcacgcacagaaatttaggccccctttgattcaaaggaaattcataggaattttaaaggatttaattcctataggaatttttcctatatagccctttgaatcaaaggaatgaatcctatggaatcctataaaattcctatggaatgcctcttcccatgcaaattttgaaggaaatttaacatgaggttctacctcatgttaagaatcctttgagtctctctctctcctcaaattcctgtgtttttcctgcggctcaatcaaatggtcattcctatgttttttctgtgttttgcaatcctctgttttacacttgtattcctatcagaattctatgtttttcctattcccccgttttttcattcctgtgattcaaagggggccttaaccaaatttctaaactattttgtgtataaacccttgtctaagaatcaagacaaggtacacaaaacgataaattaatatacagatctaaacgtaaataaaatataaatacttacagaaaaggcacttaggcctcacacaaaaaaaaaatcctcacaccaaaaagaaagcagcaatggaaaaatgcaatcctatgaaggcttcagctccactccccaagcaaaaactcaactggagtataagccttggtcctttaacaccgtctttagctcagaaagcactacatttctaaaaagagagaataatagcaagactgagtataatgatcgtatccagcaagccacaccaatgattaatttgtttgtcaatttttttaattgattatatgatgtatgtattattagaataacttcttgagctctcaaaattcacagaaaatttcaaatagtattttagggcatgaagaatattacaaaagtatttctagccatgatttttaaagaaaattttaatcccctcattaatttcacttgagaatttgctttaactttaatataaattctcgaaatgcatcatttaatattttttaatcctgaacgaaaatcgggcatgataaatctacccctacaggaatcttatcccaagattctggatggctagaaaaaaaaactaggtgtggacggtgttgttgttcctttctgttccaactgaccgattgattaaccaaacctcatgactgaactggctggattcaactatggtgttctgtcactccataaaattgaattgacttattatgcttttatctgaccctagccttgactgtaggtgctcatagatcttactttccttggactaaactattagcgatggcatctttgataacctgaccctcaggctctgttcgtttgtgaggttcccaactcctcttcctcgtcttccacgtgcacgcttttcaaactaaaagttgcttaaaaaatcatattaatccattttttaaaaaaattagctaatacttaattaattacgtgctaatggaccgcttgttttctgtgcataggttcccatcccccaagccagcctcaccttgctgactagaaattcgataatgattatgctcgggcgaccgggcgggagaggaaaaatcgggcgctccccctgccccccgtgcacgcacatgcctgcgctcccctggcccaccacgtgtccaaacacaaacaactctattgcaacaaaaaaaccccacatattttagaaaccctctattaagtgaatttggtttttttccaccaaaaatgtttcatctagtgcattcacaatgtttcattatgtatagatctaatgttgcagtgaactaaaatactccattgtaacaaaaaaaccgacatattttggaaaccccctattaagggaatttggtttatttttgttccaccgaaaaatgtttcacctagtgtactcacaatgtttcactatgtatagatctaatgttgcagtgaactgaaatattatttcgctatttgctgaaacattgtttttatataaggtgaaataacacccaatttaaacgagtgaaacattttcgatctacttagtgaaacaattccaatatacctggtggaacatcgtgtaacatttaaaaataattcaataataagctaatttttttcgtcggaatatatccatgtgtggtcttgttttgaagatttaattacaacaaatttaatggtacaatcggatcatgattttgataagtaatttgagagaaaaatcagtttaaaatagctttccatgtaaatcgggtgctgacgtcatgctgatgtcagcgtccgattttttggagttttggatcgggcgtcaccccctataagaggaagtttaatagtatagcccacaactagctccaaatcatctatagacaatgtaatagccaattcatacaatagttgcttactatactattaatacttggtcccacctgtcatatacacattaagtattgatgaaccctgagttccactcgtcactcaaggctgttgttggcccgatttttcggtgagttgagataactacgatttgtggaaaaacattgacgatccgactacaaccgtacgagacgttgtgttgtgccttagcgatcgatacacctctccgtgggttgttgatcttgccggtgaagatcaaccctattcctgcaagcaaatcgaagaaacaagcaagaacaagataaaagcaatctgatattgcaaataggaatttaatacaaatgataagttggggttccgaagaacaagcagacggacggtctagccgacacgcgcgctgcaagcaagtagcaatggctaaactttaatttaacaaaacccaagaaaccctgaaggggtacctagctatataaataggggtgggaggacgacctaggggtgcctagggtagtgctccacctggctggggcacaccccacatgggccccacctgggccaggatcccaaatgaagttacaagcccataggcccattataggtgacgcagcaccttgtgcgtgtgattccggccacacgagatggaattcggagatgaggctggatccgttggaaagagggctccgaaagcttttcatcaagtactcacgggccaaaaacggaggtcgtatgcagattcggcggccgtttgaagtcagcagtgtagcaggtggccgaatcggattccagcacttgaaggactcgaacttgatatcttgttgttcatccatgatgtgagcaacggatgtatccgtagtagccatcgtcacatcatcctccccttcttcatggaaaaccgtcctcggtttttccatatggtgttcttcacatagtccattcaaaataacctgtttcatccaatcaaaactagagaaactcgaagtagtgtgattagcaataacatgtttctctaaatccgaacaaatgaaaactctatgcaccaaatatattcctctatcattatatttgccaaagatatgaaaaatagcattagttggatatggcaaatcagacttagcaaataatttctccttcaaattatcgagctcacaaaaatcatcaaactgaacatagcccaaagtatttaaagaagatcgcaattcgcattcctctacttcattagcaatgtgaacaacatgcttagaatcagcacacaaagaaatagtagaactaacatgttcattcactagttgtggcatggatataagtgaaacattatcacacaactcttctttatcacaaggaacagcaagtaaatcaacttgtgacaaaggcaactcagcaattgattccactaatggttgctctactatagcatgaaa

SEQ ID NO: 15943 - DNA, 4342 bp, Oryza sativa
acaaagaaatagtagaactaacatgttcattcactagttgtggcatggatataagtgaaacattatcacacaactcttctttatcacaaggaacagcaagtaaatcaacttgtgacaaaggcaactcagcaattgattccactaatggttgctctactatagcatgaaaagtggacaagtgtagctcaccttgagaatactcaccttcatttctctcagcaccatttaatttaccttgcgaactttctttagacatcgcaggtgcttcatcctctttcttctcaagtataccattcaccttttcttggatgtgctgatcttcctgcaaaacgttagtaacaggggagacaaaagattgctcctccaatgtttgcacatcatcattacataagtatattggggattcagaaataggagataaatcacattggtcatgcatcctcgcctttgatatgatctgactctcaatgctacgagcaagcatgaataggtgcccaatatgattatatgtcacactatcaagcaaaacctgaatttcagaactaggcccattgaaaaatctacgcgttgtattttcattgcactctttgagaccactgtagatgatacagaccttaaattcatgaatgtactccctaacagttctgtcaccttgtttcagatgttctaatttctcccgaagagtacatttgtaataagatgtcacaaagcgttttctcatcatggttttcaattcatcccaagtttcaggtttattactaacataagtccaccaaaataaagcagaagaggtaaacttattactagcagccttaatcatttgagcatcagaaaaatcatatatatcaaattcattgtctactgctagctcccaatcaatatatgcaacagaatcatacttcccatcatagaatggtaacttagatgcaacttgttcaaaattatagtcatgtacctcatatgcataacgtggagaagtcgtcatatctcgtcgaaggtgtagaagttgatgttctcgtattcccttacgcaatccgggcatggttagtatgaaacaagaaacacacaaaaatatgcacgctcctatcaactactaggtagtggcagctcaaatatcacacacactcaagctcttacaagtttttaccaaagcaagcggaatggtgatgtacaccgacttaaccaagcaccccaatggaggttggatgtatcgatgccttggcaaacacttgttgtacggctgcaatcagatctgtggagctctgggtaggcttaaatatgtagccaagggatagcaaatgctcaaatcagagaatgcaaagttgaataatggttcaaagtcaagtaccgtgctggtcctaggctagaacgtactagagacgcgagcctagacacaaacgataccacaagatagcaatagtaacaactcatgcacaactctgatatatgaagttcagctcaaacataacagtattttctcttttctttctttattctttcttcttttctttttttttctttccttttcttttctgttgttttttttggtgcggcttttcttttcttttcttctttttatgcacctttctgccttttttttctcactttttttcttgattttttttaacaaaaactgactcaaggaccttaatgtaaggttacagggactcaaatgtaaatataaaatttacagggactcaaatgtaaaagtctaaacctaaaattaaaattatacaaaaatggaatgctgaatttatgccggttccgtttttttcaaacagatctcgaaaccgacaccaaacgaaatttcaccaaggtgtttgacacaactcagaactgagataacgtgatttggagagggaggagggagtcggactgtcacggtggtggtgggtacggtaggtgggagggttcggcctggcccttcacaagtggaaaccaaatccaataaaaaaaaactttccttttcttttctttcctttttttttccttccaccccaccgaatccaaactgatctactatattcctttattcttcctcgcacacatgcacggcacagccaccgaacagaagctatgcaactcaagaactcaaaaactaaccgacaaaaacttctgaaaactacaaaaatagaatcgtggcagcgagctgattccgttttcgtaggtcccgacgacaacagagacacggaggcgacgacgactgtagtataaaacgtgaccagaactcgaaactctaaacggactaaacgctaagaccagcaacacgactcgacgatgcaacacagattcaacaaagcaaaaactgaaaagaacaatgcaatggcacaatatggctaggtaaatgatacaatttttttgtctggctattttttggttataggtagaagaaaactcaccgagaaacgaaagctctgataccacctgatgaaccctgagttccactcgtcactcaaggctattgttggcccgatctttcggtgagttgaaataactacgatttgtggaaaaacgttgacgatccgactacaaccgtacgagacgttgtgttgcgcattagtgatcgatacacctctccgtgggttgttgatcttgccggtgaagatcaaccctattcctgcaagcaaatcgaagaaacaagcaagaacaagataaaagcaatctgatattgcaaataggaatttaatacaaatgataagttggggttccgaagaacaagcagacggacggtctagccgacacgcgcgctgcaagcaagtagcaatggcaaagcgtgacgaccgcgggcacatcgtcaagcataaggcccacctcgtcacgaaaggctacatccagtagagcggcatcgacttcgacgatgtgtttgcgccggtcgcaagactggaatctgtgaggctgatccttgccgttgctgcgcatcaggtctggcaagtccaccacatggatgttaaatccgcgttcctgaatggggaacttcaagaggaggtatacgtgcagcagccaccaggattcaccgtcggcaaggaaggacaagtcctgaagctgaacaaggctctgtatggactatggcaagcaccgcgagcctggtactcgaagcttgatgcatgcctcgtctccctcggcttcacccgtagcgaccacgaacatgcgctgtacacacagcgatatgcgcacaagccgctaatcgtgggagacgacctcctcatcactggccaggatgctggtgacataaaagagttcaagttggagatgctgcagcaattcaggatgagcgatctcggcatgctctcctattatctgggaattgaggtacgccaagatcacaacggcatctctctctctcagtctgcatatgccttgaagctcttggagaagactgggatggtggactgtaatccctgtcacgctcctatggaggccaagttgaagctgagcaaatccaatactgcagctcttgttgatgccacatactatcgcagcattgttggtggcctacgatacctcgtcaatacaaggcctgatctggctttctctgttggctatgtgagccgtttcatggcggagccgcgcgaggatcatatggctgcattcaagcacatactgaggtacatcgccggcacccgagatcatggtgtgtcgtactcaggaggcaagacagaggagctgaagctgattgggtacaacgacagcgacatggccggcgacgtcgacgaccgcaagagtaccactggcgtgctgtttttccttgctcagatccccatcacctggcaatctcaaaagcagaaggtggtggtgctctcttcttgtgaagcagagtatgtggctgcgacaacggctgcgtgtcaaggggtgtggttgcaggggctcctcagcgaaatacttggagcgccagcgacgacgccaattctcaaggtggacaacaagcccgccattgctctatcaaagaacccggttcaccacgatcgaagtaagcacatccaaactcgttttcatttcattcgagagtgtgttgatgccgggaagatcatcatcgagtatgccagttcagtggagcagctagttgatctgcttaccaagtccttgggaaggcagcgtttccaggagctgagcgagcttgttggtgtgatcaacacaaaaggccaaagttgaacttcacaagatttagggggagatttgttacaaataaacttgtgtcgatctgctttgtgtttttggttctggtagtttttccctcccctgtttttctgttgattctgttagagtcacgcacatgacctcgctggtttttcggccgtgtgcgacgttgggctcgtcgtgtgcgtttagttcgcacgggagcgcg

SEQ ID NO: 15944 - DNA, 12205 bp, Oryza sativa
agcagctagttgatctgcttaccaagtccttgggaaggcagcgtttccaggagctgagcgagcttgttggtgtgatcaacacaaaaggccaaagttgaacttcacaagatttagggggagatttgttacaaataaacttgtgtcgatctgctttgtgtttttggttctggtagtttttccctcccctgtttttctgttgattctgttagagtcacgcacatgacctcgctggtttttcggccgtgtgcgacgttgggctcgtcgtgtgcgtttagttcgcacgggagcgcgtcatgcgcaggcacgatcctggtgattgggatggcagtcgccgttgagggatcgtgtccgcatcaaccgggccaacgtgcccatgatcttgtattcgcagaataaaaggaagaagacaaacagaaaatgctgctcagttgttcgcagtgccaaacatttgtgttctgtgtgattactgttcttctctctcgcgtccacgttcgcgtgcgttacgggtttttttgctaacagatctttctatgttgtgatctccccggccagaggaggagggatgtgcggcggtgtgcggtaggtgctctcctccggaatcgccgccgccgttgcgtggtggtggtggtgccgatcccaccccctaccctcccccccctccccccgcggtcgctaactctccgtcgtgcctggagagagaggagaggggagagggggaggtggagtgggaatggcacgtgggccccaccactttttattaattttggtgtgaaactgacatgtgggtcccacagggtttattatttttctataccgaattgccgcgtaagcaccacgtcaatgccaagaccgagtcaaattagctggtaaacgccacgtcagctaaaaccgccatccaaactgctgagggacagtcaagggatccgttgtatcttggttgaaaatcggattcatcgataagttaagggacctcggtgaacttatttctcgtgtaccttcatcgatccagcaccaatctcaacgtgcgcagcgccggagaaaaatccgaccagacttttgtttgttcagctcttcactcccccatctcgcactcagatcccgccgccgcccgccgccgccgccgccgccatgggctccgcccactcctcccactcctcggtgtccacggccgccgacatggacgaggacgacgacgacgagccatcggccgcgtccgccgcggctccggcccctccggcgcccgcgccggctcccccggcgtccgcgtccaaggtgctcgagcaggagcccgaggagctcccctgccgcgccgccgactcgccgctctcgccgcagccctccgccgcggggacgccgcgcctgctcgccgcgggccccaccatcaaggtgtgggacccgtgccacgtcctcctccccccgccgtcgccgcaccagtcccagtcggcgcgggccggggccggggccgaggccgccgccgcgctggaggtggtggtggtcagccacggggagtgcgccgcggcgatgcgccccgacctcgtcggcgggcggtggcccgccgcggcgctcacggcgcgcggggagaggcaggcccgcgcgctcgccgtgttcctgcgatcccgcggcgcgcgcctcgccgccgcgtacgcgtccccgcttgaccgcgcccgcgccacggccgcactggtctgtcgggtgagcgccttctttggcttccctccctagcatattccatgcttctgcattgcgcttgttcagtttaggtgtaggattttgtggcactaacatgtactaggattgaacagaaaatattagttctggtttctccattctgatttgtgattgttttatgcgatattgcgattcggaggaattgtctcaaagatggcagcattgtttgtagcaaagctgcaagcctgcaacatatcatgcatttgaaatcagtgccctttagcaatgggggatttcacctaatgtgatcttgaaaattagcgttaatgaagtgatttcggttagccttcaggcaaagcacttgtgggcttggtgtggggatgggatctttgtgatgtgatggggcaaaaattgctaaatgcttgtgttatgcagtaatgcagtgcatccttactctgttactcatcatggtctcatggatagcataggagtgcatgggccataagatacatgcttctgaatagagcatttagcagtatgtaaagggcgtccgttcaaaattgatgctgtcttgggtcaaagtctcttcaaagtttgctggtgaaattagctcaaatcatagtcatttgatctcttttggtctacaccatggccatcaataagcctaaatgtgaagtatgaaagcacttatgagttacggtgaccttcgatcttgtcaacagtgcaggacctgacagttccacttataggtacaaaaagacattcgaaagaataaacatctgaaggaaataggagtgagtcatttcattgcaaccttcttgatatacttctgaagggagtaccctgggtctgctactttgaaatggtaaatatttaactgtgcaaatgttggaagacaaaattaggggcattaatgaaaactagctctagatgagatgagcctattctttagtagtaaaaggtaggcagctttgaaggatctcttattgcctttatgtaaccggttgacaggtgtattgcatttccacccttgcagttgcagtctgtctctgttttttcttgtcttataacagccctaatattccttgtttgtcttttacatggactgatgtcaaagaaaaggaataattttgtatttgcgaacattacaaaatagtgacatggggatactctgcatgctaaaacaatgctttcaaggcatgctcaattgactttatttttgataaaattggtggctatgagttgtgaggacagtctggcagagctacagctggactttaattgggttttgctatgagagcagttattcttgtgcacgtaatttttcttgctcccacagaacatatggcttcttatgccttcatcatcaattgtaacctgacatcatgatcattaggcacttatttaatgtgtatttgtgctttagtgggcgtaactgtctcatcttagtatgtttgttggattgggtggcccaattacatttcatttgaaacaattgtcatgccgtatgcatctatggtagtattggctagccactgaattatgggtctatgatcattggttatctgttcctttgaaagtgtgttccgttattccagtgttcacaactcatgaccatggaatgcagcttgtatgggagctggagcacaccctctggtgaacatacaaactgtcctcttatgcataagagagttcacgcatagaggttctgccataattacgtgtttcccgccagaataaatcagcaaaataaaaaggtgtatttatttcatgtataaatacccttgtctcaaactcatatcgttattttgcatagatttagattgacttgcaaactctagtaagtggaaaaggcagaattgtttaccctcatgctaaaagtttagtatctggatgtttttatattagttagctccccttttacctgcctgcatcctttctgctctgtccctaaaagtttcacctagatttctagcctctaggattgaattcaatttgagattacaatccattattccatagatttatcctgggcagaaaagcccaatgccttgaaattttttattgttaatcactggtaaggctggttatccattatgtaaacaaatgaatgcaactatcctggtgtctactggacactggcaagggacatgtgcctgctaatctgctatacaagtttgactctcacgctatcaaatggtgacttacatattcttgtgttgtagacttgtcactgtcagtcttggacccaaatgccataagtcaggaaagacagattgaagaagctggggttcaaacccaggatttcatcaactcgctgctttactgttgggcaggctgggtgttcatcaatgtcatggcttcaacagccttagttttaaaaatcacacatatctatcaaaaaatcacaaataatattttgctggtacaaaattctatccaaacctagtacttccctagtaatgccagttatttctgacactactatctgggatagggattttccctggtcctgggatgtaaatgtaactgaaatttatatgtcattcattgctcttagcttttgggcccaggtccacatattattcagacacccggatttttttggaaactatacctcccaagctactttgtgctatgtaggtataaacttatatctgaaactatatctggaacatgtagcatttgacaagtagtggtcctgcaaatgtgcagtcttgttttaattattaattagggaagcggaggaactacagcagatgttattttccctcttcattagtttttatatatatgcattcctctgtttacgttttcttttgattggtcttcagcactgcagttcgtgacatctggcaatgttaatctgcaggaacttgattttccagaggagcagattcaagtatcagatgctctgactgagatgagtcaaggtcagtgggaaggctgcccgaaatcagaagtatatactccagaaatggtcaacctgatggatagcactcagccagatttctcagcgcctgctggtgagtctctcaggcaggtacagtttcggatgatggaattccttaatcagacagtcgtacggttaccagaaaaggtggcaatgggggactcactatcacaacaaaatgaggcgaagggtctgtctcggcaaagttccaccaattctgtccaagatggtcccccttgggatttgctttacaggctcaatcggcatagcctccaaaggaaaaaatctgggaaaagccggcttcagtttgtcacttcaggcgacaatgagactgaggatgacttctcaccaaaagaaataaatcaaaggcatatccttcatgaagcaaatctagcaccctcggtcacctccattgcaattttcagtcacgcaactcccatccgatgcctcgttgctggcgtgctggattgcaatcctatgatatcccagagaatttgcattgaagattcctccattacagttcttgagcattcactaaaaacaggatggcaaataaagaggctgaatgatactgctcatctcagacttctctaaatgcaagcaagctgttgtgctacgctgttcgagaggaatgtatctctttgtgcattgtacagaaactatcagatcatattcctcagatcagatgccaaggccatcggaagtgggagtcttctgattgtatttcatttgtatttactgacatatctaaatgccaggaagatctggccctgtgatagtgttgtattgtatttgttattattctttttttcttgagctaaattatttggtcaagtgtaatttccatgtaaggggggatacatttttaatgtatcattctttttgccgatcactctgttttcattttaatttatcattttttgtgcattgtccttggattagttccatcaaaacttcttgagggtagataatctacagtggatggtaggggaagatatgaaaattgtacgcattttgtagactaaggttaccttcagttgttaaagatgtaatttggaattttgcgatagttgagagtgtttgttccgatttaaaaataaattagaaactaactgtggtgtatggaacgatgccaaaccttattaattatcttcttgttagcattggtccaatattaaccatggacatattgtgttgtgatggcaaggaacaaaacaagaaaagcgaagcaaaagtgtaagtgagacaggctggaagataggcctggacattgtccatctactactacatggtttggttcacttagggtattcataatgcagtggaattgcagataataatcattaaatacatctttgttatcactttagatttcatgtttagagatttcttttaggtggatcccacctacccattttgcacatgcatatattattatctctctaatctgttattattatctgacacagtccatcctagcacttagttttacaacaaatattgaggagatgccttaacaatgtccagtgtaggtgaggttgaacaatcaccaaccgtatcattgccatctccacaataaaattttgtgttcctattctggtaattggcatcgctacctttttgttaagtgtcgtcactatcttctcttgattaatttctcctcatggtttctttccgcgtcacactggagatggccttaccgcccataaaccagtcagccgcaacaccccaccacaaaccaaccaaatcaaagatcactttagatccctgaaaattatcgccgagtctaaactttatccctgaatcacaatatcagatactataatgcatccctcgactcccaaaaccaacgtaaatagaaacccaagatagtttggatggtggttttgactgacgtggcatggacagggcacttaaactttaaaaaaatgtgggacccacgtgtcagtgagtgttcaattaaaaataaagaaattacagttgttacaactacgataaggccaggccagcgatcgatccaattcacagctagggttctacctatcggatatactccctcagctcgtaaatattcgatgttgttgttgacttttttaaatatgtttgactgttcgttttattcaataacttttgtaaaatatgtaaaactatatgtatacataaaaatatatttaacaatgaatcaaataataggaaaagcttaatcttttttgaataagataagcggttaaacatttttgaaaaagtcaacggcgttaaaatatttagtgacggaggaagtatatactacctccttccctaaatgtttgacatcgttaacttttttaaacatgtttgaccgttcgtcttattaaaaacttttgtgaaatgtgtaaaactatatgtatacataaaactatatttaacaataaatcaaatgataggaaaagaattaataactacttaaatttcttgaataaagcgaacggtcaaatatttttaaaaaaatcaacgcgtcaaatattttgagatggagggagtatatcgtctggagctgctgcgacaaaggtgaccgtcggcgccaccgcgcgctcctcgatcgtcatccgctgctgctcgcggcgtcccacctacgacagcgagctctctcgcagccgcaggcaggcgcaacgcttcctttgctggagctcgtcacgacctgtatatggcgccgcgccaccacctgctcgccggccgcatcgtgctcgatcgtccgccacggcgacgtcgcgcgcgacgagctaggctggcctgacgtacgcctacacgcgcgccggtgcccgagcccgacccccccccccccccacatcgacgacctcgccggccgagaactacggcggcggcggcgagactggaaggcgtactactgtacttgtgcgtgtccccctacgttggagacaaattactccctcgtatgacgccgttgactttttaaccaacatttgaccactcatcttataaaaaattttatgcaaatataaaaatactaatgtcatgcttaaagaacatttgatgataaatcaagtcacaataaaataaattataattacataaattttttgaataagatgataggtcaaacgtttataaaaaagtcaacgacgtcatacaggagagagtagtttattaagatgcatgcgcgtcgattaggagaggtacggccgccaataagctcagctagtagcttcttctaccgcgtaccgcctcgcatgatcgaggaccagatcgagaagacgacgacagggagtgcatgcatgcaggagtacgtacgtacgtacgtagctggtcagtgtcgtacacgtactccctctatactcgtaaaaaagaaagtcgtttaggacagcgacacgatctccaaaacacatttttgacttcttatttctataaaaatatttattaaaaaatgatatatgtatgtttttatgaaagtatttttcgagacaaatctatacatatagtttttacattttcaaactcaacaacttgggagttattcatgatttatattcccaagatttaacttaaacattgttctaaacgattttcttcatgagtacggagggagtacgctggtcggctggctccgttcggtcgcagcccgcgcggtgaggctctacctccagcgagcagagcaccaggcccgacccgccccgcccgcgcacggggtttatcgaggcttcagatacgagaagaagaagcgcatgaagccgcagcctaccgacgccagcgacgtcgacaaattaggagacctaaagtggacttattccttaaaaaaacacttatatatatccacaatatgataacagagtataagagtttatcgccatattaattgttgctgagatggaaatgagagagaaaagaaaaaaaacagaagctttattatttaagggcattcccaatataaaaaccagatatatatatagtaagtcattactagctacatgataagaatcatcgtgaccgcgataaatagtacaagtacgaggccacaagagtactatccaaagcaagcaaataagttagtcatatgcatagtattttccgacacagggaaatcgtggtgttcgtcaaagatgcagctagattcacattaccaataggggatgtttggttgcttactaatttaccaaaccacatgttagacaaaaatgaacggctagcaaaatgttaactacaacttagccaaagttagaaaaaaaaataagtgtatgatatgtggagccatatatagaaaatgtatagctagtcacaattgtgtcatcaactaaataagtagctaaaaaactgtggtatgactaactttagacgtggcaagttgtagcgtgcaaccaaacaagccttaatattcagttttggtaatatatatggagaatgccgtatatcctctagtgcagcatagtggggcccactggtggcaggcatagccagcccaattgaaacggggtacaagcgaaatgatgagctcaatgatttaaataaaatattaaaaaataacaatatacaaacagctagttattaattaggtaaaatttattatagaacattaaagtttgtgtaatttgctgctaggcatcgtaaaagcgtgtcaaagctgaaagacactcttaaaaaaactggtaatttgctggagaacactttcagctcaattgtagattgaaaatcttcaaaaagacaagaatacccctatggtcaaaagattttgagctaagattggagtgaagataaaatatgatgtatactagtgatgtacttggggtaatggtaaatttagaattacataatttctaaacttttactctaatgttgtgttgaagcatatgattctaggggcattcttgtctttctcaagaatttatcttgtcaattgaatcaaaacagtcctctagaaaattatcagtttttaagaatatatttcagccgtgatatgttttttcgatgtctatcagcaaattacacaaatttcaggtgttatgtagcaaaatttgcctaataattatatatttcttctcattcatctttttctgacgaggattattttcgagccaatggctggtagctctattgatctttagtctaagtgtgatagaaaaaaatccacgtgcataactgtgatagacgaacaagccgttataatctatttttcatcttgaattataggactggttttttattctaacttttaatttagaaccaaaaatacatcataaacgatggttttcaccgctattatagtgatttttggctaacataggctttattaactaggcccagttccatggttatggacctaattaaatgatacttcctccgccctaaaatataaagggttttggtttgatgtgatacatcctagtactataaatttggactagaagactgtccaaattcgtagtactagattgtgtcccatacaacctaaattccttatattttaggacagagaaagtatctgcattagaaaaatatgcaaaagtattattctagaaaaacagcgtacatttcaaacaaaatcactacaacatatgtagaaggtgaaaaacaaccgctattgttgtgcagagcgaaaaatggactgagtacaagggactttacccaatcatgagctcacctcgtagaagtacgtacgtatataggtcttgtttggatcctccgagctattaaatagccctctgaaatcttgctatttagaagtattaaacgtagattaccgacaaaaccgattccataacccttaggttattttgtgagacgaatctaatgatgtatattaattcatgattagcgactgattactgtagcaaatcatggattaatatacctcgttagatttgtctcgcgaaatagcctatgggttatggaatgggttttgtcactaatctacgtttaatactcctaaatagcaagattccggagggctatttaatagccctccggatccaatcagagccatagtactaccatgcttgcacgtacggttcaagactaaagtgttgtggctctatcattttatctattttaaaatataaatataataatacataagtataaatctatatttagatttatagaactaggattaattaatagaatacagccgtagaggcagcccacacgcgtcatctatggggaaaacaatgtgattagctaccaaggagagccaacatcgccgaatctatccaccaatcttaagattaaatgatagcataattttgataataacatgttaatttgatcaccaatagtttttaaatgatagcataatgcttgtgtctagaatttagcacaccttagggcctgtttagtagagctataactcctaaatttagcttcagtaattaggtttggagtggagttgtggagcagccaaaactcagcttcatctatcaaattcattttgtgagagcgctctactcagctccgatcttattttaggtagagctcaaactgtttaggtaggctccagctctagtagggatggagctggggctataccaaacatgcccttaatttgttttaaaagcatcaatggtgtgggtgcatgacttcactcacctggtgcctacaactattacccttatataggtaagctttctacatgaatttagtaagatcatagatgtgtcactagttttcatctatttgagcatgtgttaggggtgtatttgtgagggtgtgagtctgtaaatatctcgcgagtctggtgttgcatgtatagtagtgtatgctgcgctgacggtagtattgaatctactccctccgtcccaaaaaaaagacaaacccgggttttcgtgcccaacgtttgaccgtccgttttatttgaaaaaattatgaaaaaaattaaaaaaaacaagtcacgcataaaatattaatcatgttttatcatctaacaacaataaaaatacgaattataaaaaaaattcatatacaacgaacagtgaaagttggatacggaaacccagggtttgacttttcttgagacggagggagtactactctacctaccccattataaattttacaaattatctcttaattttttatattaaaaacaaccaaatttaaatagatgtccacatataaaattaataagtgaatatttccaagataggtaacatatttcatgaaaatatatttttatttatttgatataatactttctacttttttaaaaggagtatagataaactattttttttacttcggtattaaatttttcacatacttttttaatatctatatctaagctaaaaacttcttatattttacaacaaagatagtattatgatactccttccgtcccatattataagggattttaggtggattgaacacatctagtcctatgaatctggatagactccgttcagatttatagtcttaggatatgtcacatccacctaaaatcctttataatatgggacgaagggagtacatgttttttatatctataataaagcacgtgcatttaggctctcgtggatgtgacccatcatttctgtccaacctcgtgacgtacaaagatcaccatgggcttctcatgcaagtacagattgaatcacgagt

SEQ ID NO: 15945 - DNA, 6403 bp, Oryza sativa
agcgttgtcatgtttaggttaacccagaagatgtttaaaaaaaagtgttcggttttgttgtcgtgttttttttaccaagtatagtaaatatttacccaaaaagaattaccatccctgcaaaaagaaaaacaaaaaacatgaaaagcatccctcaccatcccaatcttttcagttttcacccatccgagttagtagtagtaattttcagcatgagctccctgtgagccctcctcttacagttgttcaccaaaccaaccacatcttccacgttcttcttctgccacacccattgactcctcaagttggcacaagaagaaaggtatagcctcaaccaacaagggaaattctccgctgtcgcaacatgaatcctgcatagtacatatgccctctccctgaaccctcctcatctcttttgatgaagagaggcaggagcatcctcaggtgtccttttccatgtggctttcatcagagggagggcacaagaggaaggaatcggcagctgcagtattacagccacatgaatacacagagacacagtccaaagcagtatcgctcctgctccttgcctgctgctcttgccagtcgacatgccactctcacctggtctcgatgggtgactgctaccagcaagccaccacggagtagtctgtggctagtagtaggagcctggcaggactgcagcaaagaggcagggacctaggactgcaaccaaaaatgtaccagatttactactacatgttacacaaggggagattggtgagcatttgccattttttatgcttggcataattttctttcatggttcacactggaacccttttgtcaggcaaacgctcagcacctcagaaacaatgtggattgccctctcttctttcaggctttgttgtatgatgaagcgttcctttacctgtttttcgcctgagattcttttaggggttttcttagtacggtccggttttttctttcacttatgttgtttgatttttgttgtcatgttaggttttccttgaccggatcctgtccccgggaagtttactcacgacttcggatggtcccaggaagttactcacgactttggatggcaaacagggattcattgtcgtgttatttaaccgcaaagtcgagctcactggcacgccggtataatagagctgaagcttctaccctgttgatagcaaacatgataaggagtttgagtcatgcgataaaacaggattcaatcaaacggattatcaatattcctcaccatcctggatgaacaacgaatctgcctgttgatagcgcccaattcaccttgtcagtcccgagggagttggccacaacatgggtgacccgatcatcaatttggttcgtgcaaactgcaccgaactgctcagcagtctgccacaaaggatgcatatggggattggcctctccaaccgggaaaatccggctaaagacaatacggcaaccaccaagtatcctctgctgctcagatgctagtatgctccgcacatcagcatcattgagattaggatgagaaaagaagttcttgtgaatgcgctcaataacctatttcaagaattcaacaagtatgtatatcataatcaagttgtattacaatacttaaaagttcagatgtagcagaaaccatcataccgcgagtgaagaagcaagagtaccatcctctggtctttcatctcgatcaatttcaagaagtgatggcccaggaagcccaaactgacgcctgctgcaggggaaataggtgtatctagaggaaaaaaatggaagggggcgtagtaagatgaacctgttgtactgctgttacctcatgtagcaagaaacattagacagattcatacctctctacaacaattaaattgtgtttgttgtgggccagactctcacagagtcatcaatgatcaccgctgcagattccatccccaacaccccatcaagatctttactttttggcactcgctcatcactgtcaaaaggatcaccatcatcgcctcttgagataacacgcccagcaaacagggttccagtaggatcaagaaccttagccatctcagtagcataaaccttgttgcccattgtgtacagatgcaactcataaagtttacttgcctacagcataagtaccaaacaggacaatattcaactctacagtggaaagatgcttatggtcatttgagagatatccaagatagcaaaccttctcaagaaagttccatattccaggtctcagtttggtccacattcccatatgattaaaacagaagagatggcgctctgccctctctcgatcttgttcctctttctttcgtaaaatttccccgtgaatatggtccacttctataaactgaacaggaagcatgtagtgtgttaacaaagtttcaaaaagtaaagttataggatacaaaaccaaatacctttgcagaattgaggagcgtgtgatccaaatcaagcaccaagcaaagtttccgtgctgcaaacatcttgtgttgttccttgatccgccttgccctttccttctgaatgagagccttctgctgatcatcataaccatcaaggagatgatcaacatctccatatgggctagcaggcggcacagcatcaggtgctgttacaggaccagtacttgttgcagcatcatcattagattcattctgtccagcagctaatcttggatctgccttatttacactacttgaagtttgctttgtattgccatgaggaggcataagtgctgtagcagctaactgtgaatttgagacaggatttgcattcatggtgactggccgtgctgatgatgtaacaggtagagaaggcaatgcaatagcctgaagttgctctgccttttggtcttggttgagcaaatggtccttgctgctctgagagtctggcggagcagttccattgcttttggcttgctcaacaccaactggaggaactgtatcgttcttctgcactatgttactatggagtatgcgacgaggatcacgtggtttcatacgtataactccagtatcattttgtgagtgctacacaaaaaagcatttttaaacataatattagtacgagatcctaaatattataacaaaaggatttggaattggcattagtaacacggtggttcaccgtggtatgacgcacaagctaatacgacctactcataataaaaacttagttttacctcatttatgtcccttgatatgcatataatatatatacttctataaaaagagttggcaataatgcaatatgatcactgtctccacacaacaaattgagttggtggattctgttaatggatttttgcgtgggcatctcaaaagttctccatgactcattgacgagacaaaaactatgcatgcaagtgtttaatataaactttgtggatgcagttttttctaacttatggcatgtttatttgagatcttttgcaaacttgcaaagcacatgccattaacatcatatggtatataaaattgtatttgaacccattaggaagcaaacagataaattgtaagtacaaacagaaaacacaggtgcactagtaagagagttaccatgggagctgactgcattggaacttgtggtctaacagaagggactgctgcaacttctgtggtctttggagcattgccaagtggtaaaaccatgccaggagttacattactagtcatgccaacagaagcagttaccttctgctgaggttctgatgctgacatcttctgctgttccatttgaatccattgcatgagcattgttggattgacagcaatgtcttttaacatagcaggcaatgaaacagcaggagcagaactggtttgcggagctgaattagtttggggtgcttgtacaattccaggactagttccactattatttgtcgtattatttaagttactagcaagtgtactatctgtcctgatattatgatttccagttgtgttatttccaagtcttgtattttgatttggctgaaacccatcactagaatatgagctaatattacctccatctttagcccacccacctcgacctgtaggttgcatatctctcaggttgccaatgacacccctagatctttttaacgcgttctcatccaccataggttcatcaactgccttattcttacggctattgattgatactccaccacccatggtcctatctttagaaggatttggttctgcaaaattcacacgtcggtttgcatctgcaacaccaccagtatcacgatttaaaaacttaagccttggatctctacttttagctgtagcttttagcaggtggttggatcctgaaacagagttttcaatctgtttagcataacctggtggaccacctgcaaaactgtcactgttgctgctaactgtgctaggtcgagagggcatctgattcacaattggcaacgcaatcttgtttgaagcagaaaagctcgaaacttcaccaaatacatcaccccctttgtctccagatttatctccatcaccagaaggagttggacttggtagatcatcgcttgcaaagttagacttctgcccatgcttctgttggtaatagcaaacagccttcagtgcatcgttaaaggattgatacgaagaattcttcgcaggctcaactctttctagaaccgatggtctgtcaggtgccattggaagtgctccatatccaatgggctttggcacatcaaaaggtggtttactatctcgagttggtgagggtaagctgttttcgtcataatctgcatgaagatccaacaaggggctaaccattctattctttgctggtatttcaaccttgctaaatgaatttcctgctcctgattcaaatggtagtctctctgataaaacctgaccagatggagctgcagcattagttgaagtggcatttggaccatttgcattgtcttttccatcctcaaacactaactgcctcacacggctatccagctgacacaaagcaaaagaaaaataaatgagcatgctaccacagccaaaattaataatggcagactctaaaaccacaaagtacaaggtttacaaacctcatctcgttggtcaggtgttagcatgtctgaatatctgttttttatgtggaataacaacctacacattcagacgagaacattttagtttatgctgcaaagaacacatagcacattagttctcaatgtgattagaaaaggatgaacttatattacttaagaagcatgttcttggtctgctccctcttcggcatgtcatacgaatttgccacctacaacaatgcaacaactgtgagctttacagtccacaacacagagccaagtcaacagtcggtcttacggtggtaatggtgtcgattccaacaaacgcctgctgcacaagggcatcaagcatgggcattgggctcccgctctctgggaataacggcttcaggttctcgaagcacgttcgcagacgcgtacatgcaccctcaaacgacctacagaacatcagaatcgggtccctcagcaactgaatcatacaccaaaacacatcgagcacatgaactttgccatatagaagtatcatcagtccatacttctcagcttcctcaatggagaccatctcaagctcctcgagtatactccccacacgctggtcaaagtccacttcctcctcctcagcaccggccggcgcggcgccaccgccatacatggccaccatcgactcggacttctccggcgcgtcggagtccaggtcgatggtttcgggcggctgcgcgcacggcggggacgaggaggaggtggtggtggtctgcacggcctccccctcctcgatctcgccctcctccttctcctcgtccgaggtgtccacgacgtgctccacctcgtcctcgtcggcggcgtcggcggcgcggggcacgagcggcttgttctgcacggcctgcgcccacgcgaagctgtggaacgccggcgcgtagctccgcgggatgttgtaccccatccaaaccctagatctctgctgcgccgcggccgccgccgccgcgccgccggcggccgacgactccttcttgaagtcgtcggcgctgatctcctccagcgaccccgacgagtccccgtcggacccctcccctccccctcccccaccgccgccgccacccgccgtaacgaggtctcccccgggtgccacgaccgccgaccgcggccgctcccgcgccatgagcaccaccagcctctcctcgtccttgggcgtcaccgtcacacgcatatgccgtccctctctctccctctccctctcccgcctccggcgaccgcgcgcctccgcaaaaatcgagtcgagctcccgttccacgcggccaaatccgtcgacccggagctcgatccgcagcgccccgcgccgcctccccgaccaaatcgccgcgccgcgcccgtggggtaccgagctcg

SEQ ID NO: 15946 - DNA, 14158 bp, Oryza sativa
gggcgtatcaatgcggtacacggtggctggcctttagctcgtgtgagtacattccttctgtgatgatgcaatggttgtgtgtggttggtttcttgtgttatccatgtgttggatgctgtattcatgctggttttcgtgggaatttactgtgttttgtggttattgttttacgattttttttctctcttcatgcagtttgggaattgaattcgcctccccgtcacgcaaaacgaaatacacattattgtatgattaattaagtattaacttttttaaaaaaaaatagattaatataattttttaaaacaacttttatttttttgcaaaatacacatcgtttagcagtttgaaaagcgtgcgcatggaaacgagagaggtgaattgggaaaactggggggaagaacacggcctaaataagcattgtggtaatgaatttggatctttgttcttaaaagatgagttctgcctagcttagggtaaaccaatgataaaagttattcgaaatgacttagttaagtgcgcacttcaatcaatattatttgatatttcagacaacaaagtcatactaaatcgcttattaattttgggcttatttggaagagctacatgcaactgcactatggcaacaacctacaatagctacgatggctgcaagggcagtgtaggttcaaccgcatgacattgtgacacgctcaccgaacggctgggttgtacaactgtagcctagaaattattgtttagctcttttgaaccacacctttttctctcttctttttttttcgggggggagggggagggagaagggttgggggtgcaccattatgccttaaacatcgtataaaagtgattggaggaagtgtggctaattaggatgaattctagtaggggaatgatatttttcggggatatacaaaaggattgtgtgcttttgtattaagatgaataaaactcatacatgtagggccaagcaaaagaaaagccagaaaccaaaagagggggaacaaaagatgaaacagaaaagaaaagaaaggacttatatattaattctattctcacgaaatcatttgaaacgacctagcgacataagcaatatactaatagtgctggcaatgatagtgagacaagatactggaggtcagcttcccgatccattgctccaccgcttccggcaacaaaatgagtggactaatagaatactcgactattcctctccttccaaatggaccaagttctaagggttgtgattgtgttgaagccgcggcggcattccatgtgcactttctttcgactagcgcacatccattcgttgaaagaggagatgtcagtggggaagcactaaggaaggccgagaactgagagaacaatccaccaaagctagagagattcagggcactcgttcgtttcctcaggctgatcgtgcggaacgatcaatttgtgtaaactttgattgttccaaatagggtcataacggatttggatcatgaaatatacttcaatttgctacggtttagggtttacatgtaacgaaatttccgagagagatatttccaatggcatttgtagagtctacatgttgttaattagttggttagagataagttagtactattaatattgaattagactggccatacataaacggccccaaaagagcaatgatatcatgaaccccttacatgtgtgattgcaattattcttcctttatttttttcagctaaatatataataagaaattttgctagctatgaagcgtagatgcaatgcaatcactcctacaaaattgatttttctatacaagaccgtctttaggttctagacgggttataagtgctctcgtctacaaaaatcattcccccgtgataggtttatgggccacatgcgaaaattgattttcacagaagggcctcttaatagacccacgtgtgaaaataagcgtattttcgcatacagacctgttaagtgacccgcacacaaaaatagccatatacccacacccatctctccccactcctttttcttttctccccacctctatatttcccgcatatatattctccccttcctactcctcccatctccccttcccactccccccctctacccactcttgacgagggcggcggcatcggcgaggacggcgactgcatcgactagggtagtggtggcggtctcccggcaaccgtggggagagcggatccgtcgtcggccaccacggggacgacggtggcaggccttgggcagggcgttgacgacgacggcggtggcggtagcgttttcccggcaatggcagtgccacgagaggagcattggatccacagccgctaggccttgggaggctagatccctcaccgacgaccccggggacgacggcggtaggcctcgggttggacaacggtggctggattagggttccagggctagggtttcgattttcggggcttttttgttgtaattttctattttcgcatgcggatgacttaagcgccctcacgcgaagttagattttcgattttcgcgtgcgggtacgccacccgcatgaaaaaatcgaatttttgcagaccttttcatgcaaatggatggaagatccgcacgcgggaataccgttttggccgtatggaaaaacaaattttgtagcagtgagtgctgcctttcctatacgaaatttgtaccataatagcccctttgtgcttgttttgattgctctggtggtgggctatccgtccagtttgtttgtggaatttgttgcgttaaccattgcttctcttataaacaaaaacaagacgctgtaattttggtcattattctacgcaggtgacaatctgactcaaaactattgaggatttggcatttgtctggggccacttttgtttagacgtcaaagttgactcgaaaccaccatgtggtcaaagaaatttttgtcccaaaaccgtcaaacctctcattttaggtgcctttcctaggaagatgcgaacaaatttgcactgaacctgcatgtgagaaatgtgtgtctgtatagtatatgtgtagtactacatatggtgtgtttagtttgcgaaaagaaaattttttggtgtcacatcggacgtttgatcggatgttggaagggtttttggacacgaatgaaaaaactaatttcataactcgcctggaaaccgcgagacaaatttattaagcctattaatccatcattagcacatgtgggttactgtagcacttatgactaatcatggactaattaggctcaaaagattcgtctcacgatttccatgcaaactgtacaattagttttttttatctatatttaatgctccatgcatgtgtcaaagattcgatatgacttttttggcaaaaaaaaatttttggaactacacaaggccatacttaatgtccaatgttgacacattatatagctcgtcaagtaatgtctaatgttcttcatacttgctgattcattccctagacctttttaagatacagggtacacctagtagatctcggaatacaagaactaattgttgttctctgtaaatgctgtttgaacaaggtaaggatcgaatccaaacagtgccgtgtgttacactcgccatgaataatgaataaatgaatgaagtacaacctggtacttaccatgttaggaaagcagcccaaaaagggacttcatgtcatttccatgttaagcaaccaaccgaacaagaatacaaagggtgtgttcacactaaaattgaaaatttggttaaaattgaaacgatgtgatggaaaaattgaaagttagtgtgtttagaaaagttttgatgtgatgaaaaagttggaagtttgaagaaaaagtttgaaactaaactcggccaaagatggacaaaatctggaggagaaaaacgagtagcggaagccagacaataaccaaattataatttggccaggcagacattactttgctttatgaaaaccccatcatctaaaatttaaaattgtaccgaacaaaaaaaaaacggcagcaaaagtacataagtaaactagtactagtagtagcaatcaatcgagcaacctaagtgacaaaattgttcgaaattacacgcaaatacacaccgatcgatgactagaagcgcaaagaatcaacttctctctgatgacaaatgtgctactcgagctagctagactgacgtctcttcttcatcaaacagaagtggcgatggtttcagagcaagaagaagaagaagaagaagatcagattcaggcggcggcggggggcttgccgccgccgccggcgacgagcttgtcgatgaggtcggcggcgtcctggatggtggtgatgctctgggcgttgtcctcctccacggtgatcccgaactcctcctccagcgccatcacgatctccaccgtgtccagcgagtccgctcccagctccgtgaactgcgactccggcgccagcttcgcctcctcccccagcgccagctgctgcttcactatctgcatcaccttccccaccgtctccgccttcgcctaaaatctcgtcaggttcagaaaaacattcagacaacacaatagaaatgccccattgcattgcatagttaacattcagacaaagaaagaaaggcacattgcattgcatcattgaacattcagacaaagaaagaaatgcccgttgcattgcatcgttaacattcagacaaagaaagaaaggccattgcattgcatcattgaacattcagacagagaaagaaatgcccattgtattgtatcgttaacatttagataaagaaagaaaggcccgttgcattgcatcattgaacattcaggcaaagaaagaatgaaagaaattaaaggccatctgcattgcatcactagcgagcgagttaccgcgcagaagacgcggaagcgaggggatctgagggagacgaggcctctccttgctgtcatcgtcttcatggagaccaggtttctgcttgaaattctgcttccctgcaagttttcagatagagtggtgcactgtcacaaagaggtttgcactgacagattaaccagagctggagttaattacatctacatgagcccacttctggatataattcttatgtaaagatgacattggcagtttggcaatagaaactagattgcacaagataaacctgtaggacatgcatggcgccataggtcacatatgggacatgttattaaagaagggattgaaattcccggtttttaattttggtcatacactggaaagagcacaaggaaaccttcaaagagtagtgcaacagtgtgctaagaattgtaagagtggtaaaccatcttttaaaaaaaaacatagaaaaacaacaacaagtttttagcctttagggttagggcaggggacatgctttcttaatattgtcatgtgattactgactaggccaagaggatttcactcttttttggcttcttttcagaacaaaactttatgtatattatgcatggttaggtcaagtagccctcaacattattccccttgttaagcagctgcagagcaagaaagcagacactaaccaaccaatgcctttgctgccccactttattaagcccctaatgacaacaccctttgtggttttgtaccacaaacacccccattatctcgagattagaaaaagaatagccgcaaattatgcaacactctcaccactaccactctaatcaagaaaagaagcaaatctacagaaacaatttgtaaataaaaacctacaaatcggaaaagatatctactgtagtaaagaacagcagcagaaataactctgtaacaactaacaagctgcaaggcatcagaaagtgcagggaagtcatcagttcttcaccttccagctaccgagcgccgccgccggcgggcagccgagcttggcggagacgacggcggacagcgcggcggccatggccggaggcggaacgacgaggaggaggaggaggaggaggaaggggctgggtgctcgacggagatggaaatgggaagagtaggagtaggattagatgagggggattagtaggggcaaatggaagctgacgtggcgtgaccgtggccgcccgctccagctcatcccccctatctgcgcgtgtgggcccggtctgacgaggcggtgacatgtgctgtgtaccgtgtcttttagagcaagtttaatataatagcaactattagctccaaatcatttataactaatgtaatagccaatttatacaatagttgtttattatactattaatatttggtcctacctatcatacacatattacatcttgaagtcggtactgcagctgactatagatctatagcccgctgctcttctctctcttcctttatctctttaaaatatatttataactggtttatagcatgctattatacctgctcttatactgtagcaagctcaacaacgattgaatttactgttgagtctcactgcaattcaatgcagaagaggttattgtcgctatacggcaagtgcaacgacaaatttaagctaagatcatctctaatagaatgtgaatttgactctccacactaaaatttgatcaacatagagaaaaaagaaagctatacaatagattctttattcgaatggccaaacgtagctaacctcctccactagcctaaggtgtgtcccacccccctctcccatctccctccatgttcctacaccacctcctctatctcttgtctcacccacaaataggcaacaacaccatcgtcgtcagggctactaaccgctatggatgtcgtcgtcgtctggcgtcggccctcatcgcgcgaaacaaagcccttgtgtcacgcaaaacagagcaatcgttgtgaatccgtcgtgtgagccacggctgacggagcgtggggctcctcaccgggagaccgcgcaggcccccctttgccggttcggccggggactcagggtgaaaatctaagctctctgggaatggaaggttcgcgagagtcgaaagagcataagacacgggcgacgtatacaggttcgggccgctgagaagcgtaataccctactcctgtgtttttggtggatctgtgtatgaaggagctacaaagtatgaaccagcctctcccttgttctgggttccgaatctccccccgtcccctctctaagtgggcaaggtcctccttttatatctcaaggggataccacatgcaccctctctctctttccaaactggacttgccttctcttcataaatggacggagatttgtatggttgctgtccgaatgaccttctgatgggacggcacatacctacctccacttccgccggaggcaggcgcgacgtgggaacgtggctgtctgctgacgacatgaccagtgtcagactgatcacaaatcggtcattcttgtccacgatgcgtcagcttaacagtatgcatgttcgcccttcttcacacaacatcttgcctgtaatggttaggatgaagcctggcgtatatctgacggggactaacgtgccatctctgggaggtaacacgctagctctagctggggacgcgtgcctagaagctctcgtcctgacgggatggggcgaggcgtgcgtcagaccgcctgtcgccacctaacccgtgatctgaccggtctgtgactggtcatagaccggatatacgagtgcactgcactgcgttacatgcggcgtgacacgctcagccaaaccgcaataaatgcggttaggtgagccccgctgtgctcacctaacccatacacgcggagcagaacccacgaggggtcggggcgcctcggccctcggggccgaggcgggaatggtccgaccccctcggggagactaagaggagggcgaacacatcaccctcgggcccgacgtcccccgagggtgccaggccacgtgggcgattgtgtctgcctcaagcctctagtcatgatactcccggtcccatgtcgccgacagtagcccccggcgttatgccagggcgatcgccctcttcaaggggagcggtcgggcgtgacgccactcctaaggcctggtgacaggtgggaccggtctccacaattgggcagaaacccaacggtcacaaatttcgcacatcggcaatggtaactcggctgtcaataatgagcggtctcttcaagactgccacattactcgagtagtacacgaatctggatgagccgattcgctttgccaggagatatggtaacgtcgcttcggtcggcgagcgtaattaacgcgcgcacgatatgatttatctcgactgccacaaccgcatatccacctcatgcgccgcaagcgggcgaatgggattagtggaagcgagggcgcgagatacgagggggcgaaatagtgggcacgagaagcgaggagccgggcacagcgttggcaagagtataaaggcactgaggaaaggatctgcttccttcctttcgccatcattccccttgtcttcgccgcttgcaccctaactccttctttcctgtgtcctaccttcgccacacgcgctcgctctcaatcttctcttcctccggcgccatggcacggggctccgctctgctcgatggtagcgtgctgccgccttcccgcatcgtgagcgagaggcaggctgggctgccacgccgcttcatgccggaatctgccaccggccgggagatagtcacgctgggcgagggacgcccggcgccagtctacccggggcggtccgtcttctttctcccctttgcaatggcagggctggttccgccattttcttctttcttcatggatgttctggagttctacgatctccagatggcgcacctcacccccaacgcggtgatgacattggccatcttcgcgcatctgtgcgagatgttcatcggggtgcgcccatcccttcggctgttctggtggttcttcaccgtgcagtcggtgtcgccgccgtcggtggtcggtggctgctacttccagccgcggaggccggtgttgaaccgctacatcccctgcgtcctccgcaagaagtgggatgactggaagagcgactggttctacacccccctcgccgacgaagcgcgcctccgacttccgagccagcccccggcgcaggcctccagctggcgggcgccggtagatctgggagatggctatgacgctgtcctcgaccacctggcgggcctgtgatcccaggggctcacaggggccatggtgtacggcgactaccttcgtcgccggatcgcgccgctccagcggcgcgcccggggcgcctgggagtacaccgggtccgaggactacatgaggacccaccagggggtcagatgggattgggctcctgaggacttcaagatagtggtccaacgggtgctgaatctcagctccgtggaggcatccctcattccccaaggagtcctccccctctgcagcgatccagaccgcgcctccatcctgaccatcatgcaggcggtcggggcgtcggaggagcgggcccctcgaggccacgatggcgcgggcgggagccgtaggggggaacaatctaccccgagagggggtcgtgcttctgggccccgcgacgggggcccggggagcagccgccctgccgacgcccgggggaagaggaagcaggaaggaacctcttccccatctcctccccgagggggcggggcggcgcgtgtcagtagcaggcgcccggagggggccgcgccgacatcgcagcccgagggggagcgcaagaagaagcggctccgcaagatgggggagacagaaccatctcggggaaacctcatttcccctccaaagtggtcgtttaaccgaccccctcgcaggttcgtctctcacccattgtggctgtattcattctcttaacacgagttttcactcacccatcttgttcgtcttctggtcttttcttctgtttcagcgagatcccgtcgcgtctctcccgccattccaagtccggccagtctgaggccgaggatccggcggccgcagaggctcggaggcgggaatctgaccggcgagaggccgcggatcgcctacgggaagccgaggagaccgcccaggaggccgcccgggctcgccaggccgaggaaaccgctcgggaggaggccgccctagcccgccaggccgagaaagccgctcgggaggaggccgcccgagcccgccaggccgaggaagccgctcgggaggaagccgaatttcgccaggacgaggcaatggcgacttccgaggcagctcgcgacgaggtcgcgggcgcgtcgcttgggcccacttcctcgggcgacgctcaggcgacaacttccggggcagctggcgacgaggctgcgggcgcgtcgcttgggcccactccctcgggcgacgcccaggaccaaccaggtccgagggacatccccgagtccggcacttccatcggcggcccgagccgcgtggcatcctctccaaggcggctcttccccacgccttctatcgccccgctgagcgcagagccccttctgcaggccttggccgccgcaaacaccgtggtgttggacgggttaagtgcccaggtggaggccctgcaagctgagcgggcggagctcgacgccgcatgggcgtgtgtcaaggaggggcggccctcggtggaggccatggtggaggtgggccgcaaggcacaccgccagcacgtctcggagcttgaagctcgtaagacggtgttggcggaaatcgccaaggaagtggaggaggagcggggagctgccctcatcgccaccaccgtgatgaacgaggcgcaggacaccctccgccttcaatacgggagctgggaggcggagctagggaagaagctcgacgccgcccagggggtgcttgacgctgccgctgcccaagaacagcgggcggcggaaaccgaagcggcgtcccgacggcgcgaagagacctttgaggcgcgcgccatggcgctggaagagtgcgcctgcgtcgtggagagggatctggcggaccgcgaggccgccgtcactatccgggaggcaacgctggcggcgcacgagtctgcctgtgccgaagaggagtccgcactccgcctccgagaggacgcactcaccgagcgggagcgagctctcgaggaggccgaggccgcggcgcaacggctggcggacagcctgtccctccgcgaggcagcgcaggaggagcaggcgcgccgtaatctggaatgtgtccgcgccgagggggccgcactgattgagcgggccgctgaactcgaggtgcgggagaaggagctagacgcgagggcgcgcagcggcggggcggctgcgggcgaaaacgacttagccgcccgcctcgcagctgccgaacacaccatcaccgacctgcagggcgcgctagactcgtccgccggggaggtcgaggccctccgcttggcaagcgaggtggggcccggcatgctttgggacgccgtctcccgcctagattgcgccggtcggcaggtgggcctctggagagggcggtccgtaaagtactccgccaaccagggaggcctcgcccaacgcctctcgaagatggccggggctctccaacggctccccgaggagcttgagaagacaattaagtcattctcgagggacctcgcccaaggagcggtggagctcatactagcgagttaccaggccagggaccccaatttctctccatggatggcgctggatgagttccctcctgggaccgaggacagcgcgcgcgcgcaggtccgggatgccgccgaccatatcgtccacagcttcgagggctcagcccctcggctcgcgtttgcccccaactccgacgaggagggcgatgccggtggtgcagacgacagtgacgacgaggccgtcgacccgggcgcatcagattgagcccccaggcccccgccaatcttcagtttcttcttcttttctttcttctaaggccttcgggcctttttttgtatagatcaacttaatctgtaaaaaatgaagaaattttttgtgtcaatttcattttgctatgtgtatgagatgaggatgatctgtgccatggtccttttgtgtcttagcttgattaagggctcgtgtccaagtcccagtcctcaaaaggcgcgggtcggggctagtgcctggggagatccacatgtcgagactggccaggccgggaacgtggtgaccgagggttatgggtgacccgattgtgggtttttgccgattcccccccggagctcaccacgccccgaggcacggctcggttctgggccccgtttggcgattttagccgacccgagcccccgagggcaggattgagcacgagtgacctatttcaagtcaagattcttcaaaaggaaaaaacagcacagatacagcctttaggaaattgaaatactgaaataagaaaaataagaatgtgcatgtgtggcagcccccggccaaccctgcacgcccgagggggtgcggggttggcccgagcccgaaacctgacacccgaccccccttaggggtagaagcgacgaaggtgttcgatgttccacgggttaggcagctctgtgccgtcgcccgtggccagccgtacggaacccggccgggggacgccgatcactcgatacggaccctcccacattggtgagagcttgctcaatccagcacgcgtttggacgcggcgtaggacgaggtcgtcgacgcagagtgatcgggcccggacgtggcgctgatggtagcgccgcaggctctgctggtaacgcgcggctcggagggccgcgcgccgccttcgttcttccaagtaatcgaggtcatctctgcgaagctgatcttgatcagcctcgcagtacatggtggcccgaggagacctcagggtgaggtcggatgggagaaccgcttccgcgccgtagacgaggaagaaaggcgtttccccggttgctcggcttggtgtagttcggtttgcccagagcaccgctggcaactcctcgatccatgaatcgccgtgcttcttgagtatgttgaaggtcttggttttaagacctttgaggatttccgcattggcgcgctccacttggccattgcttctggggtgggcaggtgaggcgaagcagagcttgatgcccatgtcttcgcagtagtcgccgaagagttcactagtgaattgggtgccattatccgtaataatacggttaggtactccaaaccgggccgtgatgcccttaatgaatttaagtgcggagtgcttatcgatcttgacgaccggataagcctcgggccacttagtgaacttgtcgatcgcgacatacagatactcaaacccgcctggggcccgcctaaacggtcccaggatatcgagcccccagacagcaaatggccacgaaagtggtatggtctgcaggacctgggccggctgatggatttgcttggcgtggaattgacacgctttacatcgccggaccaggtcgaccgcatcattgggagctgtcggccaatagaaaccctggcgaaaggctttaccaaccaaggtgcgcgagacggagtgggctccgcattcgccttcatggatatcggcaagaagcataacgccttgtttccgaggaatgcacttcaggaggattccataagccgcgcgccgatagagggtcccatctaccagcacgtagcgtttggagatgcgatggacgcgttcactcccttcgcggtcctcgggtagagtcttatctgtgaggtatgcttgaatctcagcgatccaagcaatcaatctaagggtgctgggagtgctcccctcgggtcccgaggcctggactccgacgggcctcgggggccggtcaggcgcgtccgtctcccctaaggggtcgggtcgcgccgacgactgggcaagcctttcttcaaaggcgcccggtggggtctgggctcgcgaggacgcgagccgtgagagttcgtcggcaatcatgttatcccgtctgggcacatgccgaagctcaatcccgtcaaaatggcgctccatgcgccgtacttggcgcacgtaggcgtccatctgcgggtcagagcaccggtactccttacagacttggttaacgaccagctgggagtcgcctaacaccaggaggcggcggatccccagtccagctgccaccctgagtcccgcaaggagtccctcgtactctgccatattattggttgcccgaaagtcaaggcgaaccaggtatttgaggacgtctccgctcggcgaggtcaacgtgactcctacaccggcgccctgaagagacagggag

SEQ ID NO: 15947 - DNA, 3846 bp, Oryza sativa
tgactagcgggcggagggccaactctggtcgtcgggggccttaagccaccgttcggctcgagggcctctcctccctgctctctcccgggccaagtcggcacagggtggggaagcgcgaaatgagaattgtcctcatcgcgctccacaaccaatgccgcactaactacttgcggggtcgccgctaagtagagtagcaagggctcgtctggctccggggcgaccagaactgggggagagcttagatacgccttcaactgggtgagggcattttcagcttcctccgtccaggtaaacggtccggagcgtttgagaagcttaaataagggtaacgccttctctcccagcctcgatatgaaccgacttagggcggccatgcaaccggtgacgcattgcacatccctaagtttgctgggggggcgcatccgctctatagcccgtatcttctcggggttggcctcaatgcctcgggcagagaccaagaacccgagaagcttgcccgcaggtacaccgaacacacacttatcggggtttagttttatgcgggcggagcggagactcgcaaaagtttccgctagatctgtgagtaatgtttcctggttgcgcgtctttacaaccaagtcatcgacataagcctcaacattacgtcctaattggctacccaaagaaattcgagtagtacgttgaaaagtaggacctgcattctttaacccgaagggcattgtcgtataacaataggttcctatgggggtaatgaacgcagttttttcctcatcctccctagccatgcgaatctgatggtaaccagagtatgtatctagaaaacacaaaaggtcgcaccccgcagtggagtcgacaatctgatctatgcgaggcagggggtaaggatccttaggacatgccttgttaaggtcggtgtagtcgatgcacatccgaagcttgccgttcgccttgggaacgaccaccgggttcgccagccactccggatggatgacctcacggatgaatccggcctccagaagtcgcgccacctcctcgcggatgaaggcttgacgttccggggcctgccgccgcactttctgccggaccggccttgcgcccggccgcacggcgagacggtgctcaatcacctccctggggaccccgggcatatccgccggtctccatgcgaagacgtcagcatttgcccgcaggaaggagacgagcgcgtcttcctatttgccgtccagaagaccaccgatccgtgtggtcttggacgggccgtcgcccagggcaacctccttgaccgggacctcgtcgcatgtaatcatccgctgcctcggggtggcgggggcggaggtgccaagcctctcgttgccatcctcgggcttggacgcagtggcgaggtggtccgcgcgctgctccagacaagcgagcgcgactttgaggtcgccatggacagagatggggccaccggggcccggcatcttcatctgtaggtaggcgtagtggaccgccgccatgaacttcaccaacgcgggcctccccaggaccgcgttgtagggcagactgaggtccgccacatcaaagttcacccgctccgtgcggaagttggcggatgcaccgaaggtgaccggtaggtcgatgtgacctaacggccacgtgtgccccggcgtcataccgataatcggctgggacggccggagcaccatccccggggccttgatggcgtcaaaggccgcaggggaaaggatgttgagggccgctcccccatcaatgaggacacgccccaacttcacgttgcaaacggtgggggaaaccaccatcgcaatctgccctccccgggcaacgcacggtgggtggtcggtctggtcgaaggtgagggcaacctccgaccaccgcgcctgacgcgtcgcctcatgagtaggggccgcggccagaagctcttgcttcatagccttgaagctccggcgagaaacgtgagcacacgctcccccatcgatggtggcaatggtggccccaggctcttggaagcctaggtcatcatcgccatcatcgatgtcctcggcgggggccttctgcttggcctcacttcgccgattaccggagggaaccgccggggacctgccctcacggcgctcctgcctcctctacccctcccacttcctcgttcgctctgccaaacttttgactgcgcgacagtccataaggtcgtggagggaggtgttgtggacggtgcaccacttgccggctgggcgctccctgatgggagcgccggcctttttctttttgtcgctcgtaggcctccccttttgggtggcccgcgaagcgccctcgacggcgaggacatgaccctcgtcgtcggaatggactgacctcttcttcctcctcctgtcacgtcgccctgtctgagcggcggatccgggggcggccgaagctgccacaccggaaccggaggagttccaagtccaggcctcctccttgtgagccactcggtccgcgagctgaaaaagctccgcggtagtctggggctccttggaggcgatcttttcgagcatgcggttgtgccgcacgccccccctgaacgcgtagattaccgcgtgtgcagggatgcatggtatggtgttgcggatttgacagaaccgctgaatgtacgagcgaagtgactcatcatcccttcgctgtactgcgtgtaagtccgcttcttcacctgggcgcggatatgtgccctgaaagttcatggtgaactgttgacacaaatcctcccaggagtggactgacgcgggtggcaagttcattagccaaccccgcgcctgccccttcagggccatgggaaagaaattcgccatgaccctgtcgtcacccccagcggcctcaatcccggtcgtgtagacctggagaaactcggtggggttgacgctgccatcatatttttcggcgatggtgggccggaaccttgggggccaacggacattccgaagactcgccacaaaggctctacagccgacaccaccaaccgggggcacggagggctgattcccacgtccgtgttgaggtgacactctggacgaggaagcgccctccgttgcgtgggcagcacttcggtcattacgccggcgctcgatgctggtgcgggcgtccggccccccacgcagatcttctcgggtcgtaggagtcgacgaaggagtggcggccgaatggcgaacagcggctgccgctcgtcgtgcccttcgtcttgacgacgcggagccggtggtagcagcaccagaggccttggtggcggaggatcgcccaccagcatctaggcgctgccgtgccgtcatgactaatttggccacgtcgtccagccatcgttgggctggagactccgggtcagggacgacaggcgggtgacgtaagagcgcgcccgcagcttggagcgcgccctggggcgtgctgccgtcgccgtagacgaggagacgacgctccccatctcgccgttcttctccatcgcccgcgataggtgaagtcgcggatctttcgaccctctcgagcgcctccccccgcttaggactttggcgtggagggggcggcggagtacgagctcgacggcgtaggttcggctccccgtcgtcgccactcacactcggagagaggtcgtgcgcctttgcttgctcggccatcaggctgaacaggaaaagcttggcgcacaccgaagagcacaagagctcagaaaacacacactgagcccctacctggcgcgccagatgacggagcgtggggctcctcaccgggagaccgcgcaggcccccctttgccggttaggccggggactcagggtgaaaatctaagctctatgggaatggaaggttcgcgagagtcgaaagagca

SEQ ID NO: 15948 - DNA, 2738 bp, Oryza sativa
gtaacacgctagctctagctggggacgcgtgccctagaagctctcgtcctgacgggatggggcaaagcgtgcgtcagaccgcctgtcgccacttaacccgtgatctgaccggtctgtgactggtcatagaccggatatacgagtgcactgcactgcgttacatgcggcgtgacacgctcagccaaaccgcaataaatgcggttaggtgagccccgctgtgctcacctaacccatacacgcggagcagaacccacgaggggtcggggcgcctcggccctcggggccgaggcgggaatggtccgaccccctcggggagactaagaggagggcgaacacatcaccctcgggcccgacgtcccccgagggtgccaggccacgtgggcgattgtgtctgcctcaagcctctagtcatgatactcccggtcccatgtcgccgacaacggccattgcggattctgtcgcccatcgtcggaaccgagccgctgccgttgtggattcatcacgtgaaaatgtgctgccgacagcggcgctcccggtcgacgtgccacctcgtctcgagcatccatcgccgcctcttcctcattcagctgggttggttggggagggccaccggctggatggggaaggggaaagatgtggatggagagaaggaagaaaaagtgtagagattgatatgtgggtctcattgtcagatggaagaacttaataaagatgcagttagagtgaaagataaatttgaccctctaacttttctgacaaactagctaaatggacatttggagagtcggatctgaagatactgctgaagatgctagtatatccacattaacaaaaaggatgaaatggtgaggagagagaacatgagcggcgacaaggtcaggaaatcgaatggcacttaaatgtacaaatccaaaggaaacctataaggtcatgaaatcatacatatagcaaaatgcccatgctttgctatggatagaaggaaacaatatcataatatgtcatggaaaaaaatactccctccctcccaaaatattatggcttttagccctgaagatttgttaaaaatataacaacttctccaccaacgttctcttcccaaccaatcacaaccctctatcatttactttttctcacctacctccactactcatccaatcacaaccctctaccactcacttttacctactttctaataaacttgtccaaccctaaaactttttatattctggaacggagggagtacttttttttatcaaatatcttagtctcacttgtttgctcatttgattatctgttattcacttgtttgatcaaatgctggactatttcataatattaaaaaaatatcaggtgacaatttgtaaaaactgtaaaaataaactagaggttttaaagaagtatagataagacatccaaaactcagatacgaataaaacctagtatgccactcttgaactaaaatatgttgtagtatatatgaccaggggcggagacaagggtggggtaattatggcttgagccctagacttaggaccaaattcccattaaaatcttatacaaaatactgtgaaaaactgaagatataaagagatttgctggtcctaggcgtgatcaattattggctccgtcactgtatatgacgcatgttttgatacgatcgataaagcaatcaacgttttggactggtacaccactacacctaatggtggaccagcgccagcaagctagccgccatctaactaagcttatgtgtgtgtacattcaagtgccattcgaaggctacacaacaacagagttgacttcagttgatatgcaactcaagttaatttgcattgtaaaccacaagtacttgtactatacttcgtatattaattagtaaacaattagaattacctcctaaactgttgagatagtacgatttacaccttcaactcaaatactagatattttacaccctaaactattttatactggacaaataacctctcaagcaatattctagacggttttgatctggttttgactaagggtggcatatgtggtgccgaagtagcatctctaatcaacagaaagttttttttttaaaaaaagaaaacataggggttactcatttctatctccttgcacccctctctctctctctttctccccaacatgcgtggcaaggaacaccccagcatctagtgatggtggcggcagtgaggagtgcccaatagtggtagcagcgtcgacagctacgaggagcacccagtgacgaagaacgagcccaccaatggggctcgaggagggcacggctctagccttccaatctgtccgcttctcctcaccgcctctacctccactgaccgccatcgcctccgcctccacagaacacttgaggaagagaaggcgaattggagaggagtgcggtggtggtccccgatcagtagctctgaggcagggtcttgtcgccgccttcacctcgacctcccatatcaggtccgggatgcgcaggagccgcatctatttccaggatgaagacaatggcaagaagatggtgcctaacttctagcgcccaatctgcggagatctcgagctccatcaatactagcttccttcttaagcgagctcccccttcttcgccaccccgagcccaagcctctagcttggctccgcccaacccaccgcccctatccctcgttccgaccgctaccgttccttgctccagctgcctcccccatctggccatcccgatccca

SEQ ID NO: 15949 - DNA, 3095 bp, Oryza sativa
cacaaaaaatgggattatacaattccctctggaattgaattggaggcccaattctatcaaccaaacgaagactcgtgcgtattcaactcaactatgtattaataatattaggttaattgaacatttacctgcaatagaaagggaagcatcaatcttaaaagagaatgaagatcgcagaattgcatctcaatagactccaatgtgctttgtcggagatcattttcgcagaacttcacaactttataaaccatctccaagaaatgatcagagaatagacaggttaggccaaatgcagagtgcagaaatgtacttctccactctgattggacccatattttgttgaggggcttaagaagatagtgaagtacccccttatactgttcagacctgtaaaaggaacttaaaggtaaggaatcactttttgttatataaagtaaagtcattaccaatactcctaaataagtgacatattttccttacaaaaaatgatcgctgacttctataatatcatgttaatggaaaatattaagaattgaacaatatcattctcatttaggcaacctaatatattatacgtgtatcaatagctgattgctaaatatgaccacactttttttagaaaatcatgtatttatgaatagagtaacaaaatatagcaaaatatcaaatgatgtcataccttaaacaggatgttacaacatcaaatgcttcacataaaatattatattctgcaagaagtagacagcccttaacttgatggcaaggtactgcaccattgttgcactgcatcatcaatgagaagactttacagaaagaatatgcttgacagcacattattataatgcatgttaaaaaagaaaaaaaatacccgcattcttgggtgaattatatcatcgaatttatttgacatgttagtactatcagtgtcatcttgatggatcaaactactgcaatcaaaactgctcaattcctcacgcctgaattttagaagatgctgcaaatggagaaaaaaataccacatattaatgtccactatatatttatgttcatatagttcctgcaatagacattttacacatacaaagcattattaataaaagagaacattcatatagacctgaagcatcctagcaccatgacgctggacctcaggagggaaatcattgctgaccaacagaagagatgcatccaccaacaagtcgacatagcctttctctctctcttttacctatccgtagggatcaaacaagatcagtagttatatatatagtttggtagatagaaggaaacaaccaaagaatgagcaaaattttgaagcgtgcaaatccaatacactagtagattcttaaaactgtgctagagaaccaggagatgcataatctagtgctgcataaccacattattttgcccagcgttaagcgcgagaaggcaagagagatacgaaccggctccggctccaattcaacagggtaggaattcctggcgcaagtattgacactgctacaagcccaagccgcggcgggaccagcggcgaccgaacaagtgttcatcttctcagttagctagctgagaattgggggagaaaaagggaaaaactaggttactagacctagttggcggcggcgcggggcggagacggaaagagagagagaggctccacctgcggcggcggaaggccggcgcgcgtccaggcggcggggagagcgccggcgcgggggcccggtgcgtgggggattcggggcgtggggttagggggaacgaactagtacaagtcgacggggttggctgttgcgtgcgcacctctctttatagtctcctcgcgtagttgcgtacatacgttatacaaatactctacaatggttgtacgtagatatacaaagtatatgtgtgtatttatatatatattttttatgtataccaaaataaattgacgtatacacaatatacatatatacaaagtactccctcaaatatgaaattagcatcatatgaaagtattttaaaatatgaatatatatatatatatatatatatatatatatatatatatatatatatatatatatatatattaaatttgtttggtgttccatggtgcccgggcaccataattgaaattgagtatatacccaattcgaatgagtatgaaacttttttaaatgtttaggtattaacattaactactgtaatatatatatatatatatacacacacatatagagagagagagatgggaggaggagcctacggctcaggcaaccgatccgattggaacaaaatcgggcattgatgtcagcacccgatttacgtggaaaactactttaaactgatttttctcctaaattacttatccaaatcattatccgattgcaccattaaattcattgcaattaaatcttcaaaacaagaccacacatggatatattccgatgaaaaaaaagcttattattgaattatttttaaatgttgcacgatgttccaccaggtatatcggaattgtttcactaagtagatcgaaaatgtttcatttgtttaaatcgggtgttgtttcatcttatataaaaacaatgtttcagtaaatagcgaaagaaagaatgtttcagttcactacaatattagatctatacatagtgaaacattatgagtacattaggtgaaacatttttcggtagaatggaaaataaaccaaattcccttaataggggtttccaaaatatgtgtttttttttacaatggaatgtctagttcactgcaacattagatttagacatagtgaaacattatgagtacactaggtgaaacattttttgtggaacaagtaataaaccaaattcccttaatatagagtttccaaaatatgtgggtttttcttttgcaaaacaatattttaattcactgcaacattaaatttataaaaagtgaaacattctaaatacactaggtgaaaacatcttttatagaaaaaaaggagggagaagtgatgggcccagtaggtagcacgtggggggagggggggagggggagcgcccgatccggttcccccgcgccgatcgtccgagcgtaagtattattgatatatatatatatatatgtgt

SEQ ID NO: 15950 - DNA, 1100 bp, Oryza sativa
cgccctttgaccccgaggctaaccctgtgctgactcgacccgggagagagcagggagaagaggcccccgagccgaacggtggcctaaggcccctgacgaccggagttggccctttgcccgtttgtccgacgacgccaggagcccccgacccccgggacggccccgaggccactgtgggaaggccgcccctgtcatcctccgaccccgaggtcatcagcacagaagacgagtgcgccccacgaggccgcttggacgaagagcgccccggggatgcagcccctagcgaagaggatcggccccaccgaaaggtgcagcggcctgtctactttgttagtgaggccctccgggatgccaagacccgataccctcaggcctagaaaatgctttacgctattctgatggcctcgaggaaactgcgccattatttccaggcgcatcgggttacggtggttacgtcttaccccctcggtcaaatcttgcataatcgagagggtacaggacgggtggtgaaatgggcgatcgaactttctgagtttgatttgcactttgaaccgcgccacgctatcaagagccaggccctcgccgactttgtggcagagtggaccccggctcccgagcccgtctcaatccccgaggccaactcgggcccctcgcagttgcctcacaccgcccactgggtgatgcagttcgacggctccctgtctcttcagggcgccggtgcaggagtcacgttgacctcgccgagcggagacgtcctcaaatacctggttcgccttgactttcgggcaaccaataatatggcagagtacgagggactccttgcgggactcagggtggcagctggactggggatccgccgcctcctggtgttaggcgactcccagctggtcgttaaccaagtctgtaaggagtaccggtgctctgacccgcagatggacgcctacgtgcgccaagtacggcgcatggagcgccattttgacgggattgagcttcggcatgtgcccagacgggataacatgattgccgacgaactctcacggctcgcgtcctcgcgagcccagaccccaccgggcgcctttgaagaaaggcttgcccagtcg

SEQ ID NO: 15951 - DNA, 548 bp, Oryza sativa
  unsure (1)..(548): unsure at all n locations
atctttaggaaattgaaatactgaaataagaaaaataagaatgtgcatgtgtggcagcccccggccaaccctgcacgcccgagggggtgcggggttggcccgagcccgaaacctgacacccgaccccccttaggggtagaagcgacgaaggtgttcgatgttccacgggttaggcagctctgtgccgtcgcccgtggccagccgtacggaacccggccgggggacgccgatcactcgatacggaccctcccacattggtgagagcttgctcaatccagcacgcgtttggacgcggcgtaggacgaggtcgtcgacgcagagtgatcgggcccggacgtggcgctgatggtagcgccgcaggctctgctggtaacgcgcggctcggagggccgcgcgccgccttcgttctttcaagtaatcgaggtcatctctgcgaagctgatcttgatcagcctcgcagtacatgggggcccgaggagacctcanggtgaggtcggatgggagaaccgcttccgcgccgtaaacgaagaagaaaggcgttttcccgg

SEQ ID NO: 15952 - DNA, 576 bp, Oryza sativa
cacggggctccgctctgctcgatggtagcgtgctgccgccttcccgcatcgtgagcgagaggcaggctgggctgccacgccgcttcatgccggaatctgccaccggccgggagatagtcacgctgggcgagggacgcccggcgccagtctacccggggcggtccgtcttctttctcccctttgcaatggcagggctggttccgccattttcttctttcttcatggatgttctggagttctacgatctccagatggcgcacctcacccccaacgcggtgatgacattggccatcttcgcgcatctgtgcgagatgttcatcggggtgcgcccatcccttcggctgttctggtggttcttcaccgtgcagtcggtgtcgccgccgtcggtggtcggtggctgctacttccagccgcggaggccggtgttgaaccgctacatcccctgcgtcctccgcaagaagtgggatgactggaagagcgactggttctacacccccctcgccgacgaagcgcgcctccgacttccgagccagcccccggcgcaggcctccagctggcgggcgccggtagatctgg

SEQ ID NO: 15953 - DNA, 1163 bp, Oryza sativa
gcaaaattagttgaggggaaatattcctcttatcctcctctatctttacccccaagaatcggagcaaactgttgagtattttatccgaatcgaactcgtttttgagtttatctccaaaaccgagtttttgatttcccggatcgatttattgcgggaggagtccgatctcttcaatccaaggctataaataggaccccctagtcctcctctttcgttttccctctttcccgtgctctctcgtgctccgtagcctcgtcgccgcgtcgcgcaagccgccgacgtcgccggtcaacgtgcagccgcgctgcgccgtcgccctagccgtcgccgctgcctcctctcgccgccggcgggtgcgcgtgaccgagggctagcccggccgccccttcccggtcgtcgccggccaccggagcccctccgccgccggtcaaccgagccgccgccgtcgcccctctcgtcgccggtcgtcgtccgacgtcgtttgtcgttgtggtgagtaccgttgggttcgtctcgtcgtcctctacgtgtacatgccctcctttttcccggccgaccaccctagctccggcgaggtcgccatccgagccggtcgccatggatgatgtcagcatgacatcatcatcttctccttttccagttttttctaatagattaaatcttcggaaaatcataactaaataactgtagatccgattcgagtggttcaagttgctaaatttttctaaaatcaagatctacatgttaaaaatattcacatgtactgtttatgcttgtttttgtactgttttgttgatttttattctttcgctttagtttccgacgttctgaaggagagcgttttcgttgagcaaggttcggaagtgtttgcggaagctcaaggcaagtcacacagatcccaaacaaccctttgagcatgttgaacccatttaaagctattattttatttcaactatgcattgttttcgaatgtcatcgggtggtgaacctttcccaattaattaatggccgaagatgatcttattttcctatgggttataatttgattagcatgaaccttacatattggattggttcagctaaatgttatatgtatgtttgcttagccatgcttatatttaatataaatataaattatggtgatatttaaatataaactatat

SEQ ID NO: 15954 - DNA, 608 bp, Oryza sativa
ccccgcatctaaagcaatcaccttgctcttccccatttggttcatctttttcctcattggcttttcctttgcccttgggttttccctttcctttgcctttgaacatggcacctcctttctccttccatttcccgctcctacggcctctcttgcggttgcaagaactctcagcaacattagcgtgtgcttcaggcacagctagagaaccagtaggatgaggagaatgattatccatgaggacttgattctgttgttctgcaaccatcagtacttctatcagctcagagtacttggtgtacttagagtttctgtactgttgttgcaaaaccatgttaccagggtggaaggtggacagggttttctcgatcatatccttgtcagtgatcttctggccacatagacttagtctggacacaagcttgtgtaaagcggagttatacgctgtcacagacttaaagtcttgaaagcgtaaggtgatccagtcttgttgtgctctggggagcataatagactgttgctggccaaaatggtccttcagggactaccataggaccagcggatccctctcagtcatgtactcagacttcaggtttgggtcaagatggtgg

SEQ ID NO: 15955 - DNA, 696 bp, Oryza sativa
aaactacaaggcctggtgttcaggctttgcgccactgtgcgtaggaggggacatggaatcagtggcagttcaggagtttagccgcacactcttcaacatacgtccagacatagccctgagtgtcgcccagacaatcttccagagtgatgtgcgaagcctcctaccacttgtcaccgtaccatgccacattgttcagagcaccaaagatcttgctgtgccggttgtggtgtctgagtacctgcacaagcacctcggtggcgactcaatcgtcgaggtaatgccgtctgagggccatctaccccaacttagctcaccggacatagtcatccctgtcttgcttcgacacatccagcatgacattgcggtctaggtggtgcaaccattccgcctagagctgttcatcagaagttgtataatttcagtatctgtactccactgaatcacccgacttaggatccatctactgttgttgtaataagattctccatatgttgtaaattgatggcggtggagaagtagtctatggtgtttgtaaaccactgcacgtatgatgttcattataatgttggatgttttaacgtaaccgagtccttcagaattaaactcatcatgtcagtgtggccgctaccacgagctgcaactctgttttatggttcttcatgtctgttgcaactctgttctatgttactttttgga

SEQ ID NO: 15956 - DNA, 2744 bp, Oryza sativa
aagcaagatagtgaaattacagctcgaaatggttaaatatttctccaaaatgatttcacgcccgtttggttgccacggcacgggcatctcgtttttttccctgcacaatcgtatcaacgcccgcctttcgtgggggcaccatcaaccgagacacatccttcaaaatgttattgcttgaaaggcgaactaatgttgcaagaacaatgttgtcgccaaaattcaaagaactagctgaagataaccatccacaaatatttacggattatattcacaaaacttcatctgattatttacaggcaatgctgaatgctcatgctgaaaaaatgctggatgtagctcataaaccagcagagcgtgccagctgtgcccaaaaagatttcaagactgccaaactcgtatgtacatgatttccttttctccgcttatatatatttcacggtttaactaaacaaccacaggaataaacatgtgaacgaaaacgttatttcccatgttcatttcttttcatagcaacaatcttcttggtgtagaatatccatcctataacataagacaatgtcctccatcctctatacgccttgggcttagatatcgttgcaatgaagcctttcaatgcagctccaaggtcttgtgtgtcaaaggatacagatggatctgaacaacgatagtaatcttcactgaatgaggggtgactggtgcaatcctcataaaccaaagaatttgagaacttgtccactgtctgtgatacttgcggtggtgcatggccaccaagtgggggtaactctgactgatattgattttcattgttttctgcagtttccaatggacaaggatccaatgcactcgagggatcaattgagaaaatgtcaggtgatggtatgcttgactggctcaaaccaaacccatcggtaaaaacttgtgtagaaaactggtcatagtcattttcatgcaatgacgtagttctcacatcaaggagctgtgaaggatttgccagaagtgtttcattgtcacaggtgaagacattcttccaattttcatacgcttgcttcacagctgcatatgcttcagcctataaagagcaaaagttaaggtaaaaaaaagatggtccatatcctaactggtgaaggggaaatatacaagaaccttctataactaactaagtcgaataaaaaattgtgaataccttctccttttctctaagatcatcagcacaaacaaacttctcagatattaaccctctcacttctccaacaacattgaacacgactgctgttttgcttaggctgtctggatagtacaaatgcaccttgtcagggagaatacaggtttttgaatgctcaacttgtgacctcccacatctttgttgacatgccactgcccaatatctgcataatttgagcataaggtcacatatccacacattttgctgaacggccactatcatctacaaattcaggcaaaaagatagaaatatgacatatgcttactgaggaaaaaactagcttagattagcataacgatgtttaccacagaaaaacaatagattcactcaaatgtaagaaacatacagtttcatggttatacatttctcaacataacaaaataatgctgacaaccataacagtaacttctcaagctggccagtcttcccctacctgattagtccacatggacctacaaaatgctgacacgtggaacaaagagaagatgcagcctacagctagccagctagctacgctctgctttcctggttacaatcctctagatacttccaagctcatagaagtatagtcaataaattaaattaagaacacctcaatccttcggatgatctcaaaagttattacccctagaataaacattcacagagaaacacaaaactacacaaaatttaggaaaaactaggagaaataccataaattggaaaataaataattacatgttatagtggaaaaaaaatagctgtcaaaagaaataatagggccaagactttcttttgagaaaaacaatcaacaattcaagtctagagcccagatgcttttgagcgggtttttgaaactggagctcaaaaaataaatagagaaaacaatggaaaatcaaaatgtaaaaaaacagatctctaaaattgaagctcccaaaaaaaagagagaacacaactggaaatcaaaatatatataaaaaatagagaaccaaactcaaaatcaaaatgtaaaagaaaaagaaagcacccaacggatatcagttgcactgtatcgctctgacgatttccgatgctagatatggtcgattgattatgataattattgaaaatccaacagctcacaaacaaaattttccaatttatgaaagctggtaatttcttactgaacatgcatttttaaataacaagtaggtaacataataaggcatatattactattgtacttcaactctcaaactttgataaaaacaaaattaaagagcgtattatagggttattttcaaatattgttgggattttacaataattaaattaattatgtaaatacttgcaaaatattttgatcatgtcacggctataaattttgaagcacgccaatacgtgctgatgattttctagtttgatgtacatcagtacattatatgtaaatattcgatagaaagaattgcaacaataggcagattgtgtaaactcaaaaaaagaatgcaaaatacaaacatagaaagattcttttatctttgaacaaatgcgagtgatgagctac

SEQ ID NO: 15957 - DNA, 1074 bp, Oryza sativa
taacgtatccagggcagagcagcatatcgatcttagaattagctttcagttcacgcgcatcatacaaaaatggtgaccaacatgacccacgatgactacgtctccctctgcctcatggcgctcgcccaggcgggcgtcgggggtcagtggccggcgcagaaacagcagatcgacatggcaccgccggcaccggaacgcgagcttcttcggttccggtgctccgtctgcggcaaggccttcccgtcgcaccaagcgctcggcgggcacaaggccagccaccgcaagccgcagacgaccgcgttgcccatgcacgtaatcgacgcgccgccgccgccgtcggctgaggacacagcctcgtcgtcgacgacgacaacaacgtcgggcggcggcaggcacaggtgctcggtttgccaccgtaccttcgcgacggggcaggcgctcggagggcacaagaggtgccattactgggacgggctgtcggtggtgtcggtcacggcttcggcgtcaggttccgggtcgtcgagcgtgaggaactttgacctcaacctgaaaccggtgccggagacggtggccgctggcgtcacaaggtggggagaggaggaggaggttcagaaccctttgccgttcaagaagcgccggctgtcaagcccatcattggagcttaatttatagtagcatgttaattcatcgtaattccttactgtccagagattcattcgtttacttttttttcttgttaaaggtatcctttgtgattaattatctcttcgaccgtctttatattcgtgaccaaggaagaaataatttctgaatcatgattgatgaagcatctccattcaagagttaagtttatgatgccccaagttgatattgtcggcagtattaccatatgcttttttctccaatttatatctactagaaaaaatatctatgcgttgcactgggtgaaggttatcttaatcttattattgttatacggtttagctaaagtgaaattcattgtaggaatttgcttggatattgtttttacaatatcatgagctacaattaagagtccgatcgtcttaaattagc

SEQ ID NO: 15958 - DNA, 639 bp, Oryza sativa
aataccaaataaaagaattaccaattcatatatcaagcagtgcccgtaaaggacacaaatcaattagatccaatgatcaaataatttaaactaacaaataatgatctataattcattctcaacttgattaattttaatggttctaatcatttaaatgagcaaataatgatccataaaattcattctccacttgattaattttattcggttctagttttttgtagaatacagcattttacaacatgtaaccttgaaagcaatgtttataatggaactaaattcgggagcaatttggatgaatggcatagaaaacaagatgtgcaataatataaaaaacaattgaacgcatcatgggacaatcttgaaaaccttcatcttttctatccatgtgttgaaggaattcaccgtgttccggaagccaaggaatccatgttccttgctcttgttcatgctatccaaatgctcgctgcggacgccgaacacggcatcaacaaaccaccaattggtgatctcttcaagctcggtgtccatgagatcattctctttgacaatctctgcccacactgcctccttccccgacatggcatctgcaagcttgaagctgctctcttctccctcgtagccagaccattcgacgcc

SEQ ID NO: 15959 - DNA, 1097 bp, Oryza sativa
ataatatagcgtctatatatattgagcagattgagtacattaattttagattgaacaaatatacaaagaatcaaatgaatcaacactcctagaaccatatatgtcccttggcgacaatcaatcttggaagatccatggtcaccagcttagcttgttgcatactcgatgacagaaaccaaacaattagtgagttgaaaagaaaaaaaaaatcaaagaatagactctgttcaatagagtcgatcaatgggcagatctcttgtttttacaagatggcgtatgatgaattagttggacatcctgagcttcttgaccggcagtggactctgcacctcctcctcctccgcccacctcttgatcccggcggcggctgtgctctccggcagcggcatcaggttgaggtcgaagttcctgacggccgacgaggcggccgacgcggacgccgagacggagacggacaccgacgtgccgtcccagtagtggcagcgcttgtggccgccgagcgcctgccccgtcgcgaagctcctcctgcagatggtgcaccggtgcgggccagtgctcccggccgctgacgacgccgagtcctccttcgagtcaccagcggatgccagctgctgcgccgcggcggcggcgccgtagtggtctcccggggaaggcggcttccggtggctggacttgtgtccgccgagcgcctggtacgaggcgaaggccttcccgcagacggtgcaccggaagcggagctcctcaggcgccgcgggcgctgggcacagccacttattgcaggcctgcacctgctgctggcctcccactcccaccagggccttccccgcccgcgtgcaggcgagcgcggcgaggcagatggcgaggtactcctccttgttgatcgccggcgtgggcaggcccaaggacagcgccgtcgggtcgagcagcgcttgcagggcggccgtcatatctgtccccgttgccgtcgtcgtaaaacctaattaatcaagctgtatagtacgtagcagcagcagcgagcggtggatgatttgatgggattgattgctaacaagtacagtacgtagctgcagggagatggatggatgatgagctagcct

SEQ ID NO: 15960 - DNA, 690 bp, Oryza sativa
gaacgcgctgcggctgtcccgcaaccggttcgcgttcgacctcggcagcgtggagctgcccgaggggctggacatcctggtcatcgaccacaacatggtgtacgggagcatcccgccggcggcggcggcggcggggaggaagtggctggcgttcgacgtcagctacaaccagctgtgcgggcccataccgcaggggcggtacacgcaccggttcggggccaagcacttcgccgggaacaagtgcctctgcgaccgcccgctgccgccgtgcagcagctagcttaagcacgaacccaggcactgcccactgatcgattggttattacgtaatttgcgattgttgctgcatcgcagacatccttttcctcaatttactttgagatcattaatcatcattaataaattgtcagtgataagctggcttagcctagaacggcaagataaagatgcgttatatgcctggccatgctgtccagaatgtgtattcagaggatttgtggtgcgtgcactacttaaaagacgttttttcacggcgagaggcttatacattttaccggcggaccatatttttagctgtgattatccatatatgaagttatcccgtgaaaatagattttagcaggtggatagcttactctttttaccgcgtcgatgtaattggatttggttcggtaatttttcccttttttt

SEQ ID NO: 15961 - DNA, 1525 bp, Oryza sativa
aattatcttactaataatgtcgttaagaaatacctacagccgaagcaagaccgcgctacagcgtgacgccgacacgcgttagtggcaagaccaatatgcgagctgaaattttgcttgtagggcgctcgaggcaaattggaatttcaaatgagagatgattcaccaattcatatttgtagtttaatcaagacatattataccaaggcatcataactagagactactaaaaaaatatatcaagattttctcccgtgtatttgtacacaaggttttgacttaaatttctaacagcaaaagaaaaaaacaaccgttatgttgtgagcacttctgtatatgtcccatcaatattttggtcagaatcattatttcttttctttgatatggtattgtgctccgaaagcctcttccgtttctttgaatcattgtcttgttccacaacaaggatttttatgtgtttttcttgcagtggctctagaaagcgcgacgcatagttgactatgagagaatactggttcgggtaggtatatgccgatgtttggtactgtttgcccttgtgccttatttatcgtcatggcaaagttaagccttacaggaaattatttccttttgaattggaatgggaacatttcatcatcagaggggcttagtgggattcgaggcaagaaaacccgtgtaccagaatgttgtcctagcacaatcactgtatcaatggtattctctgaaatcctcgcaccaccaatcttgtgccattgcaaagtccattagctaggtcgatattcctgagcaatatgatgggataattaagtttgagctttagcatgtgaggaggcaacccatttgggttcagaacgataattcgatcaatatcaggaaaattatactatcaaaatttatctataaatagtttaatatagagaaatctataagttataataatttttagtggatcaaatagtgctaaaactaataatgtaaatgaaaaaacaactgaaattagttagtaattgaaagaacttcttttagcccacatatgaaaaatctaattcattaattctgaacgcggccgacaacaacatggttgcgatagagagaaacgacagcggtgaactcttgtggtgaacacaatcgagtgagtacattgtcacaccccaatccggcaccgccgtacaacggcacctgacaggagcgtgtcgtaggaataacgacgcgaaccgcttcctacgaaaccgcgatctcagtaccagtcccaggacatagtgctggtacccacggtgacaaatatgaatcattgcaaatccttaaaataaatagaggacttatttaccttaacttaggttgcagctcagacagcccgagaatgcaaccaacgacacggaagagaaaactccaacaacaacagcagcagcggaaccaacgaactaacacccaacaccacaggcgatggctgggaaccaggacgaaaccctaatcttcacttcactttacttcacgacggaggaactatatatatttatatagagcaagg

SEQ ID NO: 15962 - DNA, 1136 bp, Oryza sativa
acccagggttacctcatgccacatagaaggatcaagtcctcacgtaagcttgcatgcctgcaggtcgactctacaaatccccttccaaccaccttgatcggtaagtgagcaagcttcttgtccttgccttaccaagaacccggtttgtccgaccccgccccggcgttcccaactattggcatgcgaggtttccctgaaccgactagttacttagccaaggtgtcccattccaccttgtggttgcactttgattatgctcgatgagtttcccacaggaatcggttcttatatgcgaatacgggacaatgccacgtaggcacggctcccgcatcgcgagttttcgcaattcattttattttcaagcacaccgacacatgtccggttttcaaggcttcacaaacccatttcccaagttttcgacaatcaacggtgtatgcgggatatttggtacacgcgctcagagagcacggataccaaggtaccacaagggtggagagacaaggaatcagggtagtacagcctacagggattagtgcgactactgagtaggtccgtcggtttggcacgcaaaccgaggccaagcaaattaagtgtgtgattctaataatgcaagttgcaaacaagataataatgattttccaattataggagcaattggtcaaagggtgacttgccttgctcaaggtcttcacgaggcttcacgaatcttcgagaaaacccacgatcgacgaaaatccggtaaccgcaactatatgcaaacaatcaaaacctaaacaaaagaccaaaagaaagaccatatttagactaattaatagttccattaaatatatctcaattttacagaattattggaagtggaacgggggtcaatcggacaagcggttgagaagataggaattttggaaggtcaatggatttttttagataaggaaatgatttatcggaattttctggaatacgaggaatggtttatggaatttatagaaataatattctcaagaatattattgatagtcactgacgtgcaggaccaagggaaatgatttatggaacaaaaggaaaaaagatttattaaatcccttggaaaagaaagggatgagggatgtgaattggacttgtatcgggtggcattggtg

SEQ ID NO: 15963 - DNA, 1092 bp, Oryza sativa
ctatagggcgaattcgagctcggtacctgtttcggatttgccgtatatcgactccgagcaagtttcgcactttggcggttttcgaccattacttccgggctttaaataccaaccggtacccttgagaaaatttaaaacggtccttttcgttttcaccggttgaaccaaagttggccttttttttttccaggaattccaccgacgcaaaaggcaattccaaagcgattccttctccggcggacctccgcttcggtgatgtcgtcctccgccagcccgtctaccgcgccatctgccgagtacgctgaggtaagttctcatcggctagatcccttttctcgcatgaaatcgatttccctcttcctcatcttgttttcttcttctctatctttgttcacatttgtagcacctatccaatctgattgcgattccaagtctatcgcatgagggacattattttctcggtccaatcggcaacctagaccccactgatttcatcatcggcgaaaccaacataatcccctttagattagccaaccttaatcttggtcactggaagaatacttttaagtcttggccatctctcagaaaaccacccctgagaaaagctggattacatggtacaagcgcgtatcggctagcaagaaagttcactgggatgagatcggaatcggccaagcacttgcccttaccatagtaaattcatccaaggatgaacccttaatggccgccgccacctacttctggtccaatactatcaacgcctttatgttcaaccaagggctgatgaacttgaacaccaagaaccaatacgatttcaggaccaaaagcataggtggttggtctggttatgtggcagcatatatgggccaaggatccgttactcctcgagagcatgtggcctttttactcatgtggctagaaaagtttcttttctgtggatccagctgtggtcctacaaccaactggcagtttgcagccgaagctcttgagccaaaaagagaatttcctctaggcaaaatcctcctcggctacttataccaaatgctgaacaatgcatcggccaaaatagccgtcagctcggtggttggagca

SEQ ID NO: 15964 - DNA, 3071 bp, Oryza sativa
ttgaagaagtagaacagattaggcaaaggggtatatcggctatccagcactatttgtctcggtgactttttgtgcaatagatcttagaaatttttgtaatcggctaagatactctagtactttactgtcttgacaatcctttgtgccgactaatataacttctaaatttgctcaaaaatttgcaattttccgctcaaaaatttgcaattttcctgtatgtgcccccctaattttacaatgtcaaaacattgataaaattataaaaacaactaagggcgatataaccatatcggccattgtgcatcggcaaaccacaaccgattacaatatggaaacaactaagggtgatacaaccatatcggccattgtacatcggcaaaccacaaccgattacaatatagaaacaactaagggcgatataaccatatcagccatctcaaggcgatgtaaacacatcggctatcatgtatcagcaacatcagccgatcatgcattaacccaaacacttgggtaatatttcttcaagtatttgccattcaatgctctgccatagacttccccatcaagtccttgcaacatgtaagctcctttagacaccactttatgaatttggaacggtccttcccaatttggcgaccacttgccaaatttgctacccgagttccaatcggcaaaatcaacttccatacaagttcaccttccgaaaaatccttgggcaccactttcttgttatagtgtcgagcaattcgctctttatccttggtaacctttgcaagggctcttaatctggattgaaccaagtcttccctttcattagccataaggttataatacttatcggttgttaaattatcttgcactcagttctccttgagccgattctaacctcccatggcaaaacagcttcatgtccgtaaacaagcttataaggagggacttggatcgatccataacaagccatccgataagaccacaatgcctcgaccaaccgagtatgccattgccgaggataatcagaaatcttcctcttaatcaacttgatcaagcttttgttagatgcctcgcttgcccattagcttgtgcataatacggtgaagaatttaacagtttgattcccatactatcagcaaattgaacaaactcatcgggcacgaaaattgaaccctgatcagttgtaatggtttgaggaataccaaatcggtagattatatgctcttgaacaaaccgtatcgcatccccagaatcaaccttattcaaatgaatcgcctctacccatttggtgaaataatcagtcgccaccaatataaacttatgtcctttactcgatggtggattaatcatgtcgatcatatcaattccccaacctctgaatggccatggtttaatgaaaggattcatagccgacgctggtgctcgctgaattgctccaaatttctgagaatcttgacatcctttgtaatacctgaaacaatcttccagcattgtcggccaaaaataccctgcacgccgaagcaaccacttcattttatgagccgattgatgagtaccacaaatcccttcatgaacttcgccgatcgcaactttagcctgatcggcactcaaacacttaagcaacattccatcaatcgtccgataatagagctcatcatccaataaagtatacttcaacgctttatatctcaatttccgagaagccgactgagatgtattttgtaaatattgatgtacatcatacctccaatcatcggctgttaatgcagcaaccttaaccctgatatctttgatcatcggcttataccccgatgccccttgggccaaatcattagcttcaatattttgttctcgagatacatgcctcagagttactagccgaaactccttcatcaactctcagtacttctcattataaaccattaatgtatcattcttgcactcatattctcgtgtcaattgactgatcactagcaaagaatcccccataatttcaatagcatcggcttcaacttccttgaataactgcaaccctttaagaactgcctcatactcagcttgattgttggttgcataaggtttaatagtataagcaaactcaaaacatgccccccgaggggaaattataaccaagccgatgccacaaccatgagtgtatactgatccatcaaataataaagtccatggcataatctcaaccgagccgattgaatcatcacgatgttctacagtaaaatcggctatagcttgtcctttaatcgccttcggcgatccatactgaagatcaaactcagttaaggaaaatatccactttccaacccttcctttcaaaattggagccgataacatgtatttaacaacatcggccttgcatatgacagtgcattcattggacaatagataatgccttaaccttggacatgaaaaatataagcacaagcataacttctccacgggggaatatctagtttctgcatccaagagccaatgacttagataaaacacaactctctctttcccttcaagctcctgaatcaagatcgaaccgattgacttcttaccggctgacagatatagctgaaaaggtatccccttctatggaggaatcaaaactggaggagagctacgatattccttaatatcgtccaacgctttctgttgctctgccccccaagtaaactgttgatcggctttcaatctcaacaatggtgtaaaaggctctaatcttccagacaaatttctaatctcaacaatggtgtcacgcccggaatttctatccaaaattccaaacgcttacatgtgtgtgaaccctcgtccaggaatcagccgaggcacacaataacaaattgataatagagtacaattattactctaattaataagcgaataaaatgtcattacagaggtagatagttcctctcattcaataaaaatctaagcagcggaaaaaaataagataaacggcgcagacgactcactccacaggcagcttgaccagggctacacctaatcctccacaccatcagcatcactgtagaactcctcctctgatgaatgattgcaaggtgagtatatgacat

SEQ ID NO: 15965 - DNA, 1790 bp, Oryza sativa
ctaccgacggcgacaggcgaaagcaagggtggcggcgggtagcggcgggcttgggggtccttttaaaggggcaaggaggtggcggcgaaggcccacggcgaccgccgacgcgaaggaaagtttagggttcgaaggagagggatcgatccgaatcgaactcgaatccacggatttccaaacgaaattagccgacgattccaaaagagaaaaggtagaggagatctcgggaaacatttcccctcaattgatttcaccggagaaggaaaggcgcggccgaatttggaaagagacggcggcacggctcggctagggtcgggcggcggctggccggaggtagacgacagccttgacaggtgggccccccctgtcagcggtcgcacgcgcgcgcgccagcggacggctcggctgcggactagcccggcttgggccggggagagagagagaaggttttggggcgactttcggcccaaaggcaaaagagacttttaaaaacctttttcaatttaaattattcattaaatgcaattccatttattaaaaatacttccttagctcaaataaatcctagaaaaatctaggaattatagagttaagcaaagtatttaatgaaattttatctggcccgattttatattggaatttattaattaaaactagatcttcttttcaaggcttttaaaatcatttctaataattccaattaaacaaaaatttatatatttaggatttttagggtgtgacagtccaacgctttctgttgctctgccccccaagtaaactgttgatcggctttcaatctcaacaatggtgtaaaaggctctaatcttccagacaaattagaaataaaccttctaacaaaatttatcttgccgataatctcttgcaattctgtcttgctctccggaggctgaatcttcttgattgcattaacactcctttgagttacctcgattcccctctcgtgaacaagaaatcccaaaaactggccagccgatacaccgaaagcacactttgtcgggttcatctttaggccatatttcctggttctctcaaaaatctttctcaaatcggctatgtggtcctctatctctttagatttaacaaccacatcaccaatgtagacttcaaccaaccagtcgattagatcatgatatatataattcatgtctctttgatatgtagccccagcactctttaagccgaaagtcatcacaacccattcaaacaagccgattgcaccaggacacctaaaagctatcttatggatatcttcttcagccataaagatctgattgtatcctgcatttccatccataaaactaaaaaaccttgtgccctgacgcagcatcaaccagctgatcggctaccggcattgggtactcgtccttcggggtagctttattcaagtttcggaaatcaatgcacaccctgaccttgccgtttttcttgataacaggaactatactagaaacccattcatcatatcggcaaggacgaataaaactagcatcatacaatcgtttgatctcagccttgacaggttcaagcgtatcggctttacatcttctcggtggttgttggtgtggcctaacccctggtttgatgggtagacgatgttcaacaatcgatcagctgagtccaggcatttcataatactcccaagcgaagcaatctctgaattctttcaacagctctatcaacttggttctaaattcgtactaataaatgtcggcctcagtcgatcacctggacctatatcaatttcttccaaatcatcacccgacatgaaa

SEQ ID NO: 15966 - DNA, 1103 bp, Oryza sativa
taattcgtactttttccttaaaaaaatcatctccacatagatcaatgacatctttatactgatactaaaaccgtctgtaagactgtgattattgattaatatcatttcacatatataaatgttcgataaacttttgaatattcgtggcacgtttttcaaactgttaaacagtgtatttcgtgtgaaaattttctatactaaagttgttataaaatatcagaataatctattttttaagttcgtaataattaaaacttaattagttacacataattacaccttgtttcacgtggaacacttactagattttaccattaatcgtctttacaggagcccacaccatcgggcgggcgcagtgcgccaacttccgggacaggatctacaacgataccgacatcgacgcgtcgttcgcggcgtcgctgcgtgctggctgcccccagtccggcgacggcagcggcctcgcgccgctggacgagtcgtcgccggacgccttcgacaacggctacttcggcggcctcctctcccagcgcggcctgctccactccgaccaggcgctgttcgccggcggcgggggctccacggacggcctggtcaggagctacgcgtccagcaacgaccagttcgccagcgacttctcgacggcgatggtgaagatgggcaacattagcccgctgacggggtcggccggcgagatcagggtcaactgccgggcggtgaattaattcatgacgcatgggcaatcatctagcttgcagagtttatatatatggaaatgaaatggcatccaactatatatactatatttatttattattttattaattattagtttccgacaatgtgtgtgtgcatatatagcagaaatatgatttggttccattattgttatctggaaggtgaaaattaaagaggaaatacatatcatgtgcagaaattttcatatattgccgcaaattaagatggagtcttcatagatagaaaaaaagtacgaattacccctccccttcctaaactatcacggtagaccgaattaccccctaaaccaaaaaatcagacatcgctcaccttgaattttcaattctggacgaataaccccccttgac

SEQ ID NO: 15967 - DNA, 714 bp, Oryza sativa
tttggcccaatctttcagtgagttgatgataactacaatttgggagaaacgttgacgacccgactacaaccgtacaagatgttgtgttgtgcctttgcgatcgatacacctctccgtgggttgttgatcttgtcggtgcagatcaaccttattcctgcaagcaaattgaagaaacaagcaagaacaagataaaagcaatctgaattgcaaataggaatgaatacacatgataagttggggttttcaatacaagcagatggacggtctaggtgccacgcgcgctacaaggaagtagcaatggttaaactttcttctaaacaaaacccaagaaaccctgaaggggtacctaccaatttataggggtgggaggatgaccaaggggtgcgaagggttgttctccacctagttgggccgcactccacatgggccccacttgggccggggtcccaaacaaagttacaagcccataggcccaagataggtgacgcaacaccttgtgattgcagcaaaacgacatggaatttggcaatgaggctggatccgttggaaagagggctttgagagctttctatcaagtactcacgggctaaaaacggaggttgtatgtagatttggcggccatttgaagtcagcagtgtagcaggtggccaaatcggattccagcacttagaggacttgatcttgatattttcttgttcatccatgatatgagca

SEQ ID NO: 15968 - DNA, 1498 bp, Oryza sativa
tgcctcgccgccgcctcctccgcccccgccgctggcctctccgccgccgcctcctccgctcccgtcactcgcctcgccgccgtgcctcctccgccgccgccgccgccaccccgcctcgcctcgccgcgtcgtggcctcctccgccgcgccgatgcctcctccgccgcggctcactgcctccattgtcgccgtctaaggaggagagagagagtgagagatagaagagagagactgacaggtggggcccacctattttttaataaataaattgctgactgtattgccacgtagaccaaaccaccgcggattgggttgaggggggtaattcgtccagtttgcatagttgggggtgaagaatgtccggtttcgtggttcaggggtgtaattcggacgaccgcgatacttcggggggaggggaggggggtaattcgtactttttccatcctaatattatctcgtactccctccctccatcccctaatataagatattttgatattttgcttgcactgtttgaccattcattttattaaaaaaattttagaattatttttttacttactttattatccaaagtattttaagcacaacttttcgttttttatttttgcacaaaatttttgaataagacgagtggtcaaacaaaacaattcaagcaaaatatcaaaatctgttatattatgggacggagggagttgatagtttattcaaaaaatttttgaataagatgatccattgccatgtcttgaatggaaagggagttgtctaggtatggaaagtgagatgattggatgaagagaaatttttgaataagatgatccattgccatgtcttgacactatatgtagaatctataatggatggtatcttcaaattaaattcctatccaagtatctctcttctctcttcttttatccacttatcctataattttcattcttaccttttatccacttatcctataattttcattcttagttattgtatagagagggtttcttacatgagaaatgatttcttcatctttttacctctcttctcattaactctattgccacattatattttgcttatgtggtaatgtatttaatactatggacactggatgacaaggagggttggaatggcctaatgagatactcgtaatactatttacataatacacacctactaaatattatacgctagctactaagggactgtttggttggttgccacactttaccacgctacactctagttataccacactctcttaggtatgtgtttggtaccctatagcaattatgtcatgccacacttttatagcttgggacccacatgccatactctcaaattcaaatttaaagctaattttgccacacttatgatcaactatttctaagccacactattgccaccatccctcaactaacctaaacttagttatcgcaaggctatccattaaccaaacatcccctaattacagagaccggccggcaaccttgaagccgccacc

SEQ ID NO: 15969 - DNA, 12224 bp, Oryza sativa
cctgttactcgaacattggcacgactcgtccgcctcggtcgcacctgatgccgaaccgggttcgcttcctctgaagttgttggactgggtacagtggaagtagctgcaagtgtaacatccccccctccttgcgaaccggcttgcccccaagccggggcagcaggaaactgattgcgaagcgccgcagcatcctcccatgtagcttcagcagaagtttggccagaccagcacactttcacttgttcaattgtcgctgctccccgtctgaccgcgcggcgtaggtactggactgtcttgctccagagtaggtagcggtcggataggttccccagcagaaggttgagcggccttgcgtagttgcgatatatgcaccaccggatgaatggtacagtcctccggaagcttcaagcgatatgccacatcaccgattttgtccaacacctgaaaggggccaaaatagcgaaaagctaacttgtgattagtgcggacagccagcgaagtctgggcatagggctgcgccttcaagaacacccaatcaccaatgcagaacactctatcagagcgatgtttatcaacttgatctttcattcgttgctgggcatggaggagatgctgacacaacaaactcgtcaccatagcacgttccttgcgccattcttccaaatcagcaacagcgcaggtcactccgtccaacacaccaaaatgacgaggaggatgaccatataataccttaaatggggaagaacccaaggcggaatggtaggcggtattgtaccaaaattcaggaagcgccaaccagcgagaccaacggctgggacaagcatgtacgaagcagcgcaaaaaggtctccaaacattgatttacccgctccgtttgcccatcagtttgagggtggtaggtagaactcatctgaagttgtgtcggccagacaaaagagctcaattccacagtgcactcgtgaaaatacgatcacggtcagaaatgatagccagaggaagtccatgaagcttgtacacattgttcagatagagcaaggccacatcaaaggcagtgaatggatgtgccaaacccagaaaatgggcatatcgactgaatttatccacgacaatcaaattacagtcgaatcccgaagatttgagcagtccttcgatgaaatccaaagacactgtctcccaagcctgatctggcgtgggcaaaggttgaagaagccctgggtaacgcaccctttcagatttagcttgtttacaaacggcgcaatcggtcacaaaagtctgcactgcccgcttgagacctatccaggcaaacagccgtttcacttgactgtatgtgacctgaatgcccgagtgccccccaattgcactagcatgcaaggctgtcagaatgcgatgctataaagctggattagagcccacccagatacgccctttgtagcgaagtactccttgctgcaaagtgtaatggggataccgatctggagatagcagcacttgtgtcagcaattgctcggtagcagggtcagtcttgtatccttcctgcacctcatttaaccaaaggggtaccacaactgatagagcacaaatttgcataggatcagtctgcggacagcgagataactcatcggctgccttattgtccaagcccttcttgtattgtagcttatactgaagtcccaaaagtttggtcatggctttctgttgccatggagtggccagacgctgatcgcctagatgtattagactgcgctgatcagttctgataatgaactctccaaattgcaaataagaacgccaatgatcgacagccaacaaaatagccaagcattctttttcatatgtggacaaacctcaattcttgggacccaaagccttactcaaatatgctaagggataacctgcttgcataagaacagctcccactccacgatctgaagcatcagtctcaatttcaaaagttttggagaaatcgggcaatgccagaacaggagccgatgtcaatgcctttttcaaagtatcaaaggccagctggtgcttggctgtccagaggaacacagcatgtttcttaagcaagtcggtgagagggcgactgagaacaacaaagtggcgcacaaacttccggtagtaccctgccagtccaagaaaacctcgaacctccttcacattgcttggaatagcccactgctgaacagcctgaacattcttaggatctgtagagacgcccgccccactgacaacatgtcccaaataagtaagacttggctgggcaaacgtgcatttggagcatttgaccttcaattgatgtttctgtagaagctgaaaaaacttgtttaagcaatgacacatggtcctccagattactgctataaacaagaatatcatcaatgaagataagaactcctttgcatagcaaggggggtaaaatagtgttcatcaatccttggaaggtggctggggctccggtcaagtcataagacatcacacggaattcatagtggccattgtgagttttaaatgttgtcttatgctcgtcttcgggtctcatacggatttgatgatagcctgcccgcaaatccaagctagagaacagacttgagccagccaattcatcaagaagttcatcaataatgggcaaaggatagcgattcttgactgtaatagtgttaagatgtcggtaatcgatgcagaatcaccaagtaaggtccttcttcagcaccaataagacaggagacgaaaaggggctagaactgggctgaatgacaccctgttttcagcatctcggccacttgtttctcgatctcgtctttttgggcaggattgtatcggtaagggcgcaaattcaccggctgtgctcctggtgtcaaaggaatagcatgatcaaattcacgagctggaggcaaaccagaaggctcatcaaacacagaagcaaaatcctgcaatacttgagcaatgactgatggaacaaccggtcatagagtctcctgttcaataaggcagagttccactgtttgtaataccgagtgatggtgcaataaccccttcacctgagaggccgacattccagcacaatgagagacgtctgagcgaacaccccgaagacacaccctctgctgattatactgaaactgcaaggttttttccctccaatcgacttgcatagggccgtgagattccagccaatccattcccaagatggcgtcataagttccaagaggcagaatcttcaagttggaatgaaaagagattccctgaacccaccaaatgcagtcgaccaattcctgagtgcgttgcaaaagaccaccatcggccactcgtaccttgacagcaacaaacccttgatggcgtcctgacagttgggccgccatatcctcagagatgaaactatgagtactaccagaatccacgagcatgagtacctcatgttgctgcacccatccttgcaaccgcaatgttcccgttgtttccaaacccagcacagcttcccttgagatctgacaaagctcactgtcagcagattgcacaggttcagatgactcagcttcaggttcaatatccgagtccatgatgtgatcatccagcatctcccaaagctcttcaagcacatgcaattgcactgtcggcccacacttatgatcccgactccacttttctccacacgtatggcacagccccttcgctcggcggtaagcacgaagagctgccaatttttcatccactgccggcgtttgcagttcctccatctgccggcgatcatcaacacggggacccggccccgctcctggtcgcggatgaacaggaacactaggtttcgcaccaggacgcccattgctagagaaatccacctggcgtgcctccctccagttggtctccaacacctcctgtaaacaggccaaatcgacagcagtgtccaagtcaacaggacgatggagtaccacggcagatcgaatgtctgctcgcagcccatccaaaaattgagtaacaaaaaactctgaattccatgaagaatgatgagcatggagattatgcatgagttcactgaatttctctgcataggtgctaaccgaccctacttgacgcaaacgattaaactgacggaccaagctctgaaactcttcacgaccaaattttagacaaacagcttccgagaactcctcccaattctctaattcctcatgaaccttagaagactgtaaccaagtaattgcacttcctatgaactgcaaagctgtgactcctacacagaactcggcactaatctgtcagggttgcgggttgggtataccctctacccttcgacatacatcacagatggaaggagtcttactcggacagaactaggtcgtcattgtatcgtgccgggtccgatgtctacgagtcctacttggagaccagccgacttgcgatataaaagggatcccccgggaggacctaaggcatcgaatcttaccgccaacacatccaccacagcctacgaagtcggaccctacaggagccaagtcgtcgggtgatctagtcgaatcaactcgactacgatctcgtcggtatcgtcgagttccgctattccctttgtaatatgtggattagggctattacctatcaaggggcctaaacaagcataatatttgttttctgcctgcttgatgtcgtattacgtagatcgtcgtaccagcgtaccccaataccctctatatccagtctacgggtatcccccgtcgacagtggcgcgccaggtagggggacttggtgctcaagattctactactatgacatccagcttcgtcgacaacagcgtcaacaccaacctcaaccaaggagttcctacttcaacaatgctggtgtggactcaagtcggcaaaatcgtcttcccggtttacaccacggtgccgatcttagctggtccatcaatggccggaaacgagaacgcagtggctactacccagggcgattccatgttgaaggatcctcccgccgaagcggagatcggaacatcgacgacatccgagcctgagaaggatcctagtgcggccaagccttgtcgttccgacaagaatcacgagccgacgaggatgacttccgaggtgacaaggtcctgatgtcctatccacaaaaccagaaaacacaccttgcaagcctgctgggtttttctcaacgtccacgctgaaattagtgcctacaaagagcgtggaattcagcgtacttctccaactcatgatgtctattgtcctattcacaagacaaagaatcacgacctctcaagctgcaaggtcttcctccgcgccatgaagacgccacctcctaaggtccagcagtcacgcgtcgccttcagggatgaggacaaggaacaaggagcgacattgatttcagatcgatttgttggggtaatcgacatcgatccccacgaaccatcagtcttgcacctgctcgaagactatgactcatcgtcaacgagtacgccgcgcgaggtattggctatcgacgagaccggcacgtcagtgcgcgctaatgcggaagcggagaatcaagtgaccacaccggctcagcacatcagggccgtcaacgcaatactgagggaaaccccctacgatcccgttctgaacgacgatctcgcacgatggacagaacggttacgggaatcagtgaccaacctcagcaacgcgttcgaagaggccgctgctgcagcgcacccggaacagccaccaactggtgatgctaatggtgaaaaccctgaacagtgggaatcgcctcatcgagccaccccttcacctcgcggcaccggcgatctccgcgatcacctgaatgaccgccaagaggcgcgacgcacacgagacaacgagaatcgttcccgacatcgcgtctcttcacggggtcacgataacgaagaacgaggaggccgttcgagtgaagaccgagaccgtgataaccgccacaaccgccacgatcacgacgatcgcgaacgacgggtgctgggcgatactggtcgaggacgtcaccctaatgacgacaatgatggagatcggcgccgagacaacaacgggagacgacgacaggattctcgagaacccggccgacgtcctcgtaatcgtacgccggaaccaagcgacacatcgtcatcgtcgtcatcctcctcatcctcatcatcagataggcatccacgaaggacgtacgatcgccgacaacccactgcccccagcgctgggtgtagagctttcggtcgttcacttcgggatgtccgatggcctgaaagattccgaccagcagcaatagagaaatacgatgggagtaccgacccagaaaaattccttcaggtttactccacggtactctacgctgccggagcagacgacaacgcattggcaaattacttgccaaccgcattgaaaggctctgcgcgttcatagctgatgcatcttccccctactcgatttcttcgtgggcggacctgtggcaacagttcgtcgccaacttccaagaaacttacaagcgccacgcaatcaaagacgacctacatgcgttaacacagaacccggttgaatccttgagggattatgttcggcgctttaatgagtgcaggaatacaatccccgagatcaccgacgcttctgtaatccgcgccttcaagtccggtgtcagagatcgctatactacccaggagctggcaacgaggcgtatcacgactactcagagattattcgaaattgtcgatccatgcgctcacgcggacgatgcactgagacgcaagaacaacaaaccgaagaccggaggggagaagaaaccagtcaaggacgcacctgagtcaagcaagaagaaaaatggcaagagtgggaaaaggaaagctcaagcggatgttctcgcaacagaatacgcggaccctcccaagcgcccagacccacaaggcagcgacacgaagaaaatatggtgccctatacacaagtcagacagacactctctagaagattgcctcgtcttcaaaaaatcactcgcaaaacacatggcattggaaaaaggcaagcgagtacgtgtggtcgagaaggacgctgaggcggttacttaggaatcggactcagcatacccagactccgatctccatgtctcgcacatcttcgttggttccacggcatactactcaaaacgagaatacaagaaggtggaacgtgaagtctgttcgacgtggcagggggctgcgcccaagatgaagtggtctgagcagaagatagaattctcagaagaggaccaccccaagactgttgtcatcctagagcaatatccaatcatggtcgaactgtcacgaccggaaataacccaacgggcattccttacgtgcgtgcattattccttgtcccaggaggcaaggtacaccaaaagttgatacaattcagagtttaacaagcggaagcgtaaatagttaatttattacatgggcggcgaaggcccagcacacacaaagacaaacgggaaacagcggaagactagggcgacaaccacaggcgcttgacggcaggcacgagctagacaccaaagccttcatcttccaggggctcctcttctgggtttgggaaaaattgagcaagactgagtacaaccaccgtactcaacaagacacacccacaagtgcaggataaatgcaagggagtacaagggggttataatataaagggttagggtttgcagtaaacagcattacaagacacttagttgctcaaagctattttgtaaacacaattccagagctatacaatattattaatcaaggccgtgaacccacacgaacctgccttaacccaaggcctacgatgattcagaccgaactggcaacccgaccctgggtcccagctcgtcccaagccaacccaggccaaccattccacattttagttgttaagcaggttttaataattaaaacactaacttgggtacattgctcggcttgcccataaccgagggcgcggctattcgaatagattatactctgatcagaggtgtacatctttacccacaagacacatcttcctcacgtgtaaccacgtgccacataccaccacggtatacggacggaagacgtgacatagtttccaacccatcctagccatagacaagagtaccgacccaaccccacctacggccggaacccccgggacaggtaggcaggactgagcccctagcagcaggacaccggccctgtgccatgacatctcgactaccgggccgcagctcgtgtagccttcatttgtcctagagatgtccatcgacccccgacttcgtgcatctccatccgtgtacttttgtttataaccagactgagccacaaactaagccttacccactagacatgtggaagtacggtagtgctttgcaacagaggcccgaagaccggtccttatatggccgaggtgctactaacaaaaccatgcatcccgagcccagcctaaaaccattttgaggattttgaatagagggggaggtgtgaatccaattccacaataatcaaaccattccatagtgtccaggtgatatgaatatcccaaagtctagagttgtaaaaccacctaatgttgcctaatcaaccagcgaagcatctacctaaaatcatactagtggtaccatgagtagagtgtccactagttgaggttttgtttattctatggtgaacaaggaaataataacaataacaataataaggtcataacaaaggtaaatagacatggctagataaaatagtgataacgcgggaatttaaataaagcgataatgcaataatttaaatcaacataattttataaactgggattcaatatgttcaaggatgatgtgacttgccttgctcgctttcccaaacgtcggcttcaacttccacgaagagcggatcttccgaagctgcagcgtctacacgaccaacggaaaagaaaaggcttttactctaataaactccatataacaagcaggaacaaagcacaaaaatgggttcttgacttcttaaggaaaaattagagacttgaacggtccaattccgacttcaaatggccaagttatggtcatttgaagtttatatgctctttaaacgaatatttgcgaatttcttcatttaaattttaattttaaaagggtttattgcgtcagccgacgggagggggctcgcggaccgggtccacaggagtggggcccacgcggcagcctcacagtccacggtggaccgggtgcacccgggctcacaccagccggcgccgtgggtcccacgcgtcagccgcacccaagggcgcgggcggctgactgccgggccccacgcggcagcctcacggtccacggtagaccgggtgcacccgggctcacaccggccggcgccgtgggtcccacgcgtcagccgcacccaagggcgcgggcggctgactgccgggccccacgcggcagccactcggcgcgcccgagggcggccaagccggcgtagccggcgggaggcggcgcccgcgcccctatggtcgccggcggcggccataggcacggcggagcggcggccgagagaggggaagggaagggggaaaagaagcggcggtccacggctcaccctaggtcgacggcgacgacgaaaaaggtggccggagcggaggaaggcggcggtgcggctcgggtcgacggggtcgacggcgttccggcggtcggcgagcgaaacggaggggtggacgaggtcggcgaggatgcggcgaagccgaaggaggcggcgccgaggtgggaggtggtccggggcgacgacggcggccgaccggagctcggcggcgacggcggagagagagagcgacggcgcgagctcgattccggcgaggaggaagggcggcgagaggcggaaacggacggaggaggtgcggggagggtttaaatagagccgggtcgagagagggtggccggggaagggaggaaaccggcgcgagaggtccggctgccatcaatggcgccggcgagatttgcgggggcaaatccgtccgtttgaacgcgagagagagagggaaaaaatggggggaaagggagagggaatcacggggaataattcccccctattgatagcacgcggggacgatgggatgcggtggattcgcaggcggcgccgcgcctacggcgcaggcgaggcgccggcaccggcggggcgaacggcacgacgggtcggccccacccgtcagcgaggatggcgggtgggcccgcccgtcagcggcgcgcgcgcggggagaggccggatgggccgcggggagaggagagggagggggaggaagatgggccgagccggcccaagagggagagggagggaaaggggactttttagagtttttctttttataaactcattttaattttgtttatttcttaataattattatttgtgctctgaagattccactgaaatttatttacgcattttaggcttttaggaaatatacaaaaatcctccaagccttatttgacttttaactttgcacattttaattgttggaggctttcacacggattttaattattctaggcataatttagaggatgtattttagagtcgttttgggacgcgacacgaacccactattcggaatatcaaggtcgcacgagttctgatcgacagcggtagctcaatcaaccttctcttcgccagcaccttggacggtatggggatcccacaaagcgagttgacacccaccgatcaacccttcgatggaatcactcctcagtcatcgttcaaaccattgggcaaaattacgttgcctgtgactttcggccaagcaaataacttccgaacggagaagatcacctttgatgtcgctgaattcgatacagcatacaatgccatcattgggtgaactgcactcgcgaagttcatgaccgcatctcactacgcgtatcaagtgctcaagatgccgggaccgaagggaacaatcactattcaagggaatgctaagctggcagtgcaatgcgacaaacggagccttgacatggtcgagcacacgcccagcccacccgacacagctgagccacccaagaaagtgagcagaacaaacaaaacgccgaaaccggatggcgcaattaagatcgtccactctccagtgccaaccccgacaagaccgtcaagatcggggcatcactaggcgagaaataggaactcgcgctcatcaccttcctccgcgacaatgctgacgtgttcgcttggcagccatccaacatgccgggggtacccagggaggtgattgagcacaaactcttgatgcgacccgatgccaagccagtaaagcaaaaactgcggagatttgcaccagatcgaaaacaagccatacaagaagaactggtttcatcagagaggtactccatccagagtggctagccaacccagtcatggtgtggaaggccaacgggaaatggagaatgtgtgtcgatttcaccgatctcaacaaggcgtcccaaggatcacttccctcttcctcaaatagaccaactggtggactcaacagccggttgtgagttgttgagctttctcgatgcttactccggctaccaccaaatcagcatggcgaaagaggacgaggagaagacagcattcatcacgccgttcggggtattctgctacgttaagatgccgttcggacaaataaccgcaggaaacactttccagcgcacggtccaaggtgcacttagcgaccaactcgaaaacaatgtcgaggcctatgtcgatgacattgttgtcaagaccaagacaagcgactcattcattgacgatctgcgggaaacgttcgacaacctccgacgatatcgcctcatgctcaatccagagaagtacacgttcggagtaccatcgggcaagctgctcggtttcctcgtctctggcagaggaatagaagcaaatcccgagaagatcaaggcaatcgagaacatgaagtcacctacaagactcaaggaagtacagaagttaaccggatgcatggcgacacttagcaggttcattgctaggatgggagatagaggacaacctttcttcgttctgctaaagaagcaagacaaatttgtatggacacaggaagccgaagaggcattcattgtactcaagcgctacctatcaaatccccctgtacttgttaccccccaacctaatgaagaattatttctctatattgccgccacgccatatttcgttagcactgtcattgttgtcgagagagagaaggtgcaacgaccagtctactacgtcagtgaagctctccacgacgcaaag

SEQ ID NO: 15970 - DNA, 6293 bp, Oryza sativa
  unsure (1)..(6293): unsure at all n locations
agttgtatcctccttccctctcggtgaagtagtgagaaacaaagatgttatcggccgcattgtgaaatgggtagtcgagctaagccaatttgannnnnnnnnnnnnnnnnnnnnnnnnnncaagaccaggtacttgccgacatcgtagccgattggactatacctgataacaggtcagacaaccaaatcgacaccgaaacgtggataatggcgttcgacggcgcactcaacagccaaggagcggggccaggattcatcttgacatcaccttcgggagatcaattcaagcatgcaattcacctcaacttcaaggcaaccaataacacagccgagtacgaaggactactcgccgggataagagctacagctgcactcagagttaggcgactgattgtgaaaggggattccgaactagtcgcgaaccaggtgcataaagattacaagtaatctagccccgagttatccaagtatctcgcaaaagtcaggaagccggaaaaaaggttcgatgggatcgaggtccgacatgtataccgcaaagacaacatcgaaccggatgatctagcacggcgtgcgtccagacgagagccacttgaacctggcacctttctggacgtcctgaccaggccatcagtgaaagaggcaagcggcgaagatagcccgatcgcccccaacatcagctcgggggctatagaggtagagcgcgccgttgccgatatcgagaccacagacgactggcgcaccccactcattaaattcataggcagcgaagagttgcccgaggacgacgcagaagccgagaaaatatcccgtaaagcaaaagtctattgtatgatcggcaacgatctatacaagaaggcaccaaacggggtactcctaaaatgcgtctcgtccgacgacggcagacacctcctcctcgacatacatgaagggatctatgggtcacatgccgccggtcggagattagtcggaaaagcttttcgacaagagttcttctggccaaccgcccttaaagatgcatgcgacatggttcagcggtgtgaagcctgtcaattccacagtaaacacataaggctaccagcgcaagcactccagactatccctctcacttggccgttctcgtgctgggggctagatatactcgggccattcccacgaggacagggcggctacaggttcctattcatggcaatcgacaaattcactaagtggattgaagtgacacccacgggggaaatcaaggctgacaacgccatcaaattcatcaaagggatattctacagattcggattgccccaccgtatcataacggacaacggctcccagttcatcagtgccaatttccaggattactacatcaggctgggagtcaagatctgcttcgcctcggtttctcacccttagagcaatggacaagtcaagagggcaaacgacatagtacaataaggaatcaagaccagcgtctacgacaggctcatatcacatgacaagaagtgggtcgaagaacttccatcagtactatgggccgtgcgtaccacaccgacaacgtccaacaaggagacaccattcttcctcgtgtacggctcagaggccatgctccccaccgagctacgacatcaaagtacacgagtacaggagtattccgatgaggatcaggagaagcagcgaaacaacgatgtgaatctactcgaggaacatcgcgaacgagttgccgttcgagcagccagctaccaacaggcccttcaccgttaccacgagaagcgcacccgagcacgcacgctttcgatcggcgactacgtcctccgacgggttcaaagccaagcagggcgaaacaagctctcacccaaatgggaaggaccgtacacgatcacacaagttctgcggccatgcgcattcaaaattgcagacggcgacggtcgcgagttggcaaattcctggaacattgatcaattacttaaattctatgtataagtcaatagtatccatacttgtaagacatcttacagcttcaataaagcgtattttcaggtccagaccacaatcaaagtgttccttcccgatgatcccttacccagatgacatctagcgttgaaacctatcctcatgtccctttacgccgtcttgacaaggcctccgaggaacctaagggaacttcggctggggacgcccagagccgataaggccttgtcggatcctgtagagacgaaagaccatgtaagatctggtcgtgtaagagttctcgccgtgcgtattaaccaagccgtgtaattggaaataaactttccaacttcacggttgggggctaggatcagtgcttgttcaatcgaggcaggtcaaaggtccaagagccttatcttccgagaagaattctctgataacaaggctgggggctaggaagagtgtataactcaaacgactgattgaagtcgcgaagtgagaagacactcatacacgctacatccagagtaagaaagcttagttagatagatttcttttctatttcacaagtactttttacaattccataaaaatccaaaattatattacacattttccctaatatatttgtcacaggacacagagactaccaggaaggccaacgccagtccatggactggaagaccttctccgccagcggcgccatcgacttcgccaggccatctatctccgtaggagttctccgagaacgacaaaacccttcgcggaggaactcgaggtgcagcagcggacgatgatcttgaatgcaagccaacacatgccccccggcatatcggcttgatcgacgacactcctgcttcaaggcctcgtcgatacgttgaccgatgccttcgagctgggcgcaggccccattcagccacgagatgtatccggccgtcgattcctcgggatccccacggggtactcggagctctctacagactcttgacatggacgtgcatcaactcttcagatacgagttgaaccacacctcacgacctcggagtgtctctacggcctggtccttcttcacttccaacatagtcctctcgagttccgcgacctcaaacttcgtcctccaatactgaatgcgacgatcctggttagcaagcgcactctcgatgtctgctcagcatggaaacgattaagtcaagctgctcttctctcccgagaatatagcaaatcaagtcaatccagacggaagggtaaaggaaatgataacaaagacaaccaacctaagggagtcgttgccatgctcgtttccacaggcgaactttgatctacatggccccccggcacatgtggctcgaacgcaagtgccggaacgatcactggcaactcaggctgtccgcgctgctggacatcctcgacaccaacatatctacaaacaacaacaaagtactcaagatcacaatgctaaagaaagctaaggtgatgaccacacacacaaaggcagttggaaccaatgagagttttacaaagcatgactaaagagtacaagagagctaagatcctactcttcaaaaagtgggaggacggactcccccagatcaccaacctcctccatcacatccttgcgcgcatcgctagctgccccctgatccaagatcttccgtagatcgagttcagggtgcgccagcctcacacacgcaaggacatggcatgccccggtatagatcccgttggacgtctcctctccgatcctggccgcgtgcttggagggaatcgcctccatcgctgtcgccagttccgcaagcgaagacgtcagcgagaactcgtcgggattcgccgagatggtggccttgacgccgcactccccggcgagctggtgcagaccggtgtaggtgacccgccgtgagccacggatctccgacaagtggttctcaaactccgacatacaatactcgagcccttgccgttgtcgctcattgccagccaccagctcccgcatcttctggaggtcctcgcgaacctccaccaaatcgcgcgccagccggtcggtgcgctcattcgccgacgatgccgccgccgccctcgccttcacgatctcgcggctaatgccgcaagcaccagcctcgaggaggcgccccatctcgacctggagctcctcccaggtgaggatggcagccgacggaccccgaccagccgcgagatcgctggctgggccgctaggtgtcgcctcgcggctcctgggcatgaccacgacgtccgtcgaggccacaacaggagacacgctggaggtccctccagacccgtcttgcaccgccttcgcccgcgccgccctacgaaaagctgcaactgagacaggctgcaacagtttgacaaagtgacgaaacctcaaagtcatccacttacttctcgccaagtgtcacaagccgctgccgtcgcggaggcgggggagacgcgtccgaggcctggagtataacggatatgatgtgaggtggaagttttccggactacatgatgaaagaacaggagaacttaccgagggggtgggtgtcttccgatgatgtccgaccacagaggagaatttcctcccctttttcggaacgttgccgccactcgttttggcagcagcggcaacaacgtcagacgcctccttggcgactttctccttcagcgacgccgccacctggtggtccacgagcggcccgatgatatcagtcagagggagagcctacgcttcatgaagttataatgcgatcccggaagaaaaatgcagaagggccgctgggtacacttacattgatggcagcttcacgttcggctacccctttctcacaaagggggacggggacgttgctcgccgttgtcgggccactgattatcaattggccgacgcggcgctccacggtcgcgctgtccaagcctataaatcgagatcagaatccaataagtcgggaggaacacgcacataatggagtcaatttaactacaaagaaaaataccccgaggagaaacccaggtcacgtcctccggcccagaataatcaaaggctggatgggctcgagcctagagtggctggatccgcctaccaatgaagtcggcagcgacttcataccccgacaatccccttcttcgtcatcgagaggctctacgaagccgtcgccggcgtgcagggcaccaggcagtccctcctcaaccttctcgccgtcatgtatatcggcgacgaggagccaatcaagtggccttccggcgactgggacgtccaccaccttctccatctgtactacgagtgcttcgttcccaactgatcaacgccgccgccgcggggccgtcggagcgcgcgttccggccgacgggcggcgaccaccacccgggcaccccgggcgataccgtgcgccaccgagatgagacacgtggggctaaagttcgtcgcaaggcggagtcggccagccccagccgacgccggggagacgacgacgtacgacgtggtgttcgacgaccgcgggggcgtgatggagatccccgccatcctgatcgacgacgcgagacggccgctgctggcgaacctgatcgcgttcgagcagagccagggcggcgaggtggccaggctcctgagcagctacgtggcgctgatgagccagctcatcatgacggcgcgcgatgtcgagctgctccggcggcgcggcgtggtggagaacctgttggacaacgacgaggaggcggcgcggttcttcaaccgcctgggcgacatcgacccggtggactacgacacgcaggcgttcgcggggctgtacgaggacgtgacgcgctactgcgggacgtggcgcaacaggcacatggcggggctccgccgcaactattttgccagcacgtgatcggccatctccgtcgtcgtcgccgccttcgtcgtcgtgctcgctgctacgcagacctacttcaccgtgtttccatccaacaagtgatgcagaatcccggccgggacctgcatttccgttcgatacttcgatcctgttaattttcactcaacattacggaatccttccgtgtatcgagctggtgtgtgtgggagaatctggataactctctgtccatattcgttgtactaggaggggttgtctttttctttgggatagagggagtataaaggtatatcagactatcaatgtaggtttttaattcggcaaattttgctacatgacactgcttatgtgtgtttttagccctatgacactgcccaaactcactttcgtggaaaaacactccataaacgtggtaatttgtcagtggacaccgcgccaattaaaataataattttcagttgaagagaagagagaatttgcgtgaaatgtcaaaaatacccttgacccacatgt

SEQ ID NO: 15971 - DNA, 4634 bp, Oryza sativa
cgtcggtatcgtggtggccttcttcctggcctccaccttgccatcatcgaacaacttgccctcgacgatggcctcctccaccttggcacggagctcagccaacgccttcctctcgccgtccttgagattatccaggaagttgctctcctccctgaacgacacgttcttggacacaacggtagccagcgtcaccgcctcatccaccgacgccttcgccctcacctcctttgtctctggcgccaccacctccgctgcggcggctgtcgcaccctcagacaacgacagtggtgcgacggcggcagagcccgggcggtggcgaaggtcgggctgtagcggtgcgccggcggcggatcttgcagatgggctggacgatgacgaagacgacgggagcgtggcgttatcctctagagagaagatagagagagaagataagagagataagaaagctgacatgtgggcccaaacgcatttttgacatttcacacgatttctctctcctcttcgaccggaaattattattttaatcggcacgatgttcactggcaaattaccacgtttatggatcgttttccctcaaaagtgagtttgggcagtgttctagggctaaaaccacacataagcagtgtcctgtagcaaaatttgccttttaattttagcgtcgtgtgaaagtcgggaagtggttatatgtgccagtttttaagaaaccaacatctataagacagttcctgtcattggaagatatcacataagctacaaatatttcaaagcatgaattgcaaaacagaaaagatttacacgttccaataaaaaataatttgtagtcatcagaaaattcaatgaacagcgttgtctgcgactgggggagcgcaggttgtataatgccatagaaaattgcacattgacacagcttccctctaagaaaaaaaggtaataaatccatggtgccgcttttcattcactgttcattattgtcaacaggaaacatcccaagcaagaagctaggctctccggccttgtttagttccaaactttttctttaaatttttaacttttctattacatcaaaacttttctacacacataaacttctaactttttcgtcacatcgtttcaatttcaaccaaacttttaattttgacatgaactaaacacacccttcgtcatatagttgctgaagttctattcacccagttcattttccgtgtgcaataataattgtggtcatagaagtatgaacaattactaccagaaccgtattcacgaagctaattacaaggggccaacaatgggtgccaaacaggacctgaagcacgaacctaggctcttcctggtggtgccagagttaatttggttctcgatgtttgtcgtaactctgtttgtgttaacaacacgcgttgcttgtgtagctggactacggcttgtaggtacattggcccctggtcttgcaataggagggacaaaaatcatgcctccacggtatttgtgtccttgttttagcctcatgctagatatagcccccgtcgtcgttgtccaaccaatggaatgctgttccttcggacgaaacggctgttcaaggtgataggtataatactagttagttgtgtaaataaaaaggggcttttacaaatttaccactagtttttcaattttgcaaggatgccactcgaatgacagttcttgtgataatcttgcaataatgattcaaagcagtggtaaatttgcaattgccccaaataaaaatgcgcaaccccctgtgggacagcgggagtgtttcgatgataggaaaactgtatgaacaaactggaccaacttgagtgaattgtactagtattacgggaggttcaggtcctgtcgatatgagtcaacccaattgggcatttaggcttgaaaatatcaaccgggacatgaactcataaataatattaatcggatgaatattatttatcagttgatgtggcacatatatataaacgatagacaccaagaatgaaaacagtacctccaaacctctgtgcattgcagcagtgtctattacaagcgaagcctcggggaatgcctgccctgacatttcctgtgctttcacatttccagggtcgtattccaatacctgttttgattgtaagattttagttgctcattgatgtgtgtaggaggctagcgtttactaacagtagcgaactatgcaaaagaacaaccaatgaatcaatgccatttgcaccatgtaaacatttggaaaaggtgtagcactatgaagcaaacacaactcatgctctatttctcttgttaagaaaagcacctcacggtagcgatggtatgcttgttcgaagcgttgaagctgagttgcgcattctgcagctttgaaggcaaaggaaatcaacatttgtttaatttctccatctatgtcctcctcgtcgaaagcacgagagtatgatctgtctggccttcaaacaagttaaacagatttttcagattcagtctgtacatttgtcggatgcatataatacatacttgggacaaaacaggctatacttttttcctagaaaaaaaacactatgacctcctttttgcaccattaaattatctattaacttattgaaggaatagaaaaaagagcatccacatttgctctcacagtctagaaattcccacattaatcgaagaaaaagaaaaatatagagtccatatagaaatacaatttaaaaatagtttaaattcggaattagaaaataaggaatattggaagaggagactagagttcatatatgaatacaatttagaaataatagaaattcgaaattaaagataaggaatattgaaagataagtttagagtccatatagaaaaacatataaaatttagatctaattgaaattcggaattgaaaaataaaaaaataaaagtagaatttagaatccatatagaaatacaacttagaaaaaactaaaattcaaagtttaaaaataacaaatattataaaaataatctagagcccagataaaataaaacttagaagaagctaaaattcgaaattgaaaaaagtaagaaatattagaaaaagagtctaaagtccatatatgaatacaatttggaaataactgaaattcgaattttttttaaaaaaaagaaatattgaaagatgagttagagtccatataaaaaatacaatttataaataagagaaattaggaattaaaaataagaaatattggaaaaggaatctagagattatatagaaatacaatttagaaataactgaaattcgagattttaaaataaggaatatggaaagaaggatttagagtccatattagaataaatttgtaaataacatgacttcggaaaatataagaaatattagaagatgagtttatagtctatataggaatacaatttataattaagtaaagttagaattctaaaataattaataaatatcacgtatataaaatacaatatgaatattacacatcagttagtttggtcaagttagtacaaaattaaaaattatgttatcattttaatatattttaataacaaaatataaaaatatatatgctattatttaaaaagatataacgatactagccacgcaatatacgcgggccaccatgctagtttagtaccttgtaatatctcctataagctctcaaatatttgcttgagccgaatagtttgtcaccctccttttccttctcaactgcagcctcaacgctctctgcttgactcatgagccagggatgcttgtcctaaatttaattcagatccagtatgtcaagtagagtttccaaaatatagtttcaaattgttcacatcatggcaactaattcaagctgcatacacacatttacaacagagacaagctcaatttcataggtgacggaagaaccaggagggacaaccacgtgttgatcctgcaaacactggggtggaatggtgaacaaggagacctctccctcccacattgtcagaacagcttcctctaggccatcactaacctgctctgcaatttcaaaagaatagctgaaatttatgagaaacaaacaagttttattttgtaaagatgtagaaaatacaaccttcgtcaaccacaaactcaaatggctcatctccttggtgacccctctgatcaaaaacagccccatcatgcagtttaccaatcagccgaactgccaatgcaagtgaacattaggcatgttgatatccaagcaggaggtaatgagctatatatgttcagaattccatattaggagctaacttgaaggtacctccaaccactgcttgattctcggtgtgctgtccttccaagtttcctctgcgaagggtttttttaaggattgtcccgttctgtccaatgtgtctcactgttttccatgacatcaattgaaggtacacataaagagttgcatcaggtggcacagcagcttcatcccctatggacggtctaccccgttcaccaaaaccatctagggatcaagagaaagagagcaccaattaacatatattaactagaagattaactacaagaaatacctgcaagagaagggtttcttccaatcgaaacatgagggaggttcacaattctggaaaaacttgcacacaatcaaaagttggatccaaagaaattgtgcatggaa

SEQ ID NO: 15972 - DNA, 3764 bp, Oryza sativa
ttggtctgatgtttggctagagtcttgtcccctaaaatcagattcccactcatctaccaaatctctaaccaacaatacatcctagttagtgaggtagcagaatgggaagagttggaacaaattatgactggtattaatctgatagaggaaacagatactatcctttggcctgtggttcaatctaattgcttctctactaaatatttatacagaatactcatattccatggggagaaaaacttgagagatgcagacatttggggagctcccatacccctgaaggtgaaacacttcatctggcttgcatgtagggatagaatacaatccacaacccaactggtgaagaaaaactgggaagggtctgatctgtgtattttctgtaatgatctagaagatgctgatcatatcattttcagatgccctgttgcaaagttcctttggtgtgtgattagagatgctctgacctggaatgcagcccctaattcttttgatcatttcttttctgagatagtaggccgacctagctccaaacggagcagagggctgataatgctgctgggggctgctgcctgggtgttgtggttgaatagaaatgatatgattttcaggaagcagattttatccactcctctaactgttgcttttagtgtgatgttttatctaagacagtggtctaactgatgaaggaaaatgaagaagcagaagctgagttgatggcaggcaagatcttagaagctgtgcaacttctatctcctcaaggacctcaacacaggagtacaggactggcgtgggatgaaaaaagcaagtagtcatagatattgccttttgctcactggttttcttctcctgtttggctctttagatactgtgtaaggccattttttggctagaatgcttcttgtaaaagctggttctcccagctgttgaactgatgccgtaatcattatctagctttctataaaagctgggccttctggcctcttatcccaaaagaaaaatgacacacagaaagacaagcttgtaaatattcctgacatgtgcatgcataatcggaaggaagatttgagatgccgattggtgatttagttgccactatctgctttgattattgaatttattacgaggtataaggtgcatgagaagaattggtgtttattttactcaactagaaggttacatccaaggaggggagcttacattctagtttaacaatgagaacaacttcctctccttctgtcatagtctccacagcacgtgcaaaggcaggacaaaagaagcctagattttacaattatattagaccggcatagtaaaatggtacttctacaattaagtgcattcaatcatggtaaagggaacttattcttaccttctgcaaggttgaactcaacaccttcagacatggacactgacatcccatcctccaggcaagcattgtagttcactacaaaaaaaaaatgtaaaagtattagctcaataaacacacaagcactgttgagctattgcagaaataaatgaaaaaaatattggtacaattaatttctcaaattcaaaactaaagaaaacagagagatgaagggaggaactaatgtactatttcataccaagcacttcatccaaatcacaaggtttatcattccccactccacgcttcatagtctttttcaatatgccttcattgtcgaggatgtcagttatggtgataagagagatgagctcaacatcaaactgtagtgcttggttaggaggaaggttcgctgggatatcagcaggacaccgagacttggtgcctgctaattctggagggatggtgaatacagctttctcccctgcttgcattgagctaacagccatactgaagccttgcattacattctctataagcagtatttagttttatttcatcgaagtgtaactcatttttgagaaaagtatggttacagtggtacaaacacccaatgagccaggttttttaaacacacacacacatgaaagatgagccatgtaatcttgttatctacattctagtagaatctttaatggcttgaaacaaaaatgtcagaccccaaatcactaaagtcactttttcattaaaagattcagtccttaacacttgatagaaatcccactgcatcatataggtctgttgaagtttacgcaatgcagaaatcaacaacgccatatatataaacacttaatagatgagtggatgatctggaagatcagtaaaactacatacatgagaacttcatgatgcattaagaaaatgataaataagttaggtgaaacgatttgaatattgcacaaaataaaggggaacaattatgcttggtccacgtgctactaatgcattttctgtattacctttttgggagtaactgtttgagtaaactactgaaaatcatttggtttagtggtgatgggtgtagaaaccctgggatccatggttaatggcatgatcacaaggtttccaaccattacaatatctaagaagatttaacaacagaggttggttaaacagtaagtaccataaacattggagagttcttaactcatatcacttggtaacctccctgtaaattttctttggttctgatcaagtggtgtgcattatggatttattgactcggtaagaactaaaaagtaatttcagggtattgactattgagtatggtacagttataccttgtcctaatataaaagtcagaggcacgccatcttctatggtggatgtaaacaaagtaccatcaagtctttttcctgtaaagtggactggaagcaaccaaacatactcatgattcatcaaaggagcagtagaaaggaagatcaatagcatgactgtgtactggaaaataaaccaggggcttatacagtacaaaccatcaacagagttatctgcagggataactgctacaaacaatacgaataacattggtgaaatcttccccgactaggattaactagctatatctcgttcaacatcagcgagcttagaattgcacattttcaaaatttctattgtactgcttcggaaatgagaaccatcctacaggattagagtggaaatctggaatgctgaaattttccatacctatgccggatttcaaccatttcctaggagccggtcaggtgtcaggacggagattatgagacgcattggagaggtttcgcagcaaccgagagacgtactaagcgagtttagggtttgaccttggaggcacgagtatgcgtcgccggctcgctccccgcccgggattcgacctccacggccggatctactccgctgcctccttcgattcgctctctgcattgcctccgcaaagtccggacgccgctgagagccgcctgcgcctgctgcaggactgtcactgatgatcggtgccgccgccgtggttgcaaggggcagagattgtcggaaaaaaattctctgcggcagcagtgccgcaccacgcctcctgtacaacaccgcgtacacacctgacgcgtgtcccatcacattagtgcagccaagcgttttccttgagccaagccgatgtcttcctcagctcgcgcgttggaacggacaccaagccgcagttagcgactgcacatggagttgagccgttgtttcattagaagacagaacagatagtaaatctgccgctaaccaagaacagatgaataatatatactccctccgtccctacatatttaacgccgttaacttttttaaatatatttgaccgttcgtcttattaaaaaacttttgagaaacatgcaaaact

SEQ ID NO: 15973 - DNA, 23056 bp, Oryza sativa
acatgcaaaactatatgtatacataaaagtatatttaacaatgaatcaaatgatatgaaaggaattaataattatttattttttttaataagaagaacggtcaaacatgtttaaaaacgtcaatggcatcaaacatttagggacggaggaagtagattgtaaaacgcaaccgtatggctacaaccagggttagaaattccggaatgaattttagtcatttcagacccttgatacaatattatttcggccgaatttttttaatttttttattcttttgtgaatttggtaatattttgtttaaatttaaccaatatttgatcaaaattttgaaaatttcggactgaaattttggtatatcaacgacgtctgatagaatcggccaaaccgaaaaattaaacccggtctacaacaccatgttcataagtcacaacaaacaccatgttattgaagcatataaatccgtttatattttgcagaagcaaaaagataaccaaaactcttgaggagtagtacaagctaattagcaatgtcggccatatccccaaaccatcaagtttcaagactttaagaagggtcgcaatgcaataggttcctatctaaagttgtgaactggacaaattaaaccataaatctctccagcaatcagctttatgtactcctgaacagcggctcccaaatcccaatcggctttagtatttcggcacagcggctcggctctaaagaaacggctgcttggctacagcgggagatggacacgcgtcaggtgtctacgcagtgttgcacaggaggcgtggtgcggcactgccgcagagaatttttttccgacattgtcgtgcggtcatgcccccgacatccaccattaaaatgaatccaacgtcctgaatttttctgtgtcactctcgtccctctttatccccctcattttctatatcaatactaataccaatactctcaccgtttggtattataagtcttttaattttcttaagtcaaatttttttaagcttgatcaaatttttagaaaaatacataacatttttaatagaaaaataaacatattatcaaatatattcaacgttagacttaattaaactaatctagtgttgtagatgttgctaatttttttctatgaatttagtcaaacttaaataactttaactaaaaaaaatttcaaacgacttataatataaaatggagggaggacttcaatattattatgcgttcgactaagtaagaaagagagaaaatttccattgttcttgttttcttaaaagaactaggtgattccccgcgctttgctgcgggaattactaagtaatttcttatatatatatatatatatatatatatatatatatatatatatatttcaacaatcgagcatagggtaagtatgatgttaattattaacaacaaataaaactgatttgtcaatccatatttgaagagaaacaaatttaatagactttgtagaggattatagataatatttatgttgttgaccaagatttgtatcacaataagcggaagagaaggaaaaaagaaataaaaagctaggatttattagtagtaagcatgaaacaaactaaataatatctttgctttgatatggaatatatgaatgaatatacgttgagtattataaaaaatgatggatatatttgttgaaatattatggaaatgatgagagaggttgattggatctatttgcattttgatttgtaggattaaataaattatgtatgatgcatgtttgcatgagctatttgataagtagttattgctagtggatgatgaggtagcatgtttgcatgttgagttttagacttaagtaggatttaacttcatagaaagcatagatagaaaagttgctttaaaaagcatattagtccatttttaatttaaaataactaataattaattaattaatacactaatggcttactgcgttttgcgtatcactcttcttcttcacttttctcttctacttaaacacactctaaaagctgcttagtaagctacacgttcatgacacaacaatacaaagcttagaagcatgggcggatctagcatgagtgttcctatggaaaagaggagagatgggaggggaaagaaggaataagagtagagggagccaaaagatgaagaaaaagatgagcacttctagtttgatgctacgttcctccctgtttagaagcatgtagttttaggtgatttcaaaattaaaaatttttagatgaatgaaatgtagcaaataattaataatgtctatgtttccaaacttctgatgttggttagttcaatgtcaaatagagaaaaaacagagggagaaataaggtagaaacaaatgaatctatatataaggacggaacgtaattttaagcggttgtagaccgagctgatttttgcagttgtgtacctttttactcttttcaactatacgcaccttgtgcctcgcagcagtagaaccccttcatttccagccaatcaaaccgttccccaggcgcctcttgaacggtccacttcgcaaagccaggagagccacgaccacgaccacggccatgctcgctcccaaaactctctaatcgactggtatctcctctccacacgaacaagtcctcgtcaggcttgcctaggtctgacaacttcatggcgccgaagtccttctttcttctccgtcgacggcaacggagactcctctccatcggcaggaaattaacgtggcacgctagctgctaacaccctaaaggctaagtaagggaagaaaaattaaggggccgggtatctgcgctgttatatcgatcggctattaaacagagggactgtttagttcacaccaaacttcctcccaactcccaacttcacgccatggtaacgctgttttgttgcacgaaacttgcgatgaaattgcgggcaagtgaatgatatgataatgatatccacccaaacatcaacgcgttggtggtcgtgcttttctgctcgatcgaccacataacgtatgaaaacaaccatatatgtcaaacgacgatgacgcgacttcgatgaccacatgcatttcggtttttgcaagtttgcagatgcacgtcgatctggggaaactattttgccacgcacgtctggggaaactattttttgcgacttcgactccctgcacgtctgcgcgctttctttaattcgtgccaccactatttcgctagatttgccaacccgtggcggtggcgtcgttggaagcttcggtggaggcaacgttggacgccatcagcggagatcaatggcgggcgcggctgcagccgttcaccatcttccgcgtccccgcctacgtccgcgacggcaaccgcaccgcgtacgagccgcgcctggtatccatcggcccctaccaccacggcggcgccgcgctccgcgccatggaggaccacaagtggcgctacctccacgacctgctatcccgccgcgctggcgacggcgccgctgccgtggtcaccgcgtccgccttggtcgcggaaatgcggaccctcgagccccgggcgcgcgcgtgctacagcgagcgccccgtgggcatggactcctccgacgacttcgtccggatgctcctcctcgacggcttcttcatcctcgagttcttcttcaagtggcacaccaaggaggccgactcgctctgcgacgtcggctggggcctcacgctcgtcgccgccgacctgctcttgatggagaaccagatcccgttcttcgtcctcgagaggctctacgaagccgtcgccggcatgcagcccgacaaggagtccctcttcaacctcctcatcgagtacatcagcgacgaggagcccatcaggcggccgtccggtgactgggacgtccaccacctcctccacctgtactacgagtgcttcgttcccaagcggccacggccgcggctgcccgagtcggcccggaaggcaccggcggcgccgacgcggacgattctgcgtgccagcgaactgcgggaggcgggtgtcaccctcgtgcggcggagcgcggcgcgggacaggttcgacgtgacgttcgaccgccgcaggggcgtcatggagatcccggccatagagagatcgacgacatgaagcgaccgctcctcgtcaacctcatggcgttcgagcagacgcaggcgggcgaggagccgcgcctcctcaccagctacgtggcgctgatgggccagctcatcgtgacggcgcgcgacgtcgagctgctccgccggcgcggcgtcctggagagcctgctggccgacgacgaggaggcggcccggttcttcagccgcctcggcgagggcgccgccatggacttcagccgccaggctttcgccgggctgtacgaggacgtgcgcgggtactgtggctcgtggtggcaccgcaacagggcggcgctccggcgtgactacttcggcagcccgtggtcggccatctccgtcgtagtcgcggcgatcgtcgtcttcctcgccgccacgcagacttacttcaccgtgtttcccgccaaataacgagagcgtaatcttcaagtgtaatgacttcgtaatccaatccttcactacttgggatagactattgatcagtcgactaaaaaaaaaatacaaatcgttagtccatcttgtgcaaaatccgatccccagccgaaaggccaggaatgatgcagaaacagagcaaacatctatcttccttagcctgtggacctatgatccatgttaacggattttggatctgcattttttggaccggtctgtatgtgttccttttgaaagtttcttttgggctattatttattgatttgggctaagtttgttctgtacatttttgggctgttcgtgcgggcctctgccttctgtagagccatggccacatccaaatgaaaggggattttagattaaacaagcaccatgcacggatgaaccaattttcgaaaagggattagctatacatttatgtaaatattagtacaatcatcatgcaattatattgtaacttataagtaactatagtgtaacttgcacgtaactttcaaaattctcttggtgacatactaattctgtgaaaatggaggtaatagtaccgaatttcctcacatgtgcatgggctatgattttttttctacctcccttgcataaattaaatcaaaccgtacggttcaaaattgcattatagttacatggtagtacatacaaattacaatgtaattatattacgattgtactatattttcatttgtcaaattttagaaaaaaaaattattgacaaatatatagcaaaatcgtttggaaaattgtaaaaaccatatcataagtgacttaaagtttggcattcctccccataaatcactctgttatgtgacaggtataaaattttaaggtggggatctaaacaacccctaagagtccatgcgattttgtatggatatgatgaatatccagatatattaattagcgcttgacaaagtccatatataaagtccattgttgtccctcgtgtttttgcccagggagccaggcgggtgtcaaactgtcaatgattcaatggtcattgctcgtgtattgacatataatggcagctggtcatgtatattatattcacgtatagactgctaatggcaggagagtctacatatataccgatgtcggctgccatggctgcacgcagccgagctcaaattaacgtgtctgaccgtacttggaggcggtcaaaaacctgccgctggctgcttatactccacgttattccggctaccggcactccagtcgttagcacttctttaatatcgaagctgacttaaatcatggtgtatactccctcttgtttgatactagcacttattgttttgaacaagagcactactatacgtgagagcatgatctccaaaaactaactttaaccattattttttattataatatgtataaaagtattaataaatatatgaatttattaaaatactttttaaaactaatcaatacatgcatgtagtcactatatttaaaagacaaatgttttaaaaatgattcataatgaaagattcaaaagtttgagctcaactttatctaaaacgacaagtattatcaatccggagggagtataagcgatctatagaagtcaccgtattagatttatgtttagatggagcaagaaaatataagagaagaaaaaacggactatacatttataagtcaactacaacattaattttaataaattatatgagagagaggtagtattaatggattagtatatatctataactaactaactattgcatgtcagaactattagattagtgatacataaatgatggggacatatccattgaaaaccatcgtgagaacccataaaaaccgggactatatgttttgtaaattcacgaaaacatttatatgtatgaaataattctcaccaaatttgaagttcaaactcaattttaattatttgggagttaaaaaagtatttcgggtgaatagtaaccataactattcacttctctgtcaattgaagtttgagtttagacttaacatctagtgcgaatatatcttatgcctatacttatctctagaattttttttactgaatttagagagcttatatgtatattttttatgggtttacacttatttgacgttttcactagttttcacttgagatttgatgtgaatattaaaaagaaaaaagacaagtgatatgtcagtatttagtgagtcctagtagttagggcctgtttagttcacaaattttttttcctaaaaacatcacctcgaatgtttaaacatatgcatggagtattaaatatggacaaaaagaaaaactaattgcacagtccgactataaatcgcgagacgaatcttttgagcctaattagtccatgattagctataagtgctatagtaacccacatgttctaatgatggattaattaggcttaaaagattcgtctcgtggtttccaggcgatttataaagttagttttcttattcgtgtccgaaaaccccttccgacatccggtcaaatgtccgatatgacacccaaaaatttttttatccccaactaaacatgcccttagctataccattgaccttcctcatggctctcacacatgcacacatattaattgccatcagatgacaaatcacgcgctaagatttattgagccccaaaatgggtaataataacaagaagggacaaattttacgatggtcttaagttaattctactcctacttataagtggaattaatttgtatcttttattttgctcttattcagcaaatcatttttatctatactagttatcatctcaactacgggtagtatgatatttcttttattagaactcataagccatgcataatgttatcgatatatgtaatatatagtactaatagagagcctataaaaatactccctccatccaacaatataacaaatatgagcatgttcatattcataatagagagcaataatgtttttttagttataaatgtccaagttttgtgattaaattgatattaaacctttagttttgtgataactttgtttctaaatctgtagttttgtgatattttatcttaaatatatagttctatgataaaattagtgttaaatctatatttttgtgatacatcatgttaaatctataattttctaataatttaactaaaatatatgtagttttgtgaaatttacttaaaataaaaatgtttggcatggtgactagcagcccacacactgccactgcataggttacgagttcgagtactcagcctttttacatgcatgcgattttttttctctgacttgtgcctacacgaatcttgaggatatgggacagtcacgaatttataagtttgggtgtgggggttagagggggagggggagaaaactgtcgaaagacttttaagagttctatatgagaagggagtagctatatttatgggggttatattttttattaacaaatagttaaattatttttacactataattatattcacttatacattgtaattacacagtacttacttatgtaactttgatatatttacattgtaattttcaaatcttacatgtaaattttaaattttacattgtaatttttctcatctctagatctaaaccataatcacattgggcaaaacgcatagtcgagtcacatctgcacgggcaaaacaagctagcactaatctcaagcagatcaaacaccctagaaatcttttttttttgttggaacttaacaccctagaaatctgactgcaatccagaagaaaatgcgtcgacacaattttagcagttccggtataattaagttgtcctcggcggattgacaggtggaaaaggctgacttcaagtttttgaaaagaaaaatcgtatgcagtttgaattttgccaggaaatggtcggaagaaataataaaaactagtgttggttccacgcctctaccactctataaatacacgagctgatcacggacacagcagaaaacatcaccaagcacctggcaatcactcaacaaacaacaaatccaagtgtacgtacgtacgtacaccgtgcacggtgcacattagagcgcttaattaattagcttcaccgatggagaagagcagcgagctatggttgctatgggcggttttctccgcctctctcgtcttcctctacctcaccatccgacgacgctccggtgccggcgccggcggcaaaccacccttgccgccggggccaacgcctctcccgctcatcggcaacctgctcgacctccgcggcggcgtcatccacgacaagctcgccgccctcgcgcgcgtctacgggccggtcatgatgatcaagctgggcctcaacgacgccgtgatcatctcctccagggacgccgcgagggaggcgttcacgcggtacgaccgccacctcgcggcgcgcgccatcccggacacgttccgcgccaacggcttccacgagcggtccgcggtgttcctcccgagctccgacgagcggtggaaggcgctgcgcggcatccagggcacgcacatcttcaccccgcgcggcctcgccgcggtgcgccccgtccgcgagcggaaggtgcgcgacatcatcgcctacttccgcgaccacgccggcgaggagctcgtcatccgccaggccatccacaccggcgtgctcaacctcgtgtccagctccttcttctccatggacatcgccggcatgggctccgagaccgcgcgcgagctccgggagcacgtcgacgagatcatgacggtgttcgcgcagcccaacgtctccgactacttcccgttcctccgccgcctcgacctccagggcctgcgccgctcgaccaagcggcgcttcgatcggatcttctccatcctggacgacatcgtcgagcgccgcctggtggatcgcggcgaacgaggaggagaaggcggagccagctcgaacagcagcaagagcaagcaccagtacgacggcggcgacttcctcgacgcgctcctcgagctcatggtcaccggcaagatggagcgggacgacgtgacggcgatgctgttcgaggcgttcgtggccggcggcgacacggtggccttcaccctggagtgggtgatggccgacctgctccgcaacccgcccgtgatggccaagctccgcgcggagctcgacgacgtcctcggcggcaaggaccaatccgccatcgaggagcacgacgcggggaggctcccctacctgcaggcggtgctcaaggagtcgatgcggctgcactcggtggggcccctgctgcaccacttcgcggcggaggacggcgtggtggtgggcgggtacgcggtgccccggggcgccaccgtgctgttcaacacgcgcgccatcatgcgcgacccggcggcgtgggagaggcccgaggagttcgcgccggagaggttcctggcgagggaggggaaggcgccggtggacttccgcgggaaggaggccgacttcatcccgttcgggtccgggcggaggctgtgccccgggattccgctggcggagcgcgtcatgccctacatactggcgctgatgctgcgcgagttcgagtggcggctccccgacggcgtgtcgccggaggagctggacgtcagcgagaagttcatgtccgtcaacgtgctcgccgtccctctcaaggccgtgcctgtcaaggtgatcaactgagactagggctagttgagctagttgtgttgctcgatctgttatgtgtattggattatatagtttgtgcgtgtgccacgtatagtagctacagtattattcctagttggtttcgtgtaataagctacttaaatcaggactctcacagtcctagatatttgttattccattattcatatagtcaccacagccccataggccataatatacgtctagcatgcatctatgatatgattattttttcgagggcctatctgttgatcctacgatagatttatagtttcaaatcttataaaattacctgttgattattcattcgaaagacattttggttgtcttttcctctgatactccaacttgtaaacatcatatagccggtcagttaatctttttgcaacagtgcggagtttttctttttttcctttttcgagcaaaatggaaaactgtcacacgtacgccaatctcaattctcagactctgacatgcaatcaccgagcaaagcccaatatataatacgttgggaatatacatacggaccatatagtatatatgttgattgttgagcatgagagaccctctatctcgtcccatacgtctctgaccgccgtacccagccgtcgcttgcacgcgtccacgtactttgtcaacaaatcgaggagtatggctgaaaatctagcccggtttgacgccatgaagagatccatacatggaaaagtaggttggcatacgtacgtacgtacgaccgatggatggatcagcaatgctgtgaagagaaaaacggccaaaaagctatttgcacgtgcagtacccgccttttaacagaaaaactactggtcgatatcgatgcgagctctctaaaaaaaaatgggctcccgagaaaagtttcaattgacgttttcaagtcagcgcaagaacatcgacgacgacgacagtgcggctttgatttgcggggttcacacacgagtaattgcagccttgctttctcgaaaaaaataattgtttagttccttcaaactttcaacttttccgtcacattaaatatttggacacatcacacatgtatggagcgttaaatatggacggaaaaaaatcaattgcacagtttgcatgtaaattgcgagacgaatcttttgagcctaattacgccatgatttgacaatgtggtgctacagcaaatatttgctaatgacgaattaattaggcttaataaattcgtctcgcagtttactggcggaatctgtaatttgttttcttattagtctacgtttaatctctactacttaaaaaattcgtagtggtggtcttgattcctgacatagcagacgcatctgacagacacacgtaatctcaaccatccgattgccatatccaacggcgtcaatcttctccccatcacgcgctcgctcctctcttgaatcgatctcctccccacgcccactcctcctcctcccacgccgcgtccttcgccctcctccctgggcgacgctcgccccgccgccgcatcgcctcctcaccagccacgcccgccggcctcctccgcgatcgccgccgccctctccaacgcgcctccacctcgcatcggatcgatcatccaccttcgccctcctccctgcgtcgcctcctcgcctcctcaccttcacacctcgccaccgcatcgcctcctcagcagccccgtgccccgcgccccgcgtcccgcgccgccctcgaccgccgacgctgcgacccgcgccgtctcctcgctgccgtcgccgcgccccgagtcccgcgtcccgcgctgccctctaccgccgatgcgggagcaggaggtcacgccgcgtcaacaccgccgaggagccgcttcctcgccgccgtcgcgacgacccgcgccgccctcgactgccgccacctccgcagatcgccatcgcacgcctccgcctctcaaggtcacacgctcatcgccgcccgacaccccgccgattggggaccgaacgctgaccctgcatcgacgccacaacagtcgacagaggggagatgttgaagacctcactccaacgacggctgcgcgcggcgacactaccaggcactgagggagagaatgcggtgcgaggtgcggcggggttgttcgtccttgcccagatcaatgccgccgccgatccctcactcgcccctcgcccaagtcggcgccaagggcggggttcgccaatctgcttcccagccgcctcgcccgctccatgggagaggtgacacctgtgcccgcctccagcgctccatgcccccggataccatccgagcacgatccctccttagcttctgccggagaagggacgcatgcgccgaccttcagcactctacgcgccctgtggataattggttcgttctctttacgttgcaatccattcatttgtcaagaatcatcattgtgagtgccgagggttattacagattgcaggatcactaatgctcttttttgcccataaggtgttcaacgaaatgctgcttagccaatgtattaccagaaattgatttctctgtaagtgagaatgtcatattgtcatgtcccctatgttgttatttatactaatgattgcaggattctctctgttgttatttatgctatgaagtgctgggaagttgagagtgttgctaccaagcaaaaagattcaattgatctgttggagcaaactaatttggatctcgcagtctcaaaactaatctggttcttgattgtttcagagtggatgaaaataaaaaatggaatgatgcagtgaagattatgtaagcaatgttcgtgatatatcgatcctgaaattctcatagatggccattgcacaaatacaaaaatttgcaggttattaattagtgaactacatctctgtaaatctgcataacatatgttaaagctagcccaagaattaatatgttgtaaatctgctctacagttgacactgcttacattttctactattaataaccctcagctgtgatagatctgatacctgcttaaaaatttgagctgagttttcatacctagcagtaggactaacattttatgttgtattgttcagctcaagatgaacaaccacaccaaccccaagatcaccaactaagcctatcctgcttcatgattgttgctgcaaactccaacatgcttgctgctggtgcaatctgagccggctggtggcagatgggagcctgccctatgttgttagcagctttcttcactccaagtcatgcttgctgcctgtggtcttggtagtttcttttttgtgttgtcaatttaattattatgatttcccatgtgctcggctattggtgttcttgtttttatctgttttgtttcagggtgtcattactatggagtagatcatttttttcttattttttttaatgccttgtaaaataaccaactagcagggatgttcataaatttctcccttttgtttggtttttttcagacatatatatataatgaaggcatatatacacaaaaggaggagctgtttgagggtctaaaggacaatagctcaattgactgggaagctgttgtcatatgctgagagcaatctgctaaatgttaaagaggtgcatctaacttttgtacccagtgaactgcaaatctgcaccttcatttttgattaatagtttctttggattcagatcaaaatagctcaacatgggaatttttctagcagaggatgggcaattcttggaaaatactatatatttcttgtcgttgaatatgatcatgtcccattattttggcacttgctgccttgattctgttgcctgtcccagcccttcagctagctctctatcacacatgaatgcgtgacccttgatggttgtatgcagttgggatattttggtgagttcatcccccttccccaccccacctctctctctctctcaaaaccatcatttatcttcactattgacttacaatttcacttctagctgatgatgatcaatcaaagctagctcatatgtattagtgagtttatgaaaaaaaggatcagatattcaataacagagtcagctccttccgaacgatggcaaaatggtacctttataattttacttctcaacacgcacacatttttttatgacgagtttgaacttttgttctccttgtcagattttatctgaagcaagtatcatatacttctgtattagaatatggacgcaatcatatatctcctaaggtttagtgcatactctcatatttggaagtgaataccaaacgtgtatgaaatagtgcattcgatttaatctattctctcttgggcatttattcgcaaatgcaaagatttttgtaatttgatcgtagcatagattatggcaaccttggctttgtggtttgccatgtcatgtactgatatatgaatgtgatgctttaattaacgttgaaaagccatgaattatgtattcgaacgaattgattggatgtgtcctgaaatcggttcagactttcgttctttgggtactggcgtgagacggggaaaaagacgctgaagacatcaagcataacatggagttgataaaacatcgtcgactgaatcatgatttgtagtttttttggattgccagatttttttcagtgttcaacaaattttcactcaataattatttaatatcttttcacttaatataatttgaaattgatatatagcatttcccgttgcaacgcacgggcaccttactatacttcaaatatgtatccgtatacttaattttttttgaaatggaactaaacacggcctgtattcgttgctgctagcaaaaacgacgttcccaataatttgggcagagcttttgcaatagtactactctctccctccgtttaaaaagagcgtcttttttagcctgatttgtcccataaaagctgttttttatgattgtggttgagaattaatcctcagcatgaaaaacaaaacgacgaattaccgtatgatcgattaagtataagctaaaatatttaaaaattaattaatatggttttctaaaacaatttttctatatatttttttaaaaaaacacaccgtttagcaatttcaaaaacatgaatacggaaaacgaataagttgaagttggaaacattgactatcaaatacaaacttgagcagaagactattaaaatccgaatcttaatctgaaaaaagggcctagaacagatcaagatctatttaggattcagattttacctcgatttttgttaacacgcttttcagactactagacagtatgttccgtgcgaaaattttctatacaaaagttgttttaaaatatcaaatatattcctttgtcaagtttataataattaaaacttaattaatcatatactaatcgttttctcgttatatgcacatcaactttattttcatcttttcaaacaccaaatgtgtttagacaagtatgattaattgattattaattattaaaagcttgaaaaatccaggagtatggctgaaaatctgtccaggaatattattaatgtgttttatgtgggcacacccgacataaattttccttgtccgtattgacggctgttaattactaaattctcaccgtcaatacctgtataaaactataaatacaagacaccaacagtgtggtagggtttatttctaacaattttcacgagtgtttgtgtatatatgaagagatccatacatggaaaagtaggttggcctacgtacatacgaccgatggatgatcagcaatgttgtgaaaaaaaaaaacggccaaaaagctagtatttgcacgtgcagtagtacccgccttttaacagaaacactacgtactggtcaatgttgagctctaaaaaaatgggctcccgagaaaattaaaggtgtactttcaattgacgttttcaagtcagcgcaagaatatcaacgacgacgagacacagcggctttgatttgggggttgatcacacacgagtaatttggacagagcgtttgcaatataatactccctccgtttaaaagaaccatgctatatgtccgacgcaaatcatccgaccaacgtacgattgggacggcaaccacaaaactacgcgacagcgtgagtcagattttatggatcggtcctacaccatacgcgcctgccaccacatcatatatatgcaagcccatattttttttattttttttagagaagggtataccggaaatatgcagccatttaaattagaaacttagcctatcgaataggaaacttagccctcaaataacccaatctgaaattccctcctatgaagatttgaactcaggaccttgggatgctactcaggtcattgcaaccattagtctacaatgccctttaactttagagaagggtattttttacccggcctccatatccgaccgaatatatgcagctatttaaattagaaacttagcctatcgaacagggtgcaagcccatatataagtgactgttggatgcaacttgcaagcccaaactattgaagacaacgtgaacatgacacttctgccggagttgaggtctatcgtaatccaatgtctgctaacttgatctcaacatttttctcatgttgttttcaccgctgcaagtgcaaggcactatggtttcaagttgaattttcatggcctaacaagatgcatgaaacaaaatataaatacagtgaaatccaaaaccacaagcatagtgtctattcgtcaaataaaaataaacatgcaaacgtgttgatctgtctagttcgtcgattgaaatcgcaagacacatataaccaacgtctgacccctctttccaagcaacataagctgctacttgggcttttggaaaggcccaacaagttggaaaatcacatcggagcccaaagagatcacgtcacatacgccggtaacaacacggacgtcgcataagccgtggtcgtacaaagagtcggacggcggggttgtgtgtatagcattttcggcaggcgatgaatatgcaaataattaataccatcggccaccgtgttggacgaggccggtgtgaccttcgtcaagcagaatgtagcgcttgccaagttcagcgagtgttttaatcatgaccaagcggaccgcaccgccgtgtccgcggacgataccgcgcgccaccgagctcctcgaggccgggggtcaccttcgttctgggcgaggcggcggcgccggagtacaggttcggcgtgacgttcgaccgccggagaggagtgatggagatcccggccatggagatcgacgacatgaagcggccgctcctcgtcaacctcatcgcgttcgatcgagcagacgcggtgcggcgaggtgccgggcctcctcaccagctacgtggcgctgatgggcagcctcatcgtgacggcgcgcgacttcacgctgctccgccggcaccgcatcctggagagcctgctggccgacgacgaggaggcggcccggttcttcgcccgcctcggcgactgcggcgccatcaactacaaggagcaggctttcgcggggctgtacgaggacgaaaaatttcaatggcaaaataccaaaatttagatagaaactcagtgaaaattttgaaacagcatagctcggccctactctggcggtgctgtaccgcgactacttcgccagcctgtggtcggtcatctccctcgtggtcgccgctctcgtcgtcgcccttaccgctgcacaaacttacttcaccgtgttcccggccaaaaaaatgactgtaatctttatagacatcatagcaggccaattccaaaattttgtgcatgcgtttccaggccgcaaataaaacgagcttgcacaaggctgaatgtttcttatctgtccagtattaaaaaatatttgctttgagctatctttcattatcgatatttcgttttgaatcagcttttaaccaatgtttttactttcacccatcatttttttttctgtttgctttcatccacctcatgcatctgcaatggtaaaaaagacaagcaaaacaggggaaacacgaggaacgatgcagccaggcataaggccaagtacagcaaaatcccctgctattgaacaacagtgctatactagtagtacaaaacttagagtaaacactataactataaagacatactcctccatttcgttttagtttataagttgttttcgactttggtcaaagtcaaactattttaagttgattaagttcgtagaaaaaatagttacatttttatcctaagacaaatatattataaaaatatatttaattatagatgtaataaaactaatttggtgttataaatattattatatttatttacaaacttagttaaatataaagtagttttactttggtcaaaattaaaacgactcataatctaatacagatgggctatcaacatataacgtggcctaatcagttcaatctaaaacagagctaggttaccaccgtcaaggcaccagtaatggcagcaaagtgagcaagaagggaaaacatcaaggcaaagaatcactaactggttcttataatccaactgtgagcggcacgttcgtccccaccgtcctcgccgcctgcactggggtgggagcgggttggatagaaacgtccccactccccgcattctccctccatccccggccccgctcaataagtcaggtgaaaaacatcacccgcccagctctcgcagtggattcggtaggtgagtggggccctgcaccacccagatggacagcaactttggggcgtctagctagaggtggcgcgtcgcaacgaggtgatagttgggggcagcgataaggcggcatcggccggcggcaacgacgaaacggcaacgtcagctaggggtagcacgctaccaggaggcgacgtcggccgggggcggtggaccgtgaggaggcggcggcggctgagggtgacacactgcgacgggatggtgctgtccaggtgtggcggcgaagaggcgacgctggccggggaaaattgcgaagaggcagctccggctcagggcggtgacagctagggacgtcgtgtgaagaggcaggttggctgggggcagtgtgttaggagggtgacagatgtgggagttagaggggagagaatgacggtaggtaaggatttaggaaaatttaaggttttgtttatagtccttcactaaatgggctaaataggtctttgaatgtaatatcttttgacttgtaactcatatctctgaggacttgcgggtcatctgcggtaaactaccatccccatctccgcccctgcaattttgagggccccgtacccactctcttgcggggaagaattttcttcatccctaaccccgtagggacgacgggtcctcgctggatctccagaaagagaaaattgccacccctaagtccgtcctgctaaggcgtcaacctcgcgcaaaccacgatcggcattgatcaaccctacttgttgcgcccgcatgcacccgcaggccgtcctcacggcccgcttcgtgtccatgcacacctcccagctcgaaccatgtgcctggatggggaaaggctagtcggagcatgcgcgccagcggtgcgcattttttcggacgaaagtagttagactaaccaattagtcttagtatttgatagataagattttctcaacttattataaagtagttagaccaactagtactggaggtacacgttaaattttggtataaagaagcttatatgcctataaaagtttaaagaggataaccatattacttctcaatgttgtggaagaaggaatatggttatcggacggaaatggtaccgttcaccaattaattagaatatggacaattaatcggaattatacggaaatttaacgatcgtgaatatatgtacaaattttacaagagtatatacttttcgaagatttagatgtgtacaactatataaatcaaatatcttcattttgttttttaattaaacagataagtaaaacattaactcttctaacaccgatttatacatcacatggtggtagaattggttgcattaaataagtaaaacataaaaatatatgtaacaaaaaaaattaagtaaagaaaattactctaaatcatcatcaaattcaatgtacagacgattattctggtgatttaacgaaaaacaaccaactaatcgctaaaacggagttttaacgttcgtgaatgataaatgtacaccgtatcatgttaatgaaacggttttactaccgttaacgtatatgtggagattatgggtaccccatacccacacggcatggttatccgactagttataggggataacttatatatatgaaatatgtaacagatcatgacttgggtattacgtttccctgtatattatggaacggcctaaagtcctggtttgataagattgtaaagtagatttaggaaaccgataccgtattggttaaggtttctatcttgtaaccctgccccccaacctatataaggagggcagggagccccctctaggggcatgatgacacaacctgatcgtcagatcaatacacactcggcggattcaaatccccaaacaggagtagggtattacctctcattgagagggcctgaatctgtctaaatcctttgtctccgcatccatccacttttaggtctcgtgcgctacccccttttattattgccgaattcatgtttcgacagttggcgcgccaggtaggggttgcgtcgagtttcctatcaacgagcgcgatggaatcaatttcatgagtcgccgacttcgctttcgctttgggagttttcacttcctttccgtcgaccacttcttcaagctcctcttctctgacttgatccaaatcagtcagggggaaactcaatctgatttttatcattatttatcatattgatttttaatctcagattaatttcttctattttttgttgttgttcgcatataactacgcggcactattgaggcgattgatgctggtcatggactcgaggcgtctcagctttccggtcgatcggccgcgagtccactccgccggcttgtcctcgccaccgccattgctgatagcaacaacgacttcaccgccggcctgccttcgtcgccgccgactggtgtcatcgcctatacggttggtcggtcacaccaccgttcatgggcgtccatgtcttcaccgaccggctggcctccgtcgccgccgagtggtgcctccgcctacacagctggcctattatgccgccgctgttgggcgtctacgacttcaccgccggcctgcctccgtcgccgccgactggtgtccccgcctatacggtcggttggtcacaccaccgttgatgggcatcgtcatctattatgccgccgctgttgggcgtctacgacttcaccaccggcctgcctccgtcgccgccgattggtgcctccgcctacacggctggcctattatgccgccgctgttgggcgtctacgacttcaccgccggcttgcctccgtcgccgccgagtggtgcctccgcctacacggctggcctattatgccgccgttgttggatgtctacatcctcaccgttggctcaccttcgctgccgtcgactggtgtttccgcttacacggctgacctattatgccgccattagtgggcatcttcgctttcaccgtcgaccgccttcgtcgccgccgactggtgtcttcattgttattgatggacgactttgttcccacattggccacttctgccatcaccaaggggaatattacaaagctaagtcatcatttattttattctttatatgatatttttcccttttcctctgcctcactacaccaattggtcttccattgagtagtgagtcgggggctacagatgttatatcatattttttataatatttatcttgattgcttgcgacataatctgagtacaaaagtacctatcgagttatggagttctatcttcctatgctttccgtttggtttgccaatggatggttgcctttgggccgattcctagcacccgggggctcgttggatggaccgagtaacgcaaggtgctaagtattattcggaataaatcaaaagcatagagatgagataaatttattttctgctcttaataattgcaaaagtacccgagtagtaaactccgatccgtgaaactttgttccattaatgacgaactcatgtcactcatatgcatgtttgggaagtgcttaggccgactcccagtgcttggtggctatgactagttgggcagagcgtttaaacgtaatgagtcatctgctcggggaaatcaaaattgacaagaggagaaatacatgtttataaatattttaaaatacttgattttttctcgagtattatatttatatcagatactactcatcctatatgtttgttctgcaggatccagatccagatatgcataaaagggattcatggctttaggcttatcacttacgctccaggaatggatcagtcagaacatcaccgactggcttgccttcgctgctgccgactgatgtttccgcctgcacggctggcctttatgccgccgttgttgggcgtctacgtcttcaccgaccggccgcctcgtccgccgccgactggtgcttccgcctgcacggctggcctttatgccgccgttgttgggcgtctacgtcttcaccgactggcttgccttcgccgccgccgactggtgtttccgcctgcacggctggcctttatgccgccgttgttgggcgtctacgtcttcaccgaccggccgcctcgtccgccgccgactggtgcttccgcctgcacggctggcctttatgccgccgttgttgggcgtctacgtcttcaccgactggcttgccttcgccgctgccgactggtgtttccgcctgcacggctggcctttatgccgccattgttgggcgtctacgtcttcaccgaccggcttgccttcgccgccgccgactggtgcttccgcctgcacggctggcctattatgccgcc

SEQ ID NO: 15974 - DNA, 6278 bp, Oryza sativa
tcaccgaccggcttgccttcgccgccgccgactggtgtttccgcctgcacggctggcctttatgccgccattgttgggcgtctacgtcttcaccgaccggcttgccttcgccgccgccgactggtgcttccgcctgcacggctggcctattatgccgccgttgttgggcgtctacgtcttcaccgaccggccgcctcgtccgccgccgactggtgcttccgcctgcacggctggcctattatgccgccgttgttgggcgtctacgtcttcaccgaccggcttgccttcgccgccagccgttgttgggcgtctacgtcttcaccgaccggccgcctcgtccgccgccgactggtgcttccgcctgcacggctggcctattatgccgccgttgttgggcgtctacgtcttcaccgaccggcttgccttcgccgccgccgactggtgtttccgcctgcacggctggcctttatgccgccgttgttgggcgtctacgtcttcaccgaccggccgcctcgtccgccgccgactggtgcttccgcctgcatggctggcctttatgccgccgttgttgggcgtctacgtcttcaccgactggcttgccttcgccgcaaacaggccataacaaaggaataggttcacaccacccagtgacattcgaaaataaatgcacagttgaaataaatagagaatttaaatataggatcaacatgctcaaaggattgtgtttaggatctgtgtgacttgccttgcaataatcggtcttcaattaatcttcttgaatacttccggcgcactcgcgaaccttcgcaacgacggaaacgacaagctatcacgcaaaacgaggaaaaagactaataaaaaccaaataaacaatacataaaaagtaaacaaacatgtagatcatatttttagatgaattatgagacttgaacggcctcattctgacttcaaatgaatttattaagaattttacaagattaaatctatttaaagcccatttaaaagaaattaaataaatttaattcaatttatggacaattttaatatgtagatctttattttacacaacttttgcaacttgaaccacattaaactgagttaagatgaattagatatgaatttttaaagattaaatcggattaaaacctttaaactgattttaattgaattatgacgcaataatgaattatttttgaaaaggaaaagaaggattattgcgtccgcggctagggtttcggtggaccgggcgcacgggcggcggttcacgcgaacggacggccgagatcgaaccgatccaagatggacggccgagatcgatcgggtccacggcggctcacggcagacggggacgatgacgtcagcgatgacgtcaccaccggcggcggcggctcggcggctcgggctcgcatgctcgccggcgaacgacggcgcggcgacgcgaacggagagcaccaggacgtagaggacgacgcggcgaactcaccggtgaccaaaacggcggcggaagaccaacggacggcggcggcgacgaggaggaagcggcgaagctcttcgggtcgacgacggcgacggcgctccgacggtcttcggcggcggcgaagcggtggacggggacggcgacgacttggcgaacccgatggtggcgacggcgaccgacgacgacgactgcaacggcggcgcggcgcggctgaaccgacggcaacgacggcggcgactagggctacgcggaggcggcgctagacgcgacggcaggctaaggcaaaggaggcgacgggtagaggggagctcgggggtccttaaataggtgcaaggaggcggcggcgaaggcccacggcgaccggcgacgagaaggaaacttcgggttggagggagaaaagaggaatccgattcaaactcgaatccaccggtttccaaagaaaattagccgatgtttccaaaagagaaaaggaagaggagatcgagaggatcatttgccctcaaacaattcggccggagaaggaaagacgcggccgaatttggaaggaacggcggcggcttgcgctagggtttcggccggcggcggcggcgcgaagacgaaggatctgacaagcgggccccacctgtcagcgacagcgagagagaggagagagcggcagcgacctgggccggactgggccgagggaaagagagagagagggttttgggccggctttcggcccaaagccaaagaagacttttaaaacctttttcaatttaaattatttcttaaatgtaattccatttactaaaaatacttccttagctcaaataaatcccagaaaaatctaggaattatagaattaagcaaagtatttaatgaaattttatctggcccctttttatattgagatttagcaaattaaaattagatcttctcttttaagcttttaaaatcatttctaataattccttttaaacaacaatttataatttaaggatttttaaacaagaaaagctcttaacaattataattagatcattaatgatcaaataattactgaactgttctttgtattatttaagaattgagctctgaaaaatccgagaaaatttcagagagttgacttaaccatggagaatttaacaaaaattaaatccatccatgctttagatttaagaaattttatttcccacattttacttcacttgtaaattaaagaacatttaatataaattctattaataatttattaaataatttataaatcctgaaacgaaaatcaggatgtgacaaactaccccccttacaaagaatctcgtcccgagattcggaacggctagaaagaaaaagggataggtaaactgcagtctatcttattccataactccgataattattataaggctttgaagaaaactactgctgccttgaaactggtggctgagttgtaacacttgaagacacaactcttgaagacgcaactggcactgcattggctcctgtgacaacaatgttgttgacctgaccttgcagctgctgatgcttcggcttcggacactctcttgcaaagtggcctggcttgtaacagttgaaacatacctgctgctcccttccactactgttattcacttgagactgatcctgctgaactggcaccagctgattagcctgctcgatgttaagttcatcattagtctctaatttgatctcaccaccgatgttcaacggttgcgactgtccttgaccagcggaaaaaggttcaccaatttggagtggcttgatacactgcctctggctactaccttgtgcctcctggaatacagtcattctccttttacggttatccatcctgttcttcttgtcttcaagtcgaattgctttgtcaaccaactcctgaaaatcctcatagtcatgagagatcaacataactgatagctcatcctttaagccttccaaaaacttctcctgcctttcctcgtcagtacgcacatcttctggagcatagcgagctagacgattgaactcatgaagatattccatcacggtacgatccttttgcttaagtgcccggaactcacgcttcttcaaagcaacaacacctgcaggtatgtgtgtcttcttgaatgcttccgtgaactccgcccaagtgattggttgtccttctgctctgttcatccggaaatgatcccaccattctgatgcaggtccttgcaactgatgtgaagcgaaaacaactttctcctgatccgtgcactggagcagttccaacttcttctcaatagcgtgcagccaatcgcctgcttccactgggttggtagtgctagaaaaggtaggtggcctcacacgaagaaaatcagttaacttgttctgcggcggtggagcattgtagttcccttggttgagctggttctgcatctgctgtatcatcatgttcattaactgagtctgttgagccagaacttgagcaagagttgggttcccttcattattattgtttccacttccattagcacgagtgttcaccatctattgcagataggaggagataggaggagaggggttacactaaagacaagaccttaaccaggttaacactgatctgatgtgtgtagaccattatattgttcaagttgattaagcaagcaacctagtatagttacacactcatcaatgaactactccaatgatgggaatgcaaccatacctacacacaagcaagcaacaagcgttctaccctactaactattcttcaaagacactttggcggcataggttctaaggtaggatccaaacttcattccatcttgaccacttggcacttcggttcttcctcgatccacttgactgacctccataagtagacctcattaacatcttctagtttcaacaactagttttagaactactcaagttgaaagcaggaggggagaggatgataaaatgatttatagagaattctagagaaggaagaaaggaaaattttcacacatcatgttttcggaaaattagtccttaaggtttgaccatttggcttatcctacagtcgagatggctctgataccaacttgtcacgcccggaaattcactagtaatttccgaacttatttgtgcataaaatcctcgtccaggaatcagccgaggtacacaaattgacaatttaatatacagattcatcaaattaactaaaacgataaatacttacttatgaggcacttagtcctcaccaagaagaaaattgcagcggaaaaataaaatctagcgaagctccggctccactcccacaggcagctcaactggggtataagccaaacgtcttctccttcgcaacttgtcttcaactgaggttgattgattattgcaaggtgagcatatgacatactcagcaagccacacagcaaatatgcaagtgcacaaggataccaaaggatggcataatatcggctcatttgcaaaagcagcatttagcaaaatatttaagagaagtaaaacagtggagtaattaatcagaaattttaaccaacactgaacagcacacccatgctgcacaggcccaaccattctgaacaaccatacccggctgaacagatctaactccaaaccaggagctaagcaaattattaccagttataacatctataattatggtgagaggtgtgggactaatcacgaaaaacattgctcaactcgcccataaccgcgggcacggctattcgaatagttttactctggccagaggtgtaccactgtacccacaagacacagccccacatcatgtcaccatgtgcctcagtaccaccacggtacctcggaaaggggctgtgacagtaccccttgcataacacaatccaccgcagcgcaccattcctggatcataatcacccccttataaaacaaggcatggactccccagcgacccccgtgggcttatctccgccacttctcagtctggtgccccgcaatgaaccatgctatacaaaagataaagccgttgcccacgctggcttgtggttggcacggttaatgtttcacaacagtagctcgcgaaccggtccttaattgtcatgagcacgactctcaaaaccatgtgctcacaacccaccattatcaagttttagttggcaagtaattaattaaccaatcacgattgaccatcgtgagctaccattaaatataaccataagtgatagtgaaacattagttatcccaattgtgtgctaatgtttctaagcagggctaagcaatcacatctaatatctagctgaaccaatatataaagctcaactagtcaaattataatgacccaaggtatcaaggattaaagtaatcaatgcaaacaggccataacaaaggaataggttcacaccacccagtgacattcgaaataaatgcacagttgaaataaatagagaatttaaatataggatcaacatgctcaaaggattgtgtttaggatctgtgtgacttgccttgcaataatcggtcttcaattaatcttcttgaatacttccggcgcactcgcgaaccttcgcaacgacggaaacgacaaactatcacgcaaaacgaggaaaaagactaataaaaaccaaataaacaatacataaaaagtaaacaaacatgtagatcatatttttagatgaattatgagacttgaacggcctcattctgacttcaaatgaatttattaagaattttacaagattaaatctatttaaagcccatttaaaaagaattaaataaatttaattcaatttatggacaattttaatatgtagatctttattttacacaacttttgcaacttgaaccacattaaactgag

SEQ ID NO: 15975 - DNA, 13373 bp, Oryza sativa
cggctttcggcccaaagccaaagaagacttttaaaacctttttcaatttaaattatttcttaaatgtaattccatttactaaaaatacttccttagctcaaataaatcccagaaaaatctaggaattatagaattaagcaaagtatttaatgaaattttatctggcccctttttatattgagatttagcaaattaaaattagatcttctcttttaagcttttaaaatcatttctaataattccttttaaacaacaatttataatttaaggatttttaaacaagaaaagctcttaacaattataattagatcattaatgatcaaataattactgaactgttctttgtattatttaagaattgagctctgaaaaatccgagaaaatttcagagagttgacttaaccatggagaatttaacaaaaattaaatccatccatgctttagatttaagaaattttatttcccacattttacttcacttgtaaattaaagaacatttaatataaattctattaataatttattaaataatttataaatcctgaaacgaaaatcaggatgtgacataaacataggccattttaggcgtgcacaaatcaaactccaaccaccttgatcggtaagtgagcaagcttctcgtccttgccttaccaggaacccggtttgtccgaccccgccccggcgttcccaactattggcatgcgaggtttccctgaaccgtctagttacttagccagggtgtcccattccaccttgtggttgcactttggttatgttcgatgagtttcccataggaatcggtccttatatgcgaatacgggacagtgccacataggcacaacccccgcatcgcgacttttcacaattcattttattttcaaacacaccgacaccacatgtcgggttttgaaggcttcacaaacccatttcccaagttttcgacaagcaacggtgtatgtgggatatttgggatacgcgctcagagagcacgaataccaaggtaccacaagggtggagcgacaaggaatcagggtagtacaacctacagaaattagtgcgactactgggtaggtccgtcggtttagcacgcaaaccgaggccaagcaagttaagtgtgtgattctaataatgcaagttgcaaacaaaataataatgacttttcaattataggggcaattgatcaaagggtgacttgccttgctcaaggtcttcacgaagcttcacgaatcttcgagaaaacccgcgatcgacgaaaatccgataaccacaactatacgcaaacaatcgaaaacctaaacaaaggaccaaaagaaagatcctatttagactaattagtagtgccattaaatagatctcaattttacgggattactggaggttgagcggagtcaatcggatgagcggttgggaagatatggattttctaaggtttaaggattttctaatcaaaggagaaaggatttaataatttattaaacccctttctggaaagagaattgaaggagggatgtaaactagacttgtttcggtggcattggcgcggcccaagggtcgaaggaggctcggccaagccattgggccgacgcgggcgcaagcaggcggcccattagggcgcgcgggagggagagggggcggtccggtggaccgagcccaccacgcggggtcccgggtggggcccatatgtcggcgagacggtgcacggtggaagcggcgcacgcggggcgggcgctagggttttgggtgcaccggatggatcgaggcgcggcgggcccacgtgcagccgcatggcacaccgtggtccgcgcgcacggagggggaaacggaagggaggggccgaccgggtctgttgactcggtcgtgccgaggtggcgccgacgtggcggcagccacgcgggtcggcggaaggacgaagacgaggccggccgggatggacggcggacggcggcggcgttcgcaggagcaaggcgcgacctcaatggaaaaaggaagcacaccgggggaaggggagagacgagacgaagcgagccgacggctcggattcgccggaggatggccggaatccggcggattgtggcggcggcaatcgctggcgagcaaaggggggaatcacgacgagacgatgagggttcgattcaaagggggtggagcatctccggggttcaaggaatccgtttccggtgtcggatggggcggagaatcactgaggagggctggcgacgagcagcggccttcgggagcggacgacaatggcggcgaggctgtgccgggcggcgacggcgctagggaatggtttggggaggtcctagggagctcaaggacggtggtggcgcgaggtattggcgagagggcccacggcggctcacaggcgggcgcggcggcggcgaagcagagcaacggcggggcggcatgtttaaggggacgagcgagcaaccgaatggctcggggcttatccaagatgatgcagatggcgagaatttgggcgaggagctcaccggcgtgcgggaacggtatcggcggcgatttggggatggaaaggggtggaaggccgatggcggcacgcgaccgagcggcggcgcacggcggatgacgccgaggcgagtgcgccggggaagaagagagggagaggtggcgcccggagctcctcgtcacgcgttcacgctcgcaccggctcctccggtgctcggcgacggacgacgacgacgagagcgggacaagcggcaacaaggcggcgatggtggttcggtggtaatggcgctacagcggtggagactgaagcggggaaattgagaggagggtctcggctttataggcgaggaggagaggtcggtttggaggagggaaaccgacattggcagtcaaggggtgcaagggcgacgagctggcggtcgtcgacgcgtgcagccaaggcggcggcaggtgatgacgccggcggtgtcgggcaaaaggaaaaagaaggaggaaaggggcttggtcccttgccaaaacgagaaaaggaggagggagagtgaggaggaggaggagagggagggcagctgcttctcccactcttggacgggtgcggcgtggagtggcgggggccatggatgacgtcgacgatgacggcggcggtcggtttggcatggagcgggggcaaggcggcagcgcgtggcgtcggcggcgcaagggctgatggcggcggcgaccggccggtcggccacctcgcgagcgcgcgggggaatgggcgaaggcggtggaggttttgggcggcgacggcgggaagcggtgtcggcgcgagagagagaaagagagagagagagaaacagcgagagcgagagagagacagagagagcgagcgacggctctctctctctctcggctcacatgcgtgcaacgcacgtgcgagggggggggagatgatgggctgggaggggagatgggccgggggaggagaatcggcccatccaaaatcacagggaggtaaggtagacttttacagagaaaactgatttggatagaattggggagatttagggtttggattcgaattcaaatttgatattcgaactcgagggtttagggatgtatcaaggggaattcaaggagaagtcatgggaaagatttaaaaggaatacttgggtatttgttctcgggaacatagggtggggtcaaggaaaggattcgaggcgggatttgaataattctggattcgtagaagtatttggcgaggattcaaaggaagggattgactttcggatttaggtttcggaaacttgaattggaagaggagatttgaggcggaggattttgatttcgatgagagggaacaacgggattaaattgagatccttggcacaacttagactcgcacacaaagaacgaaaattttcgcaattaggattttgccgaattagtttttaacgcctcacgaaaagcggagcgttacagctccgggagcatggcgtcctgaagagcctgctggccgacgacgacgaagcggcccggttcttcagccgcatcggcgaaggctgcgccatcgactacgaccgccaggctttcgccgacctgtacgaggacttgcgccagtactgcaactcgcacttctactaccgctgcaggctggcgctattcgacctccggcggaactacttggggagtccgtggaagaccatctccctcgtggccgccgcctcatcctcttcctcaccgctacgcaaacttacttcaccgtgtttcctgccaaaaattgacagccatgagatgatgtttaagtgacgcaccaatttccccaaatcgatcgggccttcactttgtccatgcttttccagccagaaaagaaaacaatgcaaaagtaatatgatgcacgagactgctagctcctcatttcgttttatctccaggataaaataaaaacccatttcacataggagtatgaaactatcacgtacatactcaaatgttcgcacttttctttcttttttcttttttacatgaccaaaacattcacaataactggggtgaaaacgatcggaaacggtaggaaccggtagtatgtctttgaaaacgatgctcgatcagccggcaattaaccatatttatcatttaaactactcagtatcgatattaatatgatgcagaaagaaattagaaaaaacaaaatttaaaaatagcaaaaaagggtacggtcagaaacggtaccccttaaacggaaatggcgcccgatcgatcggaattttttccgtgaccgttttcacccctaacaataaccacaggagatggttattcctgtcttccaaacccaaaaaggaacaagactgaaaaatgcaaaacaatacacagttgtcttacatgctcggtcctcggatggccaagtagtccctcagcgcataaacttgaaatacaggattactagaccaacacaagtagtgctatgatgaaagctatgatccacttgttcctgtccatcctcctcagtcctcaccatggcccccatgatccttctacgtactcttcccgatgttgtcatccacgttatccaactgcaatgtcaagaaagacatgaatggcaaggtaaaaacaaggaggatacactcaggcctaaggccatgtacagtaatcaaacatgatttatttattttttttaatttggcgctttcattctggctccaggaagacaaggaaacatggtttaactgctgaacaacataatgctactgtgatctactccctccgtttcacaatgtaagtcattctagcattttccacattcatattgatgttaataaatctagacatatatatctatctagattcattatcatcaatacgaatatggaaaatgttagaatgacttacattgtgaaacgaaggaagtatatcatattgccgacttgctggttatataccatagcttatctaagttgctataagaaagaccttccaaaccgttgcctcacttctttaattctaccacagaagttatccccgttgaggcaccagtaatggctgtaatgtaagcgaggaatggaatagcccaactccccaaggcaaagcataagtgactatgtatacaaggacttgatgatttaactgcgaactgataattttctatctaccaaatcaaatagaaacatcaaatgaaaataaattgcaaaaataagtggaaggtgtccatgacgccatgaattggtacgtcagtaaaatacaggaaaagcatataaccgcaaggagcctatatataggagcaggtaagcatcaagcacgtacaatatctaatttatataggtgcagaaaaggcttataatacataaagagttcataaaaactcttgtacatgtatacatatttacctgtcaattaagactatatataatgaaaactatcatatccaatacagaacagatttatgtaggcatgatttcctttaataaattgcatacaaactgtatatcatctacctatctattatattattatattataaagataggtcgaaaaggattcgttttggaagccgagaaattattagattttggtggaccaaaataaaacagtgcgattgataatagagatatagatgagataattccttatataccactgaaaattggtcggttcctgtgtatgccactcaaaattggctcttcctctatatgccactggctcaaatttatatacccactcatgccactcccgtatgtttactgtgcattgattgttaactatggagtacaaagacgtatttgccctttcgagttttagacatgtatatgtgccaagtgctacatgtatacataacatgtacatggtcggcgcagcgggcgcggccggcagccgatggaggaggagcgcagcggagaggagggtcggcgcgatgagcggtggttggctgccagcgggggaggagcgcggcggagagaagggccggtgcgacgggcggcggttggtggccggcgagggaggagtgtggcggagaggagggccggcgcgacggtcgacggttggcgacggagaggagctaggcatcgggggcggcagcgtcagggaggaggtcacgatctacgagctgcgaccccccatccccttctcccttatccctctccttccccagccacgggcggcgagctgcgaccccatcccccatatccttctcccttctcccttctccctccctagccgtggcagaagatcgcggagcgtgtcgagaggaagaccggcgagctgcaaccccatcccccatcccccatccccttctcccctctcccttcctagccgtggccagcggtggtgaatacaacaatgacgccgccgccacagcctcgccctatcatgcccgtcggcgcacacttctcctcctcgcccgggtagtgctggctggcccctcgtgatgaacggctggtggcttccactccaaccggtagtgccgccgcagccaaggccacctcccaccgctggagtggcacccttcccaacgtcgtcgatggtgccccttcctctgcctgatgcaagaactattgaatatatgaatgattgcaggcacataatttttagccaaaggttatttcggtcatttatgccaaaaataaaactgacatgtgactagatcctaacgtcaatcaatgcacagtaaagagacggaagtggcatgatagagtggacaaatttgagccagtggcatgtagagaaagagtcaatttttagtagcatataagtgaactggccaattttcagtggcatataaggaattctaattcaatcaagtactatttattattgtatataaaatatagttacatatatgaaatagaaattaatagttgtataacaaataaaatttaattagaatatgcaaaattgtgcgggaaaatttccaagttgggatatcagttagtaaataaatgggatatgcaaaataaaaatggttagctcagacagggtcacagggaataactaatagtaagtagttacttacatatcattagcatgtatcagacgtcttgacctgctccgtcttggagtagcccacatgcacaggccatcctgttgaccgattccatcacccaaagccacacaaatgcacttcactgaagcttaggagaaacttccctcgaggggatgttctctcgtttgcttaaaaaccatttaaacggttatgaaaaattctggaaaaatttaacaatattcatacaacacatatatacaactctacaaaatcttaagtccaaactcaactcacacgtcgagatataaaaaagacaaattcagcatatgaatagtagcgtactgtttatatctaaatttgtcttttttgtttctcgatgtgtagatcgaatttgaatttgaattttggtggactagtaggtattattatactttacattgttaatttttttttagattttttcataactatttgcatcaaatttgaaagaaaaatgtatacgagggggatatcccctcgagagattagaatccactcccggagcttagaccaaaccaaatgcagcacacacatatgcatatgcatgctacgatacccggtctactctagcttccatgcatcacccgagccaccatgcacttgaagccttgaaccatagtgctcatgtgcattctttcctttcagttttcttcgccaataccaaggcttgcacatacaactcgtcaagctcgttacaaagacctctcacaagttgtcctccacctctcatccatataagaaccgaaaacagaatcggctaagacagatttggcagctagaggcgtaggcggcggtggtggctcaatcctattggatttgagaaatatatcgagtttggttgccaattcgtgaatgtgttctcgtgttcattgtgaatcttggggtcactaacaaattctggtatcagagcctcttgttccaaaactctctcgatccggttataaaattctagagaaggattgtgattgttcttcggatcaaatcccgcggaaaggcaacttgccttcttttggttgactagatttgcagtatgagcgagttggttaattctagagcgaccacgctatatcaccgagcaagcggcgcagatcacggtgcaggaagggaaggttgctttgcttctcaaaaccatggaggagtatgagaataggagggttgaagcggaagagagggcgcatgtggatttggtggacattaagaaggtgcttgaggtgaggctacccgtggtggagaagtggatgagtttggtctgcatatcaagcgctttagcagaaggttgaacaattggagaaaaacgtgtccaagcaagggagtgattcatttcagggtgatctgtcctcggcagcagcaaatccaatatcaccatggcttgcggggaagagagaaaacatgtttccttctcctgttcttgttcactttggtgggcattcagggtcggcggcaccagggccacggggcaggggcgcaggcgggaggtcggcgcggatggcggcgctcatggtggcacgcccggcgcagcggcgcgcactgcggcacgctcaggatggagaagaggtggaggggaggggggagggagtgctgtttgccgtcgtcgtggatctgggagctgcttcgttcacatcctcatgctcgacctcatcatctcctatggcgtcttcggccagaggaacgccgacttcgaggtggccgccgtggctgccaccaagaccgtcgacgacgagtcggtggagtccttcgtcagtcgtcacccagatgatgcacagccctttggtctttgaggagagagtgatggcggcagtgaagctaacgccgccggcaaggagggcgtccaggcgtggagctctctgtacttcccagacgatcccctcatcgtcgtcgccgatgtcgtcccccacgcctcccccgcactgccgctgtcccccacacctcccccatgcctcctcacgggccatgtgcgccgaccgccagcccacccttgcgcgccgctgcccgccttcgcctccgctgccagccgcccgcacgacctccgcgtccgccgccggccgcccgcgagacctccgcctgcatcctcggtggcgccgtggcctgtgctgctgaggagaaaatttacatttagccattctcagggtggggtttcgccagaatgccatcgccaaatgtggcttcattataatgccatcttcaaacgaccccatcttgccatactgccatttcaaccaattttgattatttgcaaatattttccactgttttgcttatttggtttgacccaaatgcgcttgcctcagccgtggggcctacttgccaggagcgtcttccacctccgtccgccaccatccttccctctctccggtgaactcatgccccaaattgatctccctcctcagttgctctcgccccaaattaaatgcaaaaatcagttcctctcgtcctcctcatcaattcccccaacaaatcccactcaaatcggcttaactccgtggtggattttgaagtccctcttcaatggcgagctccaccatagccagcgtcgatctctctccccgacgaggttggagcgggcaagcggctggacgccgtggagtggagctggctgcggctgcacgcacgagcaggttgcctcgacgaggagctccgccgcgagtcgctgcccacgtcgaggagctcatcggagaagggagtgacgccgtggcgcgcggtcaggtcgagcgcttggtgcgccacgccgccaagccgaaccgtcgtcctcgtccacgccgacgccttccccgtccccagtcgcgccgccgtgccgcctttcccgttcccggtcaccgtcgccaccgccggcaacctacgcgcgaacccggtgagctacgccgtcgagctggtgagggcgccgaagggcggcgtcggtgccatccccggcgtggccagctttctcatcccgtaccggttcggcgacggtcccgagctgcgccggcgccgcccaccatctgcaacgaagagagcaagaggtaggagaagagagatgagataggatccaagggtattttggtcatctcaacaagaaaaatcattaaactgagaagaaatggatgaaatggcattttaacgaaaccacttttgggagtgtcgttccagcgaaaccccgttttgacagtggcaaaatgtcaattttctcgctgctgaggggagggagaagagagagagatagaggtggggaactgataggtagggcccaccgacttttttattaaaagaattgctaactgaattatcccgtaggaccaaaaccagcgcggattgagacgggggattagttgtctttgtatagttggggatgaaaaatgtccggttttgtggtttatggggtaattcgtattttttttataaaaaaaatggtatggctaactatcgcagtgtaatactgttatatcggtcggctggtcgctgcatgactttagatttgcaacggcgtccggcacgaaacttgcgagaaagttaattacatctagtgacgctcacctcacctgaaaacctggaaagacaacgtgtgtcgttgcttaaattttctgtttgatcaactcgagaaatgcatgctcataaggatgtcaaccatcgaggacgaacgtggttagatggatcatgactgtgcaattgtgcatgttgtacatttctattctccaagttgcatgcatgacttattgggtcgttctttttaccccgtaagggtctctttgatttgtatgaaactagtgtggtggtccacgcagattacgcggctagcattattatattttctctcatataataacatatatgttttctcaatgtaatattcaaatatattaaaatgacaacataattttaattttgtactaactttacgaaactactaatgtgtaatattcatattgtattttatatacgtgttagttattaattatttttaatatcaaattttagttatttgtaaattatattcctatatggactttagactcgtctttcaatattttttatttaattccaaattttcgttatctgtaaattgtatttctaaatagactctacgctcttcttccaatattatttatttttaattctgaatttttattatttctaattgtatttctatgtggactctaaactcatctttcaatattctttaattttgaattttgaattttagttatttgtaaattgtaatatttttatatgaactgtaaactttacttttaattttattatgtttattctgaattttagttagttttaaattcctatatggactctatactctacttctaatattctttatttttaattccgaatttctattatttcttaattgtatttctatatggactctatactccacttctaatattccttatttttaatttccaatttttatatgaactccaactctacttttaattttattatgtttattccgaattttagttagttttaaattcctatatggactctatactctacttctaatatctactattataaaaattgaaaatgtttttgccggtattttggtaagttatccatgtatgagtcggttttaagttcgtttgcttttagaaatacatatccgtatttgagttggtttgtaagattgttcacttttggtaatacagaagaaataatataagaaatctgtttaaaaaaactcgcatgctaacatgagacgatcggacttctaactgcagccgattttctaaaaatatatatatccaagcgaactcccacggtgaatttcatcttaactaaaccatataacaataataagataaaaataggcttcacccgttgcaacgcacatgcatttttctagaattccttatttttaatactgaattcctattatttcttaattgtatttctaaggactctatactctccttctaatatttcttatttttaattctgaatctattaacttattaaaggaatagaaaaaggagcctccacgttcgctctcatggcctagaaattctcatattaatcggagaaaaaaaacagagtccatatagaaatacaatttagaaatagttgaaattcggagaaaatataatgatgctagccgcgcaatccatgctagtttctattatttcttaattgtatttctatatggactctctacttctaatattacttatttttaattccgaatttctattatttcttaattatatttctatatagactctagtctcctcttccattattccttatttttaattctgaattcctttttttttctgaattgtatttctatatggactctatactctacttctaatattccttgtttttaatttcgaatttctattatttcttaattatatttctatatggactctatagtctgcttctaatattccttatttttaattccaaatttctattatttcttaattgtatttctaaatgtactctagtcttctcttctaatattccttattttttaattccgaatttctattatttcttcattgtatttctatatggactctatactctacttctaatattccttgtttttaatttcgaatttctattattttttaattgtatttctatatggactctatactctacttctaatatttcttatttttaattctgaatttctattatttcttaattgtatttctgcatggactctagtctcatcttccaatatttcttatttttaattccaaatttcaactatttctaaattgtatttctatgtggactctatttttctttttctccgattaatatgagaatttctagaccgtgagagcgaacgtgaaggctccttttctattcctttaataagttaatagatttggaggatttcaattctattgaaaaaatttctatggaatgagtaatcctattgagatttggagaaaagttagcaggaggt

SEQ ID NO: 15976 - DNA, 870 bp, Oryza sativa
atcgtaccgtgatggaatatcttcatgagttcaatcgtctagctcgctatgctccagaagatgtgcgtactgacgaggaaaggcaggagaagtttttggaaggcttaaaggatgagctatcagttatgttgatctctcatgactatgaggattttcaggagttggttgacaaagcaattcgacttgaagacaagaagaacaggatggataaccgtaaaaggagaatgactgtattccaggaggcacaaggtagtagccagaggcagtgtatcaagccactccaaattggtgaacctttttccgctggtcaaggacagtcgcaaccgttgaacatcggtggtgagatcaaattagagactaatgatgaacttaacatcgagcaggctaatcagctggtgccagttcagcaggatcagtctcaagtgaataacagtagtggaagggagcagcaggtatgtttcaactgttacaagccaggccactttgcaagagagtgtccgaagccgaagcatcagcagctgcaaggtcaggtcaacaacattgttgtcacaggagccaatgcagtgccagttgcgtcttcaagagttgtgtcttcaagtgttacaactcagccaccagtttcaaggcagcagtagttttcttcaaagccttataataattatcggagttatggaataagatagactgcagtttacctatccctttttctttctagccgttccgaatctcgggacgagattctttgtaaggggggtagtttgtcacatcctgattttcgtttcaggatttataaattatttaataaattattaatagaatttatattaaatgttctttaatttacaagtgaagtaaaatgtgggaaataaa

SEQ ID NO: 15977 - DNA, 957 bp, Oryza sativa
gcaaacaggccataacaaaggaataggttcacaccacccagtgacattcgaaataaatgcacagttgaaataaatagagaatttaaatataggatcaacatgctcaaaggattgtgtttaggatctgtgtgacttgccttgcaataatcggtcttcaattaatcttcttgaatacttccggcgcactcgcgaaccttcgcaacgacggaaacgacaagctatcacgcaaaacgaggaaaaagactaataaaaaccaaataaacaatacataaaaagtaaacaaacatgtagatcatatttttagatgaattatgagacttgaacggcctcattctgacttcaaatgaatttattaagaattttacaagattaaatctatttaaagcccatttaaaaagaattaaataaatttaattcaatttatggacaattttaatatgtagatctttattttacacaacttttgcaacttgaaccacattaaactgagttaagatgaattagatatgaatttttaaagattaaatcggattaaaacctttaaactgattttaattgaattatgacgcaataatgaattatttttgaaaaggaaaagaaggattattgcgtccgcggctagggtttcggtggaccgggcgcacgggcggcggttcacgcgaacggacggccgagatcgaaccgatccaagatggacggccgagatcgatcgggtccacggcggctcacggcagacggggacgatgacgtcagcgatgacgtcaccaccggcggctcgggctcgcatgctcgccggcgaacgacggcgcggcgacgcgaacggagagcaccaggacgtagaggacgacgcggcgaactcaccggtgaccaaaacggcggcggaagaccaacggacggcggcggcgacgaggaggaagcggcgaagctcttcgggtcgacgacggcgacggcgctccg

SEQ ID NO: 15978 - DNA, 1416 bp, Oryza sativa
tattttttgtgctcttggaattgtaatgccaccgggcatgacagtgttgaccccggtaaagaaatcacaactacacaactacataattgattttcgtggacgaggccaacctccagcctctaggctgaccataacatcatccacttgcgataatatcgatcccgaaggaaaacaagatccacatgcaaaaaatcaattttctcatgcgagccaacttaataggccctccagcgaaaataacttatttcacaagcgggcctgttaagtggcatgcctatgccactagcccaccaggccgacgactgtcgacgtctgatatcgcgattccggtatttgcatagtatggggatcgttggtactagcatatatatatatgcgagactgaggtaaaagagacggagatgaggatttttatacaggttcgggcccctgaattatcaggtaatagccctacatcctgttggccgaagccggtcgttgctcttattcaccataatcaaactagtacaatatttggggtagcctatctaactattgtcgacatggcggtctgaaggtctaactcatagtcgacaacagggtagtctttctcctcgaatccgtgcccggcgatatcagagacagtgcattcgtctctcctgacagtatccggagacattgtaggggactagccgtgcttatccctgaagtcgatatccggcatcttgttttggcgtatgttggcttgtatgttatagcttctgttgttccgtagattatggtgggtgttgattgtgtcttcgtatcccctctcctcctagggggccatctatttatacccataggtgtccccttgtccaagtagaactagggaaaccaatatggatacaatccgagtagtccttgtcgtttccatgtagaactaactctggttgtctttccttatccggaactccctcgatgtcagtttccgtataagacatggtatgtggtggatcctgccgagatttagtcaactactattaggtatgtggtatccataaccctgacagtagcccccgacttcaatgcaaataaacgaattcatattctcaaccgcagaccctggagtaactgttgtcgtgctcacgtgaccattcttggtgagtaacgttagacttcccttatcagcctcgtgcgggcacctatagggtttgtctgagtcaatctccgatgtcaaccaagaaagtacagagcatacaactaagtctcatatcttgctgtaatcgagaatttggattgaagtcaagaaattttatcttggcgggtacaccatctcttcaatccgtattccttgtcgagatccaccaaccgttctcgagtgatcgagaaggtgtagaatatgcgatgaatccttgtcaacatttgtcgtactcgccttagtcgatcttggtgtag

SEQ ID NO: 15979 - DNA, 4678 bp, Oryza sativa
cgatattgtgtacctgatatcaactttgttggagtagaagtaatgggagtatcgctacacctctggttgaaagccagttgtagccccaactcgactacttgaagtaaaagtagtgggagaatcgctacaccactggtcgaggaccaggtagtagtcgtaactcaaccacataaagtggaaatagtgggagaatcgctacaccgctggtcgaggaccaggtagtagtctaaactcgaccacttaaagtggaaatagggggagaatcgctacaccgctggtcgaggaccaggtagtagtctaaactcgaccacttaaagtggaaatagtgggagaatcgctacatcgctggtcgaggaccaggtagtagtctaaactcaaccacttaaagtggagatagtgggagaattgctacaccgctggtcgaggactaggtagtagtcgtaactcgaccaccagaaataaggtgagagagatcactacgttctactggtttgagaactaggagtaggagtctcttaatcacctataggggcgctaaagttggtttattacatgtgcatctcatgtggccagcatgattcacataaccaacttatagcatatccggatgtccgctcgcaatcatgttggggatcaagccgacaacgtttgcgagaatttatccgttaacaaccttttctcgaatagcccagccatggtcggcgctatgagataggtcgtcggtcttcgttggcaggttaggtgcgataactccacatttgtcgagaatgttctcgataatggggtgtactcgaccacagcttactcgagtgctcaattgttcctgaaaaatattttctagaaggcaagacatatagcggataatatcgagtatgtactcaaaaaactgcatggatcttctagcattatcaggatataacgagcagattaaacatcaggcattatgtaaaccgtaaacaagcatgattcatacagaagagaacaaagtgagcccccagcgttagaccgtagttggcctaacatcggggacacttgcacaatagatattgtataaaaaacatgctctaggtaaacataataaattatagatctgataatgctgtatgatctgaataggtacgataaattgcatataacatattgcgtaccttcgtagatacatgccggatgtatctacgaaattagtagattaatttaaaaaaccaatctaccaattaccttgttgcgtactcgttcgacatcatacgttctgacatcttttggtacatcttaaggcttggtcgatctcaagagatcgagttgttgatgatgatggttccgatctcgtcgggagacatactctggtcgggttaaatctccccacagccgaagtcgtcgagtagtttgttttcggagaatccatctcttgaacccatctcgtcgaaaccctgaagcaccaaaatccccctacctggcgcgccactgtcgacgtttgatgtcgcgattctggtatttgcatagtatggggatcgttggtactaggatatatgcgagactgaggtaaaagagacggagacgaggatttttatataggttcgagcccctgaattgtcaggtaatagccctacatcctattggatggagccggtcgttgctcttattcaccataatcacaccagtacaatatttggggtagcctatctaactattgtcgacatggcggtctgaaggtctgactcgtagtcgacaacagggtattcttccttctcgaatccgtgcccggcgagatcagagacagcgccttcgtctctcctgacagtatccgagacactgtaggggactagccgtgcttatccctgaagtcgatatccggcattttgtcttggcgtatgttggcttgtatgttgtggcttctgttgttccatagattatggtgggtgttgattgtgtcttcgtatcccctctcctcctagggggccttgtatttatacccataggtgtccccttgtccaaatagaactaggaaaaccaatatgaatacaatccgatcgagtagtccttgtcgtttccatgtagaactctggttgtctttccttatccggaactccctcaaggtcagtttccgtataagacatggtatgtggtgggtcctgccgagatttagtaaactactattaggtatgtggtatccataacgctgacaacaacccactctcctctttcccttaaaaatatcttatcctctcctctcttctctcatcctctccgctcctcaccccaccccactccacctcctctccacttcacagtccgacgtcttctcctctcctcaccccacttacctcctctccacttcacaggccgacaaaggtggtggcggcagcatcgggcgctcggtaggtggcaaaggcggttgtgttgacggctacctcatgtgggaagaggagcggcgactgtggctttgttggcccgtccacgcatggatccggtgggccaggctcttcccctcgacatggatcccgccacctctcccgccccctccctcgtacatggatctggtggcacacatcaatggcagggaggggtggcgacgactacggcggctgcagtgactatgtctggggtgaatgggaagatccggcggactctccccttgacgtgcagatcctgctgactctcctccctcacgcatggatccggtggacatgggctctcctcctccacgccagcgtgcggatccgccaatggcagcaataggaggctggaaggatagggagggcatcggcaacgacgacggtcaccggatatggagtgatgatggcagcggccgctgagcaggggagctgcatccgcttcggaattttttctttggaattttttttcagaaaattctttttgccggcggatgtcctaacaagcccgcttgcgaaaattcctttttacacgcggtttgtgcttcttgtctgtgaaaattctgatttttacagacaccttggaggtaagtggtcgctacctccgcctacgaaatacattcttgctgtatgtaaaaactgttttttgtagttgtgaatagatggaaacaaggaatcatcatatgttcccgaatgtgggagttttgtttttgtgggagaggaaaaccgttggggaaaccttcacagctgcaaggagctcctggtgcaaggaatcactgggagaatgagtttagtttaatttactcgtacgctttggttacatcaatgttacattaaactatggttcccccatcgttgcacgagtctaattcatctttgaggtaccatgaatatatcgacaggttggcctaaatcatttcttttgtacaactttagtgaccgcccgttactttttattagagtgtcatacgacagcttagaattattccggtggaacctttttagaaaaaaaaatcgaagtctcaaataataggtcgattaattcaattgaaccaatggtcggatgttttattattttctcttagaatttctctgtttttttaaaaaaatatgttttttttaaaaaaacttaagaggtgatacgttcacgtggcagcttaggagcggtccgatggatatttaatttttatgactatttggatgatataaaaagggccagaatatagactagatggttttttttaatcaaaacatatataacatacatagttcttaaattgttcgtatagttgctaggaatagaattgttcagatgaattcgaaattgaactgaatacgtggtttagttgttattgttttttaaagtaaactagtaaggtagtccgcgtaatcgcgcgggcatgcatcctagactgtatttgaaaaacttatacaggtgaaatattaattaccgaaacttataaaagatcatttggtttgtctagattatttgtgcacatttagaaaaaataccttagtaattggaatattttctctaattaaaggcgattttttgatgcagtggctaggactattcatatttcagttagttattctacttttgtagtgtagtttaatttagctatacatgtttcaaaacatgtcacggtgtgacttgtgttgttgaatttttctttttcttttggcaaattgaatatgtaatttttatttctatactattgatttaatttagctatacatgtttgtagaaggattcataatgacataatatttgttgtcaaaattttaaggtatttagaagcgatgtaaagtgcacgagtggactgtgccccaatgctataattcttatatagcaaaatatgggcatatgtatcttacattgttagtttaattataaagagagaccaattagatagaaatcaactgtgtagcttataaaaaaactatagttgtttcaatatttattgtttatcttctagttcagtagctacaaaataaggaaggggatagtagtgtttttttgcatgtgagagggaggaggaggtggagggaatttatttttctaaataatttaagtgaaaaccgattataatgtttctttttttcctcaaaatttcttttattgtctttataacttttaagacatgacacatgttgacttaatgttttgcaacaatagatctaattgatgaaaataataaatccatcgagttaaaatgaattgtcttctaatttttaagacgtaatacattattactttgctctatgggatgtttaatcaatttttg

SEQ ID NO: 15980 - DNA, 6320 bp, Oryza sativa
cgtcacgttgtatcatatgagcatttatatgagcatcatgcggtggcttagaatcgtttataggaagtttaatggacatttaccgttgatatattttagcgacacatatttgttgaattatttaaggtgacataatatatgttatcaactattttataattaaaaaatatttcattgttatattttgttgccatgtaaagaatatggcccatagaagaatatggatcttgaattatttatttattaattataaataaaataataataaaaaaataagacatgtaactattgaaattggaagattagaaaagggaagagaatatgagaggagggagtacgtatcgtacggtactaattggaggagatgaacgtaccagaggaggggaggtggggactggtactgtggagagggggattttatttattttaattactaaatctaatggttaaaaatattggacccaccaattcaaaggaaaatcaacggttgcattttagagtgccacttgatggtttagaaacatttgtaggagcgacatatggtagtttagaagcgtgtgtagaaagtttaatggacttttagtatgcaataggtagatttattttgaataatcaactactacctctgtctcaaaatagtggtcgctttgacgtttgactaatcgtcttatttaaaaaattggtgtaaatataaaaaaagataagtcatacttaaaatgattttgataataaagcaaatcataaataaaataaacaataatcctataatttttaataagacaaatgttcaaaagttacaaacaaaaactcaaaacgataagtattttgggatggaggtagtaccgtacttatgcttacttaagagttaagactcgcgatggagctattagcaggcacgggatatcatggagggattaacttttttttccacaaatctaatataagggtgtaaaaataacaagtccacgggtaaaaagtgagggccaaatgtttcctttttctttagaatttctataaacattctataatagtttataatttattagagcatcacttaactacgttcaataataatagatatactattatcctatatcagtttttctacaagttttttacaatcatatttcggtataaatcgatgcatgttttttttttaataatgaccctttttcttatgtggcaagcaacagcagatgctcaaggggaactggggtttacttgtttgggacaaagcctatcgcggtttcatgatagttttctgaaccagctggaataagaagatagctagctatgtctgaaataagttgagctcaacatagcttgtttgattgtttcagtgtcaattagaaccaagtgcatactgggtgtgtttaagaagttgggagaagagaatattgagagatgcgcaaaagataaaccattaacacaaaattattgaatatattaattattttaaacttaaaaaaatagattaatatgattgtttttataaacactaatgcgcgaagaaaagagctatttcttaatcttttctagcagggacgattgcagctagtagcgcttggtggtagtatatatgtaaataattggctcgctttgcagtgttcatccaacgtggaggcgacgacgaagactcggggtcagtcgttgggcgtgtgggctgagtcagtcaacacaccattgaggagacaaatatccgggccgggttttcgttgctatttattaatcatttgtactattagaaaagctattcagctattcagcattcaatttaagttcattcgaccgaaaagaacagtactagttggaggccgtcagtcagcgaatattaatcattattactagatgtggatgcatgaactgcaaagaggaaaaaatggctcctcgatgatacccattaccaaatccgaaagcaatggatcaccaagtccgaaagcaacggacgaagggcctgtttggttcattgaatggttgctttactttgccaaactaaatcaaaattgaaacgaacgaagcttagtcaaaaatctggcagcatgctgttgtatttgtggtaccaaaatagtttgaccacacttatgatacatgtactccatctatcccattttgatcatccctaagatttttttaggtcttcccaaaatgaatatcatgtaatatgtgtctcttcatttatttgtgtaaaaagtaaatacgcatcattgaatgtgttgcatgcacctaactaggattaatttctattggtgcagtgacttgcaatatttaaaacattagcaatccacgggacacgaatcgatgaagcatattaaccgataagaattaatttgagaataatgaatatttggtgtcattggttttggtggatcgatggcagaggatgcggacccggatggatggagccttttggttaggagatgagtctatgcgacttaggatatagaagtagaaatgtttggcacagaaatgtttggcacaatacaagtgtggcatgtctagcattgcccacatttatatatatgttaataaatctaggcacacatatatgtttagattcattaacatatatgaatatgggcaatgctataaagtctatttcaatgtatgttttaaaatttataccgtaaattttaattattacggtcataataaattcttacatgtccactcagcttcatgctcgtgtagtatactactacgaaaaccatctttcatggtggccattttagcttttcgctggcggaatttggagccgccacaaagcaaaggccagtgaaggtctaagattttcgctggcggtttcgttccgcttgtgaaaatctacacacggttgcggtccgcttgtgaaaatcgattttcgcaagcggacaaacgatttttgctggcggttgagtgtcgcttgcgaaaacccattttctctggcggttacctaaagagaaccgccaatgaaaatcaacccaccccgccaaaaattccctaccccaaattcaaaattccccacccggccaaattcaaaacaatccatatttagaaattgacataaacatcattcaaacacaataatccagagcatcacaaatacgtacataatattggcatcaatccaaatacaacattgacatcatcaacagaacaaacacacagattaacctaacaaacatccttacaaaccaaaacacacaaaaacacacaaagagaaccaccgccgaagccatcgggacgagccaccgtcgctgccatctaccggtcgcggaaccaaaacacacaaaaacacgcttgccggcagcatcgcggtcatcgtcgtcaccacggttgcggtcgttgtcgtcagctccaccactggggatgaaccgctgctgtcgccgccatccgctgccgaggacgagccgccaccatccgacgccggggacgagccgccgccgcccgcgccgcgtgctccccgtgccaccaccggggcagatccacgcgtcctccccgccgccgcctctgttctgccgccggcggtggcctcctcccctcagacagatgggagaggaggcgatgggagggcaggggcggcgcggggagtcgccggtcgtcgccgccagagccgccgccgttgccgtcgctggtcgacgcccccagagccggcgccgatcgtcgccgctagagccgccacctccgtcgcaggtggagaggccgagagggaggagagagagaagaggagtggataagaagaggaggggatgtgtggtgttttaatgtggagaagatgatgaggatgggtaggtgggtgttttaatgtgacagatttttttggttggattttcactggtggttctgtttattgccctccatgaaaaattggaccgccagcgaaaattatctattttcgttgacggcgcacctaattgaccaccagcaaaaatagacatattttcgctagcggccacattagatgggccgccagtgaaaactcattttcactggtggtcagtgcccctcaccccctcgttacaagtttgctggctgttttcacattttttcgccagcgaaaataatagaccaacgctatgaaaaatcatttttctagtagtggtagtttgttcttcgttcctcatattttgcacattcaaccatgtttgttctcatgcactacactacataaacgatttttacaaaccgctaaaacacattttcacaaatggctagacgacctgccaagaggcgtttgcgaaaatagtattttatcaaatgggtggcacaactgcgtgcaaaatccgattttcacgggcggtcaagttaagccactcacctaaaaaaaacccacaaaattcaaaacctagcttcgattcaccctagccgcttccatcatcattgatccagtccgccgccgccgccgccgccatcatcgttgctgagaccccaccacactcaaggccagcggcggaggatccacccctccaagggtcagggctgctggatcgtcgcacccggagcactcgatgttgctaccgctttcatcacctcgcgtagcacctgacgctcctgccgccttcaccacctcctagagcgcatgccactgtcgcatccttcgccacctcctagagtggaggagaggagataaggctatgagggaggagaggaggggaaaggaggaggggagacaggagaggataggacttagactttttaagtgagagaagggtgggcagctgacctagtgggtccgccgacgaaaacatttttattttcatagacggacctattaagagacccacatacgaaaattgattttgcattcaggtcttgtcttccttgggaccaacattactgtagatggataatgtcacggttcacctgcaggcttagtagattcattataaaaacaattatatttttagacggagttagttctgatgaggacatcactccttcggacacacacaacaatccaccaccggtcattcaaggaccaattccaagagctcacgcgtgacaattgaatttagaggtgaatacgttcctatattcttctttgtatgattttgagaatagattgctacctaatgattatattatgattaggagtcacttagagagggacttagaggcgtggaggatcggcaaaggcgtccaagtcaagatggaggcccaaaccaagtcgacttcgagcacgtttcggagtccaggaccagtctgcactaaaacgggtgcccaggtcgcatacgtgctcggatttatacgttctttatatagatggaaaactaagaagaaaacctttccaatgtttctggtcccatgtccaaattctttccgagtcaacggaaatggaccgaacaaattaacgtccaaattctgttccagtgctgcgtcaccgtatttggacctttgagccgtgtatcgtgttggaacccattagggttgcgtcaagggttgtttgcacaaccctaaactctatatatcaatacccaccgtcacctttacagtttgggttttgcttagattattcagtcaagaactgtttcgcagctagatcggtttgtaagaccccaacttgtgagtttaatcattcatctgcaattttggttgtattcttccttgtttttgtttgtgttctttgatttgtaaacaggaattagccttctcagcgagatcaactacgtttcggcacggttgataactagaggtgacgtggtgctgcgattgtggggctcaagggcgtgttagttcagaagctggatctatttgtgtcgcgactccgcttaaatcaactgtttatcagaacctttcagaagattgggaactctggtccacattaagtaaacattagtaagatgtaatattctacgaggaaaggaaaacaaatatggatgtgatcaccacagtgaagacattaacgtagtgtagtattgacctgcgcgctgttttttattcgtgatttgttaatcatatatacttgctaaacatatataattagctgcagattaaacacgatctgaatgtaacatgctgttacctaatatatgtcgtgatacttccaagttgcaacagccagtaccttctttgagtggttaatgccgaagaggtacaaaaccatcacaccacacgtacgattggatttgtactgttaaatttaaacgtgaaaaactgaaaattatacttgggagttgttcaaagatctttgatacttcatccatccaaaataagttgatatagtacgggatatgacatattttagtcctacaaatctgatcaggtggaaacctccactgctgcacaaaccctttgtagccccggtttgcaacaacctttaatccctgatagcaaacggggctacg

SEQ ID NO: 15981 - DNA, 3546 bp, Oryza sativa
  unsure (1)..(3546): unsure at all n locations
cagaggccaaatcgagggaggcggcggggtaggtcctgccgtggaggtcgaatccccggaggggaacgagccggcgaggtgggattcggccggccgcatacacgcgcctccaagtcaaaccctcatctctcggttgctgcgaaatctctccaatgcgtctcataatctccgtcctgaccggctcctgagaaatggttgaaatccggtataaagtatggagaatttcagcattccaatctaatcctgcatgacgattctcatttctcaagtcgtacaatagaaattttggaaatgtgctagtcggagatgatttcacctgtgttacttgtattgcttgtagcagttatccctgcacataactctattgatggttaataagatataagctcttcttctagtttcaattacacagtcatgctattgatcttcctatgtactgttcctttgatgaatgatcagtatgtttggcttctttcagtccactttacaggaaaaagacttgatggcacttggtttgcatccaccagagaagatggtgtgcctctgacttttatattaggacaaggtataactgtacaccctgaatttaccttttagtaattgccgggttaataaatccataacacacacacacaccactcgatcagaaccaacggattcaaaactatgtaatgttcatggtactttctatttaaccaacctatggtattcttaatcttcttagatattgtaatggctgtgaaaccttgtgagttgtgatcacaaaacttatgattaaacaccagtatgccactaaccaggaatcttagggttttctacatccgtcgccacaaaaccattgattttgtgtaatttactcaaacagtactcccagaaactattatggaaaatgcatgtttagcacatgggccaagtataatttatttttttccttttagtttgtgataaatatttaaattgcttcacgaacttatttatattttttaatgagtaaatttcatagaactccacctattgtggtccaagttgcacaaaaccacaaggattttggcatttggcacataacttgtattatggttctaaagtttcataaaaccacactgttaaccaatttgacatattcctatatcaaattttataaaagctttacttatatcaacgtaatatgtattatattatagataaagaattcataaatttgggatgtgattgtagaactcaaaagtgtggtagatgaaagttaaaataatgaatagtgtggttttgaaaactttatgaccataatacctagggttacttgaaatttactcttttttaatccatcatgaaactgtcatgtatgtagttttattgatcttaatctgatcatctagtcatatattaattgttttctttatatggatttgttgatttctgtgttgtataaacttctccacggacctatatgatcaaacagcgggatttgtgtcaagactcttgttaaggactgaatcttttaaagcaaaagtgactgttaattatttggtgtctgacatttttgtttcaagccataaaagattctagtagaatgcagtagataactagattacatggctcatctttcatgtgtctttgtttttcaaaaaaatctggctccttgggtgtttgtactactgtaaccatacttttctcaaaaacgagccacactccaatgaaataaaactaaatgctgcttatagagaatgtgatgcgaggcttcagtatggctgttagctcaatgcaagcaggggagaaagctgtgttcaccatccctccagaattagcaggcaccaagtctcggtgtccagttgatatcccagggaatattgcccccaatgaagcactgcggtttgatattgagctcatctctcttgtcaccataactgacatcctcgatgatgaaggcatactgaaaaagatcatcaagcgtggactggggagcgataagccttgtgatttggatgaagcacttggtatgcaatactacattagttactccctgannnnnntgttttctttagttttgaatttgagaaattaattgtgccaatatttttccattatttcttcgatactgcaacagtgcccgtgctgtgagttcattgagctaatacttttacattttccttttccttttgtagtgaactacaatgcttgcctggaggatgggatgtcagtgtccatgtctgaaggtattgagttcaaccttgcggaaggtaagaatatttttcctttaccatgattgaatacacttaactatagaagtattattttactatgtcagtctaatagaattgtaaaatccaggcttcttttgtcctgcatttgcacgtgctgtggagactatgacagaaggagaggaagctgttctcattgttaaacctgaatgtaagctcccctccttgtatgtaaccttctagtagttgagtaaaattaacaatttgtgtcttctcatgcaacttatatcttgtaataaattcaatagtcaaagcagatagtggcaactaaatagtcaacaatcatcatctcaaatcttcctttctttgcgtgcatgcatgcattaggaatatttacaagcgtgtctttccatgtgtcattttttgaagaatacactcatcaattaatcttgtagttaatatgtattcgttggtgctctctttctcttgatccctagatggttttggtgaacggggtagaccatccataggggatgaagccggtgtgccacctgatgcaactctctatgtgtaccttcaattgatgtcatggaaaacagtgaggcacattggagagaatgggacaatcctcaagaaaaccctttgtagaggaaatttggaaggacagcagacagagaatgaagcagtggtcggaggtaccttcaagttagctcctaatctgaaattctgaagaacatatgtaggcatatagctcattacctcttgcttgcatatcaatattcctaatgttcgtttgcaatggcagttcgactgattggtaaactgcaagatggggctgtatttgatcagaggggccacgaaggagatgagccgttcaagttcatggttgacgaaggttgaatttctacaactcgactaactaaaacttgcttgtttctgataagtgtcagctattacttttgaaatgcagagcaggttagcgaaggcctagaggaagctgttcttacaatgcgggagggagaggtctccttgttcaccattcccccccatcgtgtgcaggatcaacttttggttgtccctgttggctcttccgtgacctacgaaatcgagcttgtctcagttgtaaatgtgcgtatatcacttgacttagttgccatgatgtgaaaaattctatattgttaatgcgtgtatgcagcttgagttagtttccatgatttgaaaatatagaaccaatcttttggaaactctacatgacatattggatctgaattaaatttaggacaagcctccccggctcatgagtcaagcagagaccatcgaagctgcagctgaaaaggaaaaggagggagac

SEQ ID NO: 15982 - DNA, 9183 bp, Oryza sativa
tgcatgccacaaatgttcagactgaatctgaaaatctgtttattttgtttgaaggccaggcagatcatactcctgcgctttggacgaggagaaacagatgaagaaattaaacaaatgttgatttcccttaccttcaaagctgctgagtgcgcgaatcagcttcaacgctatgaacaagcataccaccgctatcgtgaggtgcttctattaacaagagaatattcctttcccaaatgttacatggtccaattggcattcattgggcgctttttgccactgttaatcatacgctagcctcctgtacacacctatgagcttattttttacaatcaaaacagatattggagtatgaccctggaaatgtgaaagcacgggaaatgacagggcgggcattccctgaagcatctcttggaatagacactgccgcaatgcataggggcttggatcaggtacttttttttattgttgttgtatatcttttatacaaaccgctaaataatagaggactgctatataccggaatcccgttcataaacgggatgataccggttaggtatcagatcctgatacctaactggtatcatgcgattctaccacgtgttaggtgatacttgtgaggtatcagatgatacttattaggtatcatgcgattcttaccacgtagaaggtgatacctgtgagatatcaggtcctgatacctaaccggtatcgggtgatacttatcagatatcatgtgattctaccaggtattaggtgaaacttgcgaggtatcagatgatacctatcaggtatcatgcgattcttaccacgtagaaggtgacttgcgaggtatcaggtcctaatacctaaccggtatagggtgatacttataaggtatcatgcgattctaccacatatcaggtgatacttgcgaggtatcagatgatcctcgtcgtctccactgcaccgcatgcccattcctcccccctccccgcggtgctccaccaccagcaatgcatcggcaccccagtagcaggaggaaggatcccttggagtacaaggagtacatcgtcctcctgaggctgtggccggacgccgccaccgctggcatggacgacgacggcgcgcagcggagctagtacatgcccttcctccctggcaacaccaccgccggcggcaagccgcggctagttcgctcgtacaagcacgtcgttgacggcttcacagttgtcgctgtgtccaaggagcctgatttccgacgctgcttccaggacggcatcgcttgcttgcattgttggtttaagcaggaaggaggatggcaaccttgctggatccggccatggcgacaacgcgctgcgcgcggcggcgagagcacccgaggcggagctgcggcggatgcgtcggggcagcggcgttggcgacgcgccgcctgcgtggcggagatcggtgaggtgggaggacgcgagggatatgacggcgccgccattctctctccaatccaatcccttcatctcgtgctgcagggtggatgacacggtggacgaaaggggatcctgtcccgtcccgacgggatcctgttgtttagcatttctgaaataataacctttcggttaataatgttatcctcaaaacatacttttcgccgggccagcaaagacgccagtcgaaatcttattagagtaagtttaatagtatagccaactattagctccaaatcatctatagtcgatttaatagccaatccatacaatagttatctataaacatgttacactattaatatatggtcctgcctatcatatatacattgtgtcttggaatccgtgctgtagctggctacagatctatagcccactgctctcctctcctcttttatctcctcggtatgtgtttagatatgtgtttatagctggcttgtacctgctcttaagagagagagagagaaggggggggcaatagggtgttggcctgggtacaaacgtcgaccctccggcgacatgctagagctcaacaacacaaattttacaccaattggtggatcaatggaaaatatagccctcaaaacgcactgttatgctaaaatggggttgggcccttcagggcagaaacaggccacaccacagggttgggctcctaggttgagctagttgttcgaacggttttaaaaaacagaaatttgctgtcagcaaaacacttgagaggatggtatccatatatgcttacatctacttatcacctatcgtagccgtttgaccgaaagaagacatgctctttctcccatgtttcgtggcatgtctagtaggtttgtacgatgaaacgtttctctcctgactcctaacgttttttagcgatgaaacggttccctcccttatttagcccatatccaaagcccaatctcctgacgtgctggtctgctctctcgttggcacgcttgcatagccaaccaaagcactttctttctaattatatattaagcaattttagtcctaattgtatcttatatagtaattgtacttagcgctcatttatcatgtggcaggttaagcaaactactcatacatatatgttccttgcaccttggacagggatagcatcaaccctagttggaagtagattctaatggccacaatcagaattggatgcagacaaagttcatatatgaaccaatgtcaaacagggtttgcatatgtttagatacatagaatttctagagacaaacttaaagccaaagtatagtactgcttagcacattaattgatgtcacatgctgatgaagcagaacttgttcaaacattccactcttcagattagatagtaaatttagttcgatcagttagaaaaaatcatgagatagaaggtccaaaatatcttcttttcccttcagattagatagtaaatttagttagattgaatactaactgatagatcgtgctaacataatctcaagtatagatataatcctcaagttagatgcaaagaggttaattgggctttagggcccatgagcgctccggagtcctcactaccgtgtgtgcgtgcgccgtgcgttcgcattaggtttccctgccgtccgcgccgttgcgtttgatcgtacaaaaatcggaattaaaaatcgtatgcatagcattttcctatcggtatgtattattcaatggcgttgtccaatttatgatcgcacacaacgccactttggatttttcggattactctacaatttaaatacttatatttgttttggacgtgtggaagtttaagcagactgctcacatttttcttttcctttaggtgaactactacgtacatgcaactcaataaaatgttctttttgttttctgaacttgacgctttgaaatacttgtagctcaccatgtgattgaggtatgttccaaggacaggaactgccgaactgaaacgagcaatgctataacttcaatcaggcagtcattccatcagaagcattcaatgaaaagcccaaaatgatgatttttttttcttgtgcagccatttaggccgaaagaagagtttcgcgtgtgcggcggctacatgaccccggagttctctgagatgagactgaagcaagggcataaataccatggaagtataaatatttttgtccctcctatcccaagaccagagaccaatgcaaatcaagctgttccagctgctcctacaggccacaggctcacacacagccctactacacctccaggtccaaataatgagaaaagaaacagaagcagtcgtgttccagtcgctgccaggaaggggctagcttcttgcttcagatgcatctcttcagattgtaactgaagacatgttccctgaaagcaataaagaaaaaaaatcttgaccagcaacagggctgtactaacactagtttattttttttcgaactaataatttaacttaggtcgaaattaatgacgattctatggacacaacccaacggtggagatggcctgaagaatagaacgaaacacccaaaatttcatacatgaatatgttccctaggttcataaggaacaaatatttctgatgtaaaatcagtaaggaaattcagtgcaaaatactagtaggcgtctagttgcgtcaagaacataagaaaacgttgttttgggttggagagatgttcagcaaacccggttgaaagagatgctaagtagaggaagaggtagaaattaggcaaaattggttatatagcattgaaagttcacgcttttaggccccctttgaatcgcagggtagaaaaaacggaggaataggaaaaacacatgattctgacaggaattgaagtgtaaaacagaggattgcaaaacacaggaaaaatacaggaattgtcgtttgattggagcgcaggaaaaacacaggaatcggatgagagagatagactcaaaggaaattttccaagaggttggagctcttgctaaatttcctccaaaatctacatgcaatgtgccattccataggaatttcataggatttggaaagcttcaatcctttgaatcaaagggccaaatagaaaattttcctatatgatttgaatcctatgaaattcctacataaatcctttgattcaaaggaggccttaagtttatagcaccgaaagataccggttcactttaataacacctaaagttcaccctgttcccatgcatttttaacgcttccgtcaattctcggtcgtgcctttgtgcctggaatttttgagaatgtttcctagtgtttttgtgcctgctctcagtttgtgctagtacctggtcctggccagtcttttactcttttagtctctcgcttgatttgttttgattttcctaactaaaacaacattcttctaggtacggaggaagtactatttctatgttctcaagtgtttaactgatagccaaagatttaaaaggtttatccaaaatccagaggcagtgtttggttaaagggatagggaaatgatttcccacccaccaaaagacatatttaaatcctaaccattcattctcccttttccatttaattctaacccttcattcatttcccaatctcaatcccactcctcatttcccattatccaaacacacccaaagagtactcacaagttacaaatcttttatgtaactagcgaggaggatggggcgcgacgttgtggggcggcgcgagcgcggcgtgggtggggggcaccgatattttttcactaattgcggatcgcgatccggaggagtcgtgcgatggtggcgcggaggaggagcacgatcctgcagcgtccggcgataacccgtcccgcgcgatctgttgctagcgcggtggaacagccgttggtagggagaagagggatgcgggagcaggtggtgggggcaccgtgggaggagccacccaatgacgacgacctagagccgacggcgacgtggagtaggcgtcggcgacgggggcagccagggaggaggaggagtaggcgtcggcggcggggaggaggaggagtaggagtcggcctggcagggggatctggagtgggctcgacgggaggggattcggcgttggttgcgggtgggtggaggattcagcgtcggtggtgggtgggcggaggagtaggcgttggtggtgggtgatggggaggaggaggacacggcggcggtggacagaacggcgcgaccggtgttggggacagtgtctagggttttggagtccgccgcgaggagtcctccctgcgccagcggtggtttgacggaggcggtggcagtggggactggatggagtgggggaatggggtggagggaacgggcgacgaagcgggcacctcccagcgctggcgacgacgacagcgactgcggatgccctccccgcgccagcagaggagattagcaacgtcgtcggttggatcggaagccggagtgcgccacgcagagtccttgcgccagcggcgggggactggacgacgtgggggaatggggcagggagcggcggagacgagcggtgtcaacatttgtggtgtagggggtgcggcggagacgagcgcgtcggtggttggtgatgggggcgaggtaggaggagcgatggagtgatgggggcagacgcataggaggggagcgcgtgggatatcggaagcgttggatctcacgatcctacgcttagtattacgtgtgtatgtcagggtgagtcactgccaccactatggactttttaagtagtactccctctgttttagcttataagacgttttgattttggtcaaagtcaaattatttcatgtttgactaagtttatagataaatatactaatatttataatagtatattagtttcatcgaatcaataattgaatatattttcataataaatttactccctccgtcccctaatataagggatttttttattttgcttgcactttttgaccatttattttattaaaaaaattttggaattattatttattttatttgtgacttactttattatcaaagtaatttaagcacaactttttattttttatatttgcacaaattttttaaataagatgagtggtcaaataatgcaagcaaaatatcaaaatatcttatattagaggacggatgtagtaatacttttctctacgaacttaatcaaaattaaagcagtttgactttaaccatagtcaaaatgtcttataccctgaaacaatgggagtagagattttacaactctcaactgtgtgattgtgcttaattaccaaattcaccttttttcaatggaaacatggtgaagtaggtctgcataactgcgagcacgacggcgactgcggcggcgacgaaggagatggccgaccacgggctggcgaagtagtcgcgccggagcgccgccgtcttcctccgccaccatgtcccgcagtagcggtccacgtccttgtagagcccgacgaaggcgtggctgtcgtggttgacggcgccacagtcgccgaggtggttgaagaaccgggcggcatcgtcgtcgttggccagcatgttctccagcacgccgcgccggcggagcagcgcgacgtcgcgcgccgtgacgatgagctggcccatcagcgccacgtagctgctgaggaggatggcctcgtcgttgcccaggctctgctcgaacgcgatcaggttcgcgagcagcggcgtcttcgcgtcgtcgatcaatatggtgggtatctccatgacgcccctaagggagtcgaacaccacgtcgtagccgttgtctgagttccgccgcacggcgaaagtcaccccggcttcgctcatctcgacggcgcacggtagcactcgcggcgccgtggtactctgttcttgctgcggcgtccgctggctctggggcacgaagctctcgtagtacaggtgtaggatgtgattgacctgcccgttcggccatctgattggaacttgacggccggcgatgtactgaaggagaagctggaggaggttatttccggcctggccatcctgttcgccaaaggcggtaacatataacttcttgaggacgaagaacgggagctgattctccataaggagcaaatcggagatgacgaacgtgaggccccaaccaacgtcgcatagcacatcgggctgatttctgcgccacttacggaagaactcgaggatgaagcatccgtccaggaggagcatctggacgaagtcgtcggagctgaggtcgacgggttgctcgctgtagcaggcgcgcgcctcggcctcgagagaccgcatcttctcaaccaaggcggatgcggagagtccggagacaaggggtggaagtggaacgcgatggttgggttccggcggtccttgcggagacagcaggtcgtggaggtagcgccacttgtggtcctccatggcgcggagcgcggcggcgccgtggtagtaggggccgatggacaccaagcgcggctcgtaggaggtccggctgctctcgcgaagaaaggcggggacgcggaagatggtgaacgtctgattcgttctcgattggactcctcttagaacactcaaccttgcctccaccatatcttccaaccgcgccatgcttgcaactcactgggagaaatacaacagctttctcctaaaatataaagtcactggtacttagcttgatgttaatacttatttcgttagttgagatttatagcactaggtgatatctaattaaatactatgttgctagtacattttaggatggacaaaagtttgtttagtttcataatcagaaatgaagttaatctatctattaacttatcaaaggaatagaaaaagaaccctccacgttcgctctcatagcctagaaattctcacattaatcggagaaaaagaaaaaatagagtccatatagaaatacaatttaaaaatagtttaaattcggaattagaaaataagaaatattaaaaaagagactgaggccatataggaatacaatataaagctaattaaaattcagaataaaaaaaggaaaacatagtctatacatgaatacaatttagaaataatggaaattcgaaatcggaattagaaaataaggaatattggaagaggagactagagtctatataggaatacaatttaaagctaactaaaatttggaataaaaaaagaaaacatagtccatatacgaatacaatttagaaataatggaaattcgaaattaaagataaggaatattgaaagttaagtttagagtacatatagaaatacatataaaatttacatataattgaaattcggaattaaaaaataagaaaaattaaaagtagaatttagaatccatatagaaatacaacttagaaaaaactaaaattcgaaatttaaaaataaaaaatattagaaaaagagtctaaagtccatatataaatacaattcggaaataactgaaattcaaaattaaaaagaaagaaatatcgaaagatgagtttagagtccatataataaaaatacaatttataaataagagaaattaggaattaaaaataagaaatattaaaaaaggagagtagagtttatatagaaacacaatttagaagtaactgaaattcgagatattaaaataaggaatatggaaagaagggtttagagtccatattgaaataaatttgtaaataacatgacttcggaaaatataagaaatattagaagataagtttatagtctatataggaatagaatttagaattaactaaagttagaattttaaataattaataaatatcacgtatacaaaatacaatat

SEQ ID NO: 15983 - DNA, 2800 bp, Oryza sativa
ctaaaattcgaaatttaaaaataaaaaatattagaaaaagagtctaaagtccatatataaatacaattcggaaataactgaaattcaaaattaaaaagaaagaaatatcgaaagatgagtttagagtccatataataaaaatacaatttataaataagagaaattaggaattaaaaataagaaatattaaaaaaggagagtagagtttatatagaaacacaatttagaagtaactgaaattcgagatattaaaataaggaatatggaaagaagggtttagagtccatattgaaataaatttgtaaataacatgacttcggaaaatataagaaatattagaagataagtttatagtctatataggaatagaatttagaattaactaaagttagaattttaaataattaataaatatcacgtatacaaaatacaatatgaatattacacatcagtttggtcaagtcagtacaaaattaaaaattatgttatcattttaatatattttaataacaaagtataaaaatatatatgctattatttaaaaagatataacgatactagccgcgcaatctatgtgggccaccatgctagttgtaacgaagacactagtatcatgtgcatgaagaaattggatggggagacttcgtgataagggagcaagtggctaacccataaatccatttgtaaattaaaatatgctataattttacttatgttgatttataatgggttcacgtgttaaccacttatacccctacttcccgattttcattcagtttagctgttgaggtaaggctgtttatgcctcgctttcgcgtgattgccagggatgaagtagtccacttcactggtgtccactaattttagtaccttgcgtatgataaaatttgcatttatgggttatttaatcttattcaacattactatatattcataaaataattattttattatcgaaacaaacatggaggtaaaaactattattttattattgtagagatgttcgacggaggagtcgtgaccaccacgggctaaattcacgtgtttgtagttacgtacacatggatattggaagctcattgatttatcaccaaatatacgtaataactttaagctttgcgtgcattaagagggccgtacttgtgggtatgtatatacagtgtgcatcttccaagtatataatgaagaaaaagaataggatcgagcatatcgatgcaagtatcttccacagagaccacgtaccattcacgtagagtaaactagctaggtggacggcacttatataaaattatctatttttacacatatttttttttaaaaaaaatattaaatagacatatcgttgtcttatattttaaaaacaaaccttatcagcatcgggttttttatttttataatttttaaaagtcacactggtcaccacccatccctttatttgcttgtccagtcagtctatcacggcttcttttcatcttcattaaaatctataaaattcgtcggacattaaaatatatttttgtctcgaccggcgaattttatagataaaatcaaaccttatatttttgggttaattggatctatgccattgcaaatttgcctcgttagaaaataccattacaattcgtctattcgtagccatgccgctagaattttatagaattataaccacgccatcaccatcacatttttcatcgttttctccatctatacatggggcctacctgtcagaatcatcttcatcctccatcctcccctattttcttttttcctcatctctctccattgcgcagcatcttcctcctcgtcccacacctccgaggactatgacgacaaggcgttgaccggagcagagccgatccggcgacgggtggttgcttcctcctcggcggatgccgctgccgtcggtgcccctgcacgatggaggcgagctcgacatcgacatcgtcctcccctaggtcatcgcaccgtcgcccttctccgctccggcaggtagcagcaagcaccttatcgtccatctcctcgtcaccgagggggaggggggcggccctcgacacctcgtgtctcctggacttcccgccgctggccagcccctcggcggccgcacgctgcgagcaccccgtcgaggccggcagcaccccatggccgacccccaacctgctccggcttcgtcgtcgacgccgcactgccatgaagggatctgggccacctctgcatgcgtcctcgccggctccgcctcaccacagccaatccgtggaccccgcctcggccaaccatcgtcactcggcgtcggacctcgtttcctaccaccaccggcgggtggcccgacctccagatccacgccgccctgcttcccctcctcgatgaagcgccggatccgcgatttctccttcccgtcccgtcatcggcgcggaagaggatacagagggacccatctccgtcggctactcctccgcctatgctgccgccgcctagatatcttgtggccaccgccgccgcctatgcccaccacaatgccgggagctagagtctgttccgccgccctcgcctccaccagaaccgccaccgcctaatgttcgttgcaaggaagaagacgcgagaagaaggaagaagacggaaaaaggaatgagttgatggaaaatgtgacggcaatggcacggttctaattttgtaaaatttcaatggtatagctataaatagacaaattgtaatggcatttttctgataggcaaatttgcaatggcatgatccaattaaccctatattttttgtgctcttggaattgtaatgccaccgggcatga

SEQ ID NO: 15984 - DNA, 899 bp, Oryza sativa
tgtacatctttacccagaagacacatctttactccgcattccatggccttggaacccgtcgtaaagatgtgacatagtttccaacccatcctagccttagacaagagtaccgacccaatcccacctacggccgggatacccgggacaggcaggcagaactgagcccctagcagcagggcaccaaccctctgccgtatgacatctcgactaccgggccgcagctcgtgtagccttcatttgccctggagaatgtccatcgacgcccgacttcatccatctccaatccgtgtacttttgtttatgactagactgagccacaaactaagccttacccattagacatgtggaagtacggtagtgctttgcaacagaggcccgagcttaatccttatagtggccggggtgctacttcccataactggcatgcacccaaaccccaccgaaaacaggttttaggggttttgaaagaggaagagaggtgtatgtccaattccaccataatccaatcaattccaaagtgtccaaatgatatgagaattcccaaagtctaaagttataaaaccacctaatgttgcctaattaatcagcgaagcatctacctaaattcatactagtggaaccataaatagagtactcactagttggggttttgtttaacctagggtgaacaaagtaataatatcaataacaagaataataaggtcataacaaaggtaagtaggtatggctagataaaacagtgataacgcgggaatttaaataaagcggtaatgcaataatttaaatcaacataattttacaaactgggattcaatatgttcaaggatgatgtgacttgccttgctcgctttcccaaacgtcggcttaactttcacgaaaaacggatctttcgaagctgc

SEQ ID NO: 15985 - DNA, 544 bp, Oryza sativa
gcacctcggctccggccctggctgcgtcctggatgacgccgaggagctccgcggccggaatcgggccggtggtgggggcggccaccttggggcacttgcccctcgcgcgggctgctccgacgccaccgccatcacggggcgagctttgccggccctggaggcaagcgcccggaggccaagaaccggtccccgcggcgaggttgtgccattcctgcggtgtgaagaggcggcggcagcggcggcggcggcggcggtgggaggacggagaagataccgtgccattggtgctcaggccttcgagaagatgtctctgctttttttttttctttcacctctgcttcgattccacatgtgtgtgcttttcacttgcaaatgtactccatggagtaatagttgctttcatttggatttgaaaaaagaaatagaacttctaaaaataaaaaaaaagtctttttcttttttttttagaattacacagtacaacctaccactgccattgcctcgctggcgaggacgtgtcgacgggtacgtcgcctaaattcgc

SEQ ID NO: 15986 - DNA, 6133 bp, Oryza sativa
gggtaagtataaaaaacattatatgtcataatataacaatgcattatattaattccaaataagtttaattttagaaattaatttataatgtcataaatgtttgattctaaatgtgcattttttgagtgattgtagatatgcaataggaaacaggtacatccaattgagataatcgaagaaatctggccaggtgctattgaagaaatttatgagcttagtttaaaatctgagtggctcatgacttgacttgtgaatggtgagagtgaaaatatcaggtaaatgcacagaactatctatgtgttgaaaaattctgcaggaactttcaacatagtacctacagatcttgatggcctaattacaactatgtgttttgtcccacctagcatcttgctatacccaatagcagttttcattgcaagtaatagtattcttgtgttctttttgtcacttaaaaattaaaattagttttggggctgattacaattgacttcttttagtacgtacaattgtattctttttatactacataagtgattttacatttaactgcatgtgccttttggggggcaacatacgatttgctttagtagcccttataaatgcttgtaggagtacgcagaagcacccataaatttgtttcagggtgccactaatttgaatggttctagatttttcatttgcatggttgagcttcattgctgcctgtcaaaacacagctgcagttacttatctttcgtgttttccctttttcagtgctgaaggatctggagtactctgaaaatcatgaatgggttagtgttgaaggcgattatgcaacaattgggatttcagatcatgcccaggtacatatttagatgttctatcactctgagcaatttttttttaattttgcgtaaaccttattttgcttcatgatactgtcaccttgcataaaatggatttaccaaaatataagtcagatatataaggatgatgatagatactgggaggggcagttccaacacttactactagaagggtagagggtatccatgactgcaagtgggaccctttacatacagatataatataaggaataaaatcactcacttgtatatgtgtgccgtataaaaatcgtgtcaaccatgtccttgtcgcaaggcgagcaacgctttgtattttatcaagtccttacactccacatggtgcgtaatgatagatagtggtaagatggaagatgattttaccccatagaacgttagtacttggatttggatgggagatgatataaaccccatcaagatagtagcacgtggtggactagagtgtaatgtgctgaaataagagaagtgcattgtactctaaatattacaaatacgcgacttgtaatatatagagtgaatatgggtacagtgatacaagcctacacagtgctcaattaaatcgtgattcacgcatgtctcttggattagaggctacgggagcctattgtggtcctttctcactatgcaagtgattagtagtttttcttataaattaaatatggactcttcttacaagaatatttttttttgaagaaattataattgagaaatgatgaattgatatgatttatgaaatcgcatgccatacatccttgcaattaatactgcttgctgagtgcttgtactcacccttgctactaaccctccttgtttagatgcaaacacgttcggcaagctagcgagttaaatggtgggttggaagagctctacaggaaagatgaggcagaactagctctacagcaaaagatgaggcataacttggttgaacgtttttttgtttctcttttttttgggtgaggggatcgccttttgtttctattgcatgctatgtaacggtggagagaatcattatcttcactatttgaaaaatgattctacagaagatgattgttttttatggcagtgcttgaagggctctgcttcgtggtaaaaaagaacacttgcgaaatgttggatcatccttgaaccatttgaaacagatttgtttttttactgcctaaaatcacttgcaaagttcttgagcaatttattttgtttgggttcaggtttaaaaaaatttttacatattggctttactgtgtcaagttttttaattggttacacatttttttccgctgaaagtgctagattgatcagacgactgaagcataatcacgcatgttttgatcccttctgcttccatgagcttgctagtcggttctataatttgtgatcagattgttatacactcactgtatgctacaaggtttctgtgtatgtattcaaatttaacattcatctactaaaaaaatatgttgcaatgtgtaggtctcatctagtagattaaaaatcaatgctagatcactggaattttacctcaaattttcatggaaatccatttttcactctgagctacaaaaccggttctttttcactgttaacttttaaaacctagcatacatgccaatatgcgattgaaccatcgtgttaaacctgttagtcaaaacagcacaatcctattcaaaaatgacaacgttattctactcctaaaatgattgtcacaatgaaatttgatcaaatgtgatgaaactacaaaggtcataaaattacacccaccaaaaatatcacgtatttttttcaaactagaaaccaaatttgtattcttcaatcaactacaaacaagtcgggaagagaggtgaacctgtccaaatcaccgaaaaaaatagtcatttttacccaaaatttgaaaccattttttattttttagtgaatttcagcctaatttggtgtccactaaatttgattgaattcatatgaaggtttcactttttgttttcaaatttggttgaaaatttggaatttaagtgatttgggtaattctctccataaataaatcatacaaccaacaaaagtcgatggctgagtcaaaggacttcaataaacaaatattcagtcaagtacatggcattttaacataagatcctctgtttttctcttttcttctagtagtataaaatagctctgggtgaggagttcaacttaaaagtcggtagggtatttgtcgggtttaaaccacaaggagaaatcaattcctttcttcttaagatcttctgtggcagggccaatccgatccaaaagctgcaagtcaagtaacagggttgatcagcaactccataaaatttctccaaaagacgaccaaaaattatcattactcttggtgatgcatactactaccgtctcacaataggttcatttttcactagtcccacatatatcaatataaaaccaaaaagactacaatagccccactttatcaaatcccaatacggttattcttctttttatctactccgaatgaatttatctcctactttcacaaactccaatacaatgattgctcaaaataaatgaacttattttgagacaaacgggatgggcaaaaaataatcttattctgagatagagggagtacagcatatacacactgaacaggcagcctaagcctggaattctcctacaactagtatgataaatctttcggttggaattcttaagttcgcacggttggaattcttaagttcgcacaattggccctttagtggtatgacaatgaatgcttaagatatgagtattgtgatctttagcatgagagaacaaactacttgttaagacttaagaacaaacctgatcatgtacaacaccattggaaacaaggacagaacgatcaaagacggtaaactccccaccatccatgcgtgacaccatcccaccagcttcttcaactatctgtagtaaaaaaaaatgccgaattcatcaagtaattatactgaaagtgtgcataactttagcccaactatcaggatttggacgatatgaaaaggaactcataaaaatggattatatgactgaaaatgtgtatttaagattgaacaaaacaatcaaatccttgtttttactgaacttggatatcttttcttttatcaaagtttaattccaatcatgaactgcgggttctgatagggtaaaaaaagattaccagaacaccagcagccatatcccaaggcttaagtcggtattcccagtaggcttctgtaatgcctagggcaacgtgggacatgtcagcagcagcagaacctagtcttcgtactccctgaaaaaaaataataaaggaggataaagcaaaagtcaaagggggtaaatttgttgtgtaataatgaagggagaattcactttaccctgctaatgtctgtgtattccttgaacaaatttatgttggtcacccatgcatcatcatgttcataaccaaaaccagttaccagaagtgattgttccacctagagaatcaattagagacaatatctttcttcagtcaaatattctgacaaaattaaatcacaagaactctggttgcatccagaaccactacaatcaatagatagatacactgagcgtatgatcaaagagagattcttatggcttcataaaaaaagagctattatgacacgcatatgcgtgcgtgcacatagcaacatacttgtataaaagaaaaaaaaagttaccttgtctgtcttactgacatgaatcttttgcccattacaataagcaccaccaccttttcaaggagaaaggaaaaccttaaaaataattctgtagtgttctataaggaaaaaaaaagcattgcaactacagtgtttgaccaaagattataccagatgatgctgaaaccgtacgagtgctccagcacataggaccaccacaaaattcgacctaaataagggtatatgaaatgtgaataatccagagggatgcaatgaactagcatgggaagtttgatgatccaattgtgtctccggcgtttaatgaatcatatgattcaagaaaaacacatgcacatacataccacagtggaagcagcaggctttccgcgaaacagaactccaatggatacagaaaagctagggtaaccatgcgcaaagtttgttgttccatctaaagggggtaaaatcactgcattagatcccccaatgaagaatactacagaaaaagtctaagtttccactgcagtaatacaagttcagataaaccttcagttaaaaattaaaatcaatgtgatcccaatcttgtttcaaatttatgaacagttcaaatactctaacatccatttatatgaaaggctttttccaacatccattctcctaccaataatactatatactagaactaataacatcctgttcagttaccagcccatgcaatcgagcatgttgcctctactaaatcaaatatttcagatacttaatcaagagagcatatggaatcacccagtattcttaaatgattactaaatgatcaaactccactacaggaacaattggttaatgacttcatcatagtagaattacaaagtacttcctccgtttcacaatgctagaatgacttacgttgtgaaacggagggagaataaagtggccaaacctaaaggatcaatgcaccagagatactccgacaaggcatctccaataagtccaccttcctccccaagtatgaggtggtctgggaaggtcttcctcacaacttccagaatgaccgactcactcaatttgtctgtgctgaacaaaagtagagaacacactaaattcaaatgctaatgttttatttagattatagagatacatagatcataaaatatgatattagcaagtagcgacatcaagttccaatttacaaagcatttggagattgtaggatgataacttttttcttttgaaagatcaagaatgataaataacaaccaagttagcatcagatggggaaacaacaacacaagtaagaagcatccttactctgtgaccaggtctgcaactcccttgtagtgaatattgcgtggcttattaacagcttccattataacctaaaatgaggagaagacaatgtaagctgccttgagaattggcacatcaaaaaatagagttaaaaggaaatgagcttagctcactaggtgagatgtgtaccggtgtacaaccccaccaccgaagtccaatttttttttagagctgggatgattacatttcaaacgcctcggcctttgcaagaaagcccagaacacctaagtttaatttttgtttggctcg

SEQ ID NO: 15987 - DNA, 71375 bp, Oryza sativa
  unsure (1)..(71375): unsure at all n locations
tacagtagttcatgcaaaaaaagttttttttctaataaaagggtagtatatttttttgctgctggtatggataatgcctatgctgcatgaatcttaatttgcgtacgcgtgtggcattatcttaagggcctgtttggcatagctccagctccagctccacccctcctggagctggagctcagccaaacagtttcagctccaccaaaactaggagtgaagttgggtggagctctctcacaaaatgtactagagttgtggagctgggtttcggcaactccataactccactccagactcaactcctggagttatatttaggagttggagctgtaccaaacaggccctaagattcatgcgagcttaatttcactttcgatcttaattattttacctggttcatttgatgatttgcttactgaatgtctcgggtatttagttccaagagaacatctcagttctattggtaaccttcaagtaaactgatatgctcttttccaccattttgcaggttaaggatagaccgcatgaggctcaaagggcacgccagatagatatttttcagttttgtcctcttgcaactcctgcacctctctactcactatagtagcagtgaccacacaagcttacctgagcttgagagctcagcattatcttctcagtcttgttctcccttcacagtttcagatttatgctctttggctgtcaagactcgagcagtctgttgccttcaccttgtgcttatgtgagttagtttctgtcttctctcaattattactagtacttgattcttcagaggtcatgtgggtttgaccaattagcacattgcagttttctgtttgatgtccatggtgaatttgtggatacaccttatggttttcaaactagtgttttggaaacaacttacatgctacgcattgaaatgtttgctttctgaatatcttgggtagaagttctcaaagaacatacaccagctctattgataaccttccagtatgctgacattccttctcccaccattttgcaggttgaggatagaggctctgttgtattatcctgtcacaaggccaagatggaaaattaatgctagtcaagatgccacgcaagaaactggcctgattgatgcagaaattaattcttatgcctatagtgaaaggaagaacaggaaatacaacggcgcctacatcgataaagatggtgtatcaaggaccttcgatcgaaagaaaatatcaagaaaaaggggtaaatgctaaatatattatctttccagttgttcttccctttgttcttttgttcagcacttctacattccatgaagtatctaatcagtatatgtttgcaagtaaattgttttccctccttcaaaatgatctaatgtcttcaggtttcatgcagggggtgctatgagaggccggggctggaagtatggctctggttttgtagatggagtcttccctgtgctcagtccaatggcacaggatatcttagaatttgttcagaagggaacagacgttgcaaaaatctgggaatctttggataacattccttccacacacaatctttttgatgatcttgtgaatgtcgctgtccaattccgtatgaacaagaaatgggatctgatcattccagtaagtctgaaccctgcacattctcatcattaactaatcggatattcacatctcaatgtttcggttacctttgatcagtattttgatgtttaatttgtcaaaagtggatataggtctgcgagtggatcctgtacaggagctcattccgtcctgacatcatctgctacaacctgctcatagaatcctatggcaagaagcgtcagctgaacaaggcagagtcaatctacatggctcttctggaagctcagtgtgtgccaactgaagacacctatgctcttctcctgcgcgcttactgcaacgctggatcgctgcaccgagcagaaggcgtgatctcggagatgcgcgagcacgggattcctccaagtatgcagctcaattcccctatattgccaagagaaagaagcttgtaggttgacatagttgcataactcatgtcaagaacaatcttgcagatgctactgtatataatgcttacttggatggattactgaaggcaagatgtaccgaaaaggcggtcgaggtgtaccaaaggatgaagagagaacggtgcagagctaacacggagacattcaccctgatgatcaatgtgtacgggaaggtcagaattcagagcacaatattgtttttcagttcactgtaaaaatcttttcatttctctttctttgaaaacttacctctgaagaatttctgacatatattttttcatggtcaatttgaaaggcaaagcaaccaatgtcatcgatgaaagttttcaacgagatgaagtcgattgggtgcaagcctaatatctgcacttacactgccctggtgaatgcatttgcgagggaaggcctgtgcgagaaggctgaagaagtgttcgaggagatgcagcaggcagggcacgagcctgacgtgtatgcttacaatgccctcatggaagcttacaggtgaatatcaaattagcatatcagtcatccatggcttcacgagcccaagtttctgatcacaaaactccagtgaaatttgatcagatttttttgtaagtttgaattagcaattaatagcttgcaacctttcaatgcacccatagccgcgctggattgccgcaaggcgcatcggagatcttctccttgatgcagcacatggggtgtgagcctgacagagcttcatacaacatcttggtagatgcatatggaagagccggccttcatgaaggtacattttgcagttggtgatggaaaattttggccaattttgtggtcaaagaaaccaagaacatgagttccatgatgctactatgaactctgaaagtgaaagcctccgaatatatataattttgcccctgtctgaactctgaatatactctctccatttcaaaatgtacgacgccgtcccaaaataaggcaacggcgttatacattttgaaaaggaggtagtagtataattttgccactgtctgaactctgaactctggaagtagtgacagcttcttctgagaatgtataaatattcggtgttttcagatgcggaggcggtgttcgaggagctgaagcagcgggggatgtcgccgacgatgaagtcccacatgctgctgctggcggcgcacgccaggtccggcaacgcgacgaggtgcgaggaggtgatggcgcagctgcacaagtccggcctcaccccggacaccttcgcgctgaacgccatgctcaacgcctacgcccgcgccggccgcctcgacgacatggagcgcctcttcgccgccatggagcgccgcggcgacgccgacgtgggcacgtacaacgtggcggtgaacgcgtacgggcgcgccgggtacgtggggaggatggaggcggcgttcgcggcggtggcggcgagggggctcgccgccgacgtggtgacgtggacggcgaggatgggggcgtacgcgaggaggaaggagtacgggcggtgcgtggggatggtggaggagatggtggacgccggctgctacccggacgccggcacggcgagggtgctgctggcggcgtgctccgacgagcgccaggtggagcaggtcaccgccatcgtcaggtccatgcacaagaagcccaagacactcttcaccatataataataaaaaaaaacccaacactttgcatatataattgcattattattacatgtataataatacagtataaatgtacattacaatactaccttagttttcttttaatgtatgccgccattaattctaaagtagcggctaaccattcatcttaattattttaaaaaaatattgtaaatatgctactatctctgttttttaatataactaaccaacgtcatatatttagggatggagggagtaaattgtaagtcataaaacatgtgacaacaaaataaataaaatttatatatttttaatagcatgaattgtcaaacgtcatataaaaaatcaacggtgttatttattagaaaatgaagggagtatattatagcatagagtataatagattgatttagcatcaactttgttgctgtagagtgtaaaacggtgttgtcttgacaaatataatgtaaacaggatgtgtatgcaatcaaaccttaaacttttaaatcattttatgtataaaaatatatgtgatttggtcaaaaagattactgtcatgtggttaggataggagtatattttttaacaaattatgaatacattggtcagataagacaattattaaaccgcacattctttctattccttagggggacttattttagtccctctcaaaaaccataaatgcttgtccctactaacagaaactattaacagtaatagttttgactcggcccactaacaatttttgaactgttaaactacgatgaacgaacgaaagtaaatgcttacaaaacactcaggcaactgatctttttaaatatttaaaaaagtttcataaaaacaaatagtctaaatataatctctaatactccctccattccataatataaggcacaaccacttttttttagatgttccataatataaggcatgcatgtatgtaggcaattaactatgaccccttcttcattaaattattacttttttaaatcctccactctcatgttctttaattctattagatacatgcattatatttattaggatgatccaaactacaatatgataataaatattttcttggtctttgggttaggggtgtgtcggtgacatgggaccgggagtatcatgacttaaagacttgaggcagacgcgatcacccacgtggcctaaccccctcggggggggggggggggcccgagggtgatacggccgcccttctctttgtctccccgaggggtcggaccgctcccgtctcggccccgagggccgaggcgccccgaccccttgtgggttttgcgccgcgtatatggggtaggtgagcatagcggggctcacctaaccacatttattgcggtttggacgagcgcgtcacgccacatgtaacgcagtgcagcgcactcgtttatccggtctgtgaccagtcacagaccgatcagatcgtgggttaggtggcgacaggcggtctgacgcacgcctcgccccatcccgtcaggatgagagcctccaagcactcgtccctagccggagccggcgtgttagctcctggagatggcacgttggtcccggtcagatatatgccaggcttcatcctaaccattacaggcaagatattgtatgaagaagggcgaacatgcagattgttaaactgacacgtggtggacaagaatgaccgatttgtgaccggtctgacaatggtcatgtcgtcagcagacagccatgttcccacgtcgcgcctgcttccggcggaagtggaggtaggtatgggccgtcccatcagaaggtcattcggacggcagccatacaaatctccgtccattaatgaagagaagtcaagttggagggaagagaggatgagtccccacacaaaagaaagagagggagagatggtgcatgtggtatccccttgagatataaaaggaggaccttgcccacttagagagaggggaaaaacgatcccagaacgatcgggggctggctcgcactttgtagcttcttcatacatagatccaccaaaacacaggagtagggtattacgcttctcagcggcccgaacctgtatacatcgcccgtgtcttgtgtgtttccattctcgcgaaccttccacatacagactaggagcttagaatctcacccagggcccccggccgaaccggcaaaggggggcctgcgcggtctcccggtgaggacccccacgctccgtcatctggcgcgccaggtagggggttctgtgtgtgttcttctaagctctcgcactctttcgtgtgcgccaagcttttcctgttcagcccaatggctgaacaagcaaaggcgcacaacctctctccgagtgttagcggtgacgacggggagccaaacccacgccgtcgtgctcgtactccaccgccccctccacgccaaagtcctagacgggaggaggcgctcgagagggtcgaaggatccgcgacttcgacatccacgggtgatggaggagggcgccgagatggggagcgtcgcctcctcgtctatggcgacggcagcacgccccagggcgcgctccaagctgcgggcgcgctcctacgtcacccgcccgttgtccctgacccggagtctccagtccaacgttggctggacgacgtggccaacttggtcatgacggcacggcagcgcctaggtgctggtgggcggtcctccgccaccaagacctctggcgctgctaccaccggctccgtgtcgtcaaggcggagggcacggcgagcggcggctgttgctcgccattcggccgccactccttcgtcagcacctccgacccaggaagatctgcgtggggggccggatgcccgcatcagtatcgagcgccggcgtaatggccgacgtgctgcccatgcaacggagggcgcctcctcgtccggagtgtcacatcaacacggacgcggggatcagccctccgtgcccccggttggtggtgtcggctgtagagcctttgtggcgagccttcggaacgtccgttggcccctaaggttccggcccaccatcgccgaaaaatatgacgggagcgtcaaccccgccgagtttctccaggtctacacaaccgggatcgaggccgccgggggtgacgacagggtcatggcgaatttctttcccatggccctgaagggacaggcacggggttggctaatgaacttgccacccgcgtccgtccactcttgggaggatttgtgccaacagttcaccatgaactttcaaggcacatatccgcgcccaggtgaagaagcggacttacatgcagtccagcgaagggatgatgagtcacttcgctcatacattcagcggttctgtcaagtccgcaacaccataccatgcatccctgcacacgcggtgatctacgcgttcagggggggtgtgcggcacaaccgcatgctcgaaaagatcgcctccaaagagccccagactaccgcggagttttttcagctcgcggaccgagtggctcgtaaggaagaggcatggacctggaacccctccggttccggtgtggcagcttcggccgcccccggatccgctgctcggacagggcggctgtcacgcccagaaatttagcccaaatttccagactattttgtgtattaaatccctgtccaggaccagccagggtacacaaaacgacaagtaatatacagttccaaacgtaaataaagcgtaaaatacttacaaaagaggcacttagtcctcgcaccgaaacgaaaacagcagcagcggaaaaaggcgatcctagcggggcttcagctccactccacaggcaaaactcaactggggtctgagccttggtcctctaacttcgtcttcagctcagaagcactacacttctgaaaagggggaataatagcaagactgagtacaaccaccgtactcagcaagccacaccaacgatgcagacgtgcaaggggaacacaaggacggtttgtggctatttgcataaaggcggttgtaaaacattttattgagcaaaacagtaaaactgttgagtaattaaagtaatattgaatctccactgatcaacgctacaccacgttgaacaggcccaaccaacccacctaaactacagtgtattgggtcgatttattaaggtgggactaatcacggtgaatctggtcgaccgcccataaccgcgggcacggctattcgaatagttttactctgatcagaggtgtacaactgtacccacaagacacagccccacgacacgtttccgtgcgccgacatgccaccacgacataccggaaagaggccgtgacaggacccttcgcataaccccctctaaccaagcacaccacacctcaggtttcacccccactcctcgcaaggcagcgggcagtcccctctcgtgcctaggtgaatccggaagccgcataggccgtcgcagggcccatccaaactccatcacgcccacccttgcctggatgcgtcggctagaggaaagctacactacaagcccagccgttgcccacgctggcttgtggtaagtacgataagttcttccagggcatcccgcgaaccggtccttaactgccatgggtgcgaccagcaaaaccatgcacccacagcccaccattcagtcgcattttagttggatacttacgaccatgaagcatggccagatgtctcgagcacgcagctcactctgatactaaaaaggtctaatactgcaattatcccatcaactgagctagtggtaattaagcatggctaagcataaagttctagctaggtcatcaaagtaacacaagctaggtgatttattacccaaggatgacaaaggacagatatcaagtaaacatggcacaagcgagcagataggtaaaaccctgaccccatgtaattagcaaaacatgcatatttgtttgcaaacagtaaaacatttgtaaattaggatcaacatgctcaaggggaatgtgtgacttgccttgcttcttcactttgatcttccgaactcttttcctcgcgaccgcggacttccgaaacgacggaaactacacgctggcacgcaaaacgagaaaaaactctaataaaaaccaaggaaacagtacataaaaactaaacaaacatgtagagctcaattttagatgaattttgcaagttgaatggctcaattcggagttcgaatgaattagatatgaattttagaagttttgagccattttaatggatttctataattaaactcgatttattgcgcaattattatttaatttttcaaaggaaaaaggctgccgctgacgtcatcaagtgaggccggcgccgacaggcgggccccacacgtcagcgggtcaagggaatcggtccaccgtggaccgggaccacggggtggtccaccgccggtccacgggaaccgacggcccagatcagcccgagctgatcgggcggccacgaggcagggcgcccagagcacgggcacggctcagagccggcccgaccgagcgatggcgcgcggcagcgcggccatcggcgacgacggccggcgacggcgcggggaggagaggagggatgctcaccaagggcggcgacggcgagactgcaacggggaaaccggtggcgggctcctcggggaggcaacggtggtccggtggcgtaccacggcgcgaggcggcggacggtgactgggacgaccggggcgcggagagggcgatttcagtggttcccggaggcgaggaagcggtggccggggtgcggctcggagttgccgatccgagggaggaaacggcgcagtccggcgtcgaccggggaggcggggcgacacagatggagacggcaaacacggcggcgatctcgggttggtggtgaagttggtgctcgggcagcgaggggcgacaaccgagcggcggccgagcttgactttgaggcggcgaaggtaccggcagtggtggcgcattggggcgacggctagggcggcggtggcgcgcggctgaaggcggtgaaaggggcggcggcctcgggtgtacggtgggagtggtgctcgaggggtggagagggggaaataagaggcggccggacttccccttgcggtggcgaagctggcggtggcggtggctcggcgcggcgacggctgtggcggcgggaaacggcgaccgaagctcgccggagtgtggcagcgcgtgggtgcggcgtggggagagcgagggagagtatgccgggctcgggaaaaaaatggggaaacggacgaggggagcacggggatgctttttatgggctcgggaaggcgggatcgaggccggacgtggcggaatcggccggcgaagtggagcgccgtcgtggggtggtggaggggttaaccggcgccgtttctagcggggtgagtgggggaaaaggtggaggacgtggagggggtcgtgtccatgtggttggatgcgagctcgggtgcgggaggtcgccggattttgcggcgacgtggggcggctcaggcggccatggcggttgcagccggccagccagaggaaggaggaggagctgacgggtgggaccgccggtcccacctgtcggcgaagggagagaaggagggacgcaaaacagacttttgcaagcgggccaaggaagaagggagccggcccgagagagggaggaggcgcgcgggccgcgggagaggaaggagggggaggaatttgggccgagcccgaaagggaggaaggggaagtttaatttgttttctttttattttaattgatacaatgatctttgtgttattaaaactatttctcgagctccgaaaattcacggaaaattccggagagtattttagggcacaaagaatattgcaaaatattcccggccaatgatttttaagggaaaattttaattctcccattatttcacttgattaaattgattaactttttattcaatttctaggaaatgcatcattaaatgatttttaatcccgaacgaaaatcggggcgttacagcggcgtgacaggaggaggaagaagaggtcagcccattccgacgacgagggtcatgtcctcaccgtcgagggcgcttcgcgggccacccgaaaggggaggcctgcgagcgacaaaaagaaggaggccggcgctcccagtagggagcgcccaaccagcaagtggtgcatcgtccacaacacctcccttcacgacctcgcggactgccgcgcagtcaaaagtttggctgagcggacgaggaagtgggaggaggagaggaggcaggagcgccgagagggcaagtccccggcggttccttctagcaatcggcgaagtgaggccaagcagaaggcccccgccgaggacatcgatgacggcgatgatgacctaggtttccaagagcccggggccaccattgccactgtcgatgggggagcgtgtgctcacgtttctcgccggagcctcaaggccatgaagcgagagcttctggccgcggcccctactcatgaggcgacgcgccgggcgcggtggtcggaggttgccctcaccttcgaccagaccgaccacccatcgtgcgttgcccggggaggacagatcgcaatggtggtttcccccactgtttgcaacgtaaagctggggcgtgtcctcattgatgggggagcagccctcaacatcctttcccccgcagcctttgacgctatcaaggccccggggatggtgctccggccgtcccagccaattatcggtgtgacgccgggtcacacttggccgctaggtcatatcgacctcccggtcaccttcggtggatccgccaacttccgcacggagcgggtgaactttgatgtggcggacctcagtctgccctacaacgcggtcctagggaggcccgcgttggtgaagttcatggcggcagtccactacgcctacctccagatgaagatgccgggccccggtggccccatctctgtccatggcgacctcaaagtcgcgcttgcttgtatggagcagcgcgcggaccacctcaccgccgtgtccaagcccgagggaggcgacgagaggcttggcacctccgcccccgccgccccgaggcagcggatagtcacatgcgacgaggtcccggtcaaggaggttgccctgggcgacggcccgtccaagaccacacggatcggtggtcttctggacggcaaataggaagacgcgctcgtctctttcctacgggcaaacgctgacgtcttcgcatggagaccggcggatatgcccggggtccccagggaggtgattgagcaccgtctcgccgtgcggtcgggcgcaaggccggtccggcagaaagtacggcggcaggccccggaacgtcaagccttcatccgcgaggaggtggcgcgacttctggaggccggattcatccgcgaggtcatccatccggagtggctggcgaacccggtggtcgttcccaaggcgaacggcaagcttcggatgtgcatcgactacaccgaccttaacaaggcatgtcctaaggacccttaccccctgcctcgcatagatcagattgtcgactccacagcggggtgcgaccttttgtgttttctagatgcatactctggttaccatcagattcgcatggctagggaggatgaggaaaaaactgcattcattacccccataggaacttattgttatacgacaatgcccttcgggttaaagaatgcaggtcctacttttcaacgtactactcgaatttctttgggtagccaaataggacgtaatgttgaggcttatgtcgatgacttggttgtaaagacgcgcaaccaagagaccttactctcggatctagcggaaacttttgagagtctccgctccgcccgcataaaactgaaccccgataagtgcgtgttcggtgtacctgcgggcaagcttctcgggtttttggtctctgcccgaggcatcgaggccaaccccgagaagatacgagctatagagcggatgcgccccccccagcaagcttagggatgtgcaatgcgtcaccggttgcatggccgccctaagtcggttcatatcgaggctgggagagaaggcgctacccttatttaagctcctcaaacgctccgggccgtttacttggacggaggaagctgaacgtgccctcactcagttgaaggcgtatctcagctctcccccagttctggtcgccccggagccaaatgaacccttgctactctacttagcggcgaccccgcaagtggttagtgcggcgttggttgtggagcgcgatgaggacaatcctcattccgcgcacccccaccctgtgctggcttggcccgggagagagcagggaggagagcccccgagccgaacggtggcccaaggcccccgacgaccggagcaggccctctgcccgcttgtcagacggtgctaggtgcccctgacccccaggatggcccgagggccactgcgggaaggccgcacctatcgccctctgaccccgaggctaaccctgtgccgactcgacccgggagagagcagggagaagaggcccccgagccgaacggtggcctaaggcccctgacgaccggagttggccctttgcccgcttgtccgacgacgccaggagcccccgacccccaggacggccccgaggccactatgggaaggccgcccctgtcatcctccgaccccgaggtcgtcggcacagaagacgagtgcaccccgcgaggccgcttggacaaagagcgccccagggatgtggcccctagcgaagaggatcggccccaccgaaaggtgcagcggcccgtctactttgttagtgaggccctccgggacgccaagacccgataccctcaggcccagaagatgctttacgctattctgatggcttcgaggaaactgcgccattatttccaggcgcatcgggtcacggtggttacgtcttaccccctcggccaaatcttgcataatcgagagggtactggacgggtggtgaaatgggcaatcgaactttctgagtttgatttacactttgaaccacgccacgctatcaagagccaggccctcgccgattttgtggcagagtggaccccagctcccgagcccgtctcagtccccaaggccagctcgggcccctcgcagctgcctcacaccgcccactgggtgatgcagttcgacggctccctgtctcttcagggcgccggtgcgggggtcacgttgacctcgccgagcggagacgtcctcagatatttggttcgccttgactttcgggcgaccaataatatggcagagtacgagggactccttgcgggactcagggtggcagctggactggggatccgccgcctcctggtgttaggcgactcccagctggtcgttaaccaggtctgtaaggagtaccggtgctctgacccgcagatggacgcttacgtgcgccaagtacggcgtatggagcgccattttgacgggatagagcatcggcacgtgtccagacgggataacacggttgccgacgaactctcacggctcgcttcctcgcgagcccagaccccaccgggcgcctttgaagaaaggcttgcccagccgtcggcgcgacccgaccccttaggggagacggacgcgcctgataggcccccgatgcccgtcggagtccaggcctcgggacccgaggggagcgctcccagctcccttagattgattgcttggatcactgagatccaagcatacctcacatataagactctacccgaggactgcgaagggagtgaacgcgtccagcgcatctccaaacgctacgtgctggtagaagggaccctctatcggcgcgcggctaacggaatcctcctgaagtgcattcctcgggaacaaggcgtcgagcttcttgccgatatccatgaaggcgaatgcggagcccactccgcctcgcgcaccttggttggcaaagcctttcgacaaggtttctattggccgacagctctcaatgatgcggtcgacctggtccggcgatgcagagcgtgtcaattccacgccaagcaaatccatcagccggcccaagccctgcagatcataccactttcatggccatttgctgtctgggggctcgatatcctgggaccgtttaggcgggccccgggcgggtttgagtatctgtatgttgcgatcgacaagttcactaagtggcccgaggcttatccggtcgtcaagatcgataagcactccgcacttaaattcattaagggcatcacagcccggtttggagtgcctaaccgtattattacggataacggcacccaattcactagtgaacttttcggcgattactgcgaagacatgggcatcaagctctgcttcgcctcacctgcccaccccagaagcaacggccaagtggagcgcgccaatgcggaaatcctcagaggccttaaaaccaagaccttcaacatcctcaagaagcacggtgattcgtggatcgaggagttgccagcggtgctctgggcgaaccgaaccacgccaagccgagcaaccggggaaacgcctttcttcctcgtctacggtgcggaagcggttctcccatccaagctcaccctgaggtcccctcgggccaccatgtactgcgaggctgatcaagatcagcttcgcagagatgacctcgactacttggaagagcggaggcggcgcgcggccctccgagccgcgcgctaccagcagagcctgcggcgctaccatcagcgccacgtccgggcccgatcactctgcgtcgacgacctcgtcctacgccgcgtccaaacgcgtgctggattgagcaagctctcaccaatgtgggagggtccgtatcgagtgatcggcgtcccccggccgggctccgttcggctggccacgggcgacggcacagagctgcctaacccgtggaacatcgaacaccttcgtcgcttctacccctaaagggggatcgggtgtcaggtttcgggctcgggccaaccccgcacccccctcgggcgtgcagggttggccgggggctaccacatatgcatattcttatttctcttatatctgtatttcaataaaagcattttcgatttcctaaaggctgtatctatgctgttgtttccttttgaaggattttgacttgaaataggtcactcgtgttcaatcctgccctcgggggctcgggtcggctaaaatcgccaaacggggcccagaaccgagccgtgccccggggcgtggtgaactccgggggggaatcggcaaaaacccacaatcgggtcacccataaccctcggtcaccacgctcccggcctggccagtctcgacatgtggatctccccaggcactagccccgacccgagccatttgagggctaggacctgggcacgagcccttgttcaagccaagacacaaaaggaccgcggcacaggcatcctcgtctcatacacacaacaaatagaattgacaaaaaatttcctctttatttgattgcagattaaattagtctatacaagaagggggcccgaaggcctcgaaagaagaaactatttaaagattggcgggggcctgggggctcactccgatgcacccgggtcgccagcctcgtcgccactgtcgctgtcacgcccagaaatttagcccaaatttccagactattttgtgtattaaatccctgtccaggaccagccagggtacacaaaacgacaagtaatatacagttccaaacgtaaataaagcgtaaaatacttacaaaagaggcacttagtcctcgcaccgaaacaaaagcagcagcagcggaaaaaggcgatcctagcggggcttcagctccactccacaggcaaaactcaactggggtctgagccttggtcttctaacttcgtcttcaactcagaagcactacacttctgaaaagggggaataatagcaaggctgagtacaaccaccgtactcagcaagccacaccaacgatgcagacgtgcaaggggaacacaaggacggtttgtggctatttgcataaaggcggttgtaaaacattttattgagcaaaacagtaaaactgttgagtaattaaagtaacattaaaatctccactgatcaacgctacaccacgttgaacaggcccaaccaacccacctgtactacagtgcattgggtcgatttattaagtgtgagactaatcacggtgaatctggtcgatcgcccataaccgcgggcacggctattcgaatagttttactctggccagaggtgcacaactgtacccacaagacacaacccaccgacatgtcaccgcgtcatcatgtgcccatgatgcacacgtcaccgtgtcgagtgattgtgacgagacccttcgcataaccctcccctaaccatccacaccacgctaaggtttcacccccacccctcaaaaggcagtgggcggtcccctcttgcgccgcggtgaatccggcagctggacaaccggacaccccggccgacccaactccatcacgcccaccctcgccaccggtgcctaggaaagggtcgagctatacttcagatcaagcagttacccattcccgcttgtggcaagcgctgtaagtcttccagggtttcccgtgaaccggtccttaattgctatgggtgcgactcgcaaaaccatgcacccacagcccaccattcagtcgcattttagttggataattacgaccatgaaacatggccagatgtctcgagcacgcggctcaacaagatactagaaaggtctaatactgcaattatcccatcgactgagctagtggtaattaagcatggctaagcatatagttctagctaggtcacataagtaacacgagctagtcaatttatcacccaagtttgacaaaggatagatatcaagtaaacatggcacaagcgagcagataggaaaaccctgatcccatgtaattagcaaaacatgcatatttatttgtaaacggtaaaacatttataaattgggatcaacatgctcaaggagaatgtgtgacttgccttgcttcttcactttgatcttccgaactcttttcctcgcgaccgcggacttccgaaacgacggaaactacacgctggcacgcaaaacgaggaaaaactctaataaacaccaagaaaacagtacataaaaagtaaacaaacatgtagagctcaattttagatgaattttgcaagttgaatggctcaattcggagttcgaatgaattagatatgaattttagaaggttttgagccattttaatgaatttctagaattattaccgatttattgcgcaatttaaatcaattatgacgtcatccgacggggagaggtggcgccggcaagcgggccccacctgacggtgactcacgggtggcgggcgcaccgtggaccgagtccacgcacgcgctggtccgcgggcgcaccacgtggcagacacgtggcggccacgacggacggctagcggaggtggcgccgacgtggcgccacagaggcaccgacgcgggcggcacgggaaggccacgtggacggcccagatcgccccgaaggaggatcgggcggccacgggcgagcgggagccagctcaccggtcggccggccgggagcgacggcgcacggcccgatggtcgccggcgacgaccaccggcgcgacggcacgcacgggaggcgacgaaaagaggggaaagggaaaggagatgaagggggtcctcaccgaggagcgccggcgacgggacgaccatggggaggcgaccggcggcggaaaggatggcggcggccgacacgggaggcgacgggaacggcggtccgacgacgcccgaccatggcggagccgcggccgagggccggcaagacctagggaaattattggagcggttagggagggaaataggcgaccggagcggcgagaataccacgccagagaggagaggaatggtggggctcaccggcgaccgagagataccacgttccggtgggtttccggcgatgaacaacggtgaccgaggtgctgcacggcgctgcgaggcgagaggtgaagacggagcgacgcggcggcggctaaggcgacggtggcacacggctggaggcggcgtatggtggaggtggctcgggatgcacggtggaagcggcgttgcggcggtggattggcgaagaggagcggtggacggggtgcgcacggcgactgcggtgccggggagggcgacggcgcagtgcggggtggacgggagcggcggcgcggcgctgctggagttcgccggagagcggcggtgcttgggctcggcgcggggagagcgagggagggcgcggcggcttggggaaaatggggaaaatggatgaggggagcacggggatgctctttatgggctcgggaaggcgggatcgaggccggacgtggcggaatcggccggcgaagtggggcgccgacgtggggtggtggaggggttaaccggcgccgattttcgcggggagagtggggggaaaggcggaggacgtggaggggatcgtgcccacgtcgttggatgcgagctcgggtgcgggagggcgccggattttgcggcgacgtggacggctatggcggttggggtcggccggcgagaggtaggaggaggagctgacgggtgggaccaccggtcccacctgtcggcgaagggagagaaggagggacgcaaaacagacttttgcgagcgggccaagagagaggggagccggcccgagagagggagaaggcgcgcgggccgcgggagaggaaagaagacttgggccgaaaatggcccaaagagaggaagggggaaattttatttgttttctttttattttaattgatgcaatgatctttgtgctattaaaactatttctcgagctccgaaaattcacggaaaaattccggagagtacattagggcacaaagaatattacaaaatatccccggccaatgatttttaagggaaaattttaattctcccattatttcacttgattaaattgatttaacctttatttaatttctagaaaatgtattattaattgatttttattcccgaacgaaaatcggggcgttacagtcgcccactccgccgtcatcgtcctcctcgtcggagttgagggcgaacgcgagccgaggggccgaaccctcgaagctgtggacgatatggtcggcggcgtcccggacctgcgcgcgcgcgccatcctcggtcccgggagggaactcgtccagcgccgtccatggggagaagtcgggatccctggcttggtaactcgccagtacgagctccaccgctcctcgggcgaggtccctcgaggatgacttaatcgtcctctcgagctcctcggggagccgttggagagtcccggctatctccgagaggcgctgggcgaggcccccctggttggcggcgtacttcgcagtccgcccgccccagaggcccgcctgccggccggcgcggtctagacgggagacggcgtcccgaagcatgccgggccctacctcgcctgccaagcggagggcctcgacctccccggcggacgagtctagcgcgccctgcagatcggcgatggtgtgttcggcagctgcgaggcgggcggttaagtcgctttcgcccgcggccgccccgccgctacgcgcccttgcatccagctcccttgcctgcgcctcgagttcagcggcccgctggttcagtgcggccctctcggcgcgggcactttccagattgcgacgcgcttgttcctcttgcgcagcctcgcggagggacaggctgtccgccagccattgcgccgcggcctcggcctcctcgagagctcgctcccgctcggtgagcgcgtcctcgcggaggcggagcgcggactcttcttcggcacaggcggcttcgtgcaccgccagtgtgacctcccgaatagcaacggcggcctcgcgatccgccaggtccctctccacggcgcaggcacgctcttccagcgccatggcacgggcctcaagggcttcttcgcgccgccgggatgccacctcggtctccgccgcccgccgttctcgggcagcggcagcgtcaaggaccccccgggcggcgtcgagctttttccctagctccgcctcccagctcccgtattgaagacggagggtgtcctgcgcctcgttcatcatggtggtggcgatgagggcagccccccgctcctcctccacctccttggcgatctcccccagcaccttccgacgggcttcgagctctgagacgtgccggcggtgtgccttgcggcccacctccaccatggcctccaccgagcttcgcccctcttcgacacgcgcccatgcggcgtcaagctccgcccgctctgcttgcagggcctccacctgggcacttaacccgtccaacaccgtggtgtttgcgacggccaaggcctgcagaaggggttctgcgctcagtggagcaacggaaggcgtggggaagagccgcctcggtgaggatgccgcgcggctcggcccgccgatggacgtgccggactcagggatgtcccccggacctggcttgtcctgagcgtcgcccgagggagtgggcccaagcgatgcgcccgcggcctcgtcgcgagctgcctcggaagtcgtcgccgcctcggcctggcgaagtctggcctcctcccgagcggcttcttcagcttggcgagctcggacggccacctgggcggcctccccggcttcccgtaggcgatccgcggcttctcgccggtcagattcccgcctccgagcctctgtggtcgccgggtcctcggcctcagactggccggacttggaatggcgggaggaacgcgacgggatctcgctgaaacagaagaaagaccagaagacaaacaagatggatgagtgaaaactcgcgttgagggaatgaatacggccacgatgggcgtgggacgaacctgcgagggggtcggttaaacgaccaccttggaggggaaatgaggtttccccgggatggttctgtcccccccatcttgcggagccgtttcttcttccgctccccctcgggctgcgacgtcggcgtggccccctccgggcgcctgctgctggcacgcgccgccccgccccctcggggaggagatgggggaggggttccttcctgcttcctcttcccccgggcgtcggcagggcgaccgctccccgggcccccgtcacggggcccagaagcacgaccccctcccggggtagattgttcccccctgcggctcccgcccgcgccatcgtggcctcgaggagcccgctcctccgacgccccgaccgcctgcatgatggtcaggatggaggcgcggtctggatcactgcagagggggaggactccttgaggaatgagggatgcctccacggagctgagattcagcacccgttggaccactatcttgaagtcctcaggagcccagtcccatctgaccccctggtgggtcctcatacagtcctcggacccggtgtactcccaggcgccccgggcgcgccgctggagtggcgcgatccggcgacgaagatagtcgccgaacaccatggcccctgtgagcccctgggatcgcaggcccgccaggcggtcgaggacggcgtcgtagccatctcccagatctaccggcgcccgccagttggaggcctgcgctggaggctggctcggaagtcggaggcgcgcttcgtcggcgaggggggtgtagaatcagtcgctcttccagtcatcccacttcttgcggaggacgcagggaatgtagcggttcagcaccggcccccgcggctggaagtagcaaccaccaaccaccgacggcggcgacactggctgtacggtgaagaactaccggaacagccgaagggatgggcgcaccccgatgaacatctcgcacaggtgcgcgaagatggccaatgtcattaccgcgttgggggtgaggtgcgccatctggagatcgtaaaactccagaacatccatgaagaaagaagaaaatggcggaaccagccctgccatagcaaaagggaggaagaagacggaccgccccgggtagcgtggcgccgggcatccctcgcccagccagactatctcccggccggtggcagattccggcatgaagcggcgcggcagcccggcctgtctctcgctcacgatgcgggaaggcggcagcacgctaccgtcaagcggagcggagccccgtgccatgacgccggaagaagagatgtttgagagcgagcgcgtgtggcgaaggtagggcacaggaaacaaggagttagggcgcaagcggcgaagacaaggggaataatggcgaaaggaaggaagcaaatctcttcctcgacgactttatacccttgccaacgctgtgcccggctcctcgtttctcgcgcccactatcttgccccctcgtttctcgcgcccacgcttccactaatcccattcgcccgtttgcggtgcatgaggtggatatgcggctgtggcagtcgagatggaacatctcgtgcgcgcgttaattacgctcgccgaccgaagcgccatcaccatatctccaggaaaaacgaaccggcttgtcccgatttttagaccggccccacctgtcaccaggccttaagaagtggcgtcacgcccgaccgcttccctcgaggagggcgatcgccctggcataacgccgggggctactgtcggtgacatgggaccgggagtatcatgacttagagacttgaggcagacgcgatcacccacggccgcccttctctttgtctccccgaggggtcggaccgctcccgtctcggccgcgagggccgaggcgccccgaccccttgtgggttttgcgccgcgtatatggggtaggtgagcatagcggggctcacctaaccacatttattgcggtttggacgagcgcgtcacgccgcatgtaacgcagtgcagcgcactcgtttatccggtctgtgaccagtcacagaccgatcagatcgtgggttaggtggcgacaggcggtctgacgcacgcctcgccccatcccgtcaggatgagagcctccaagcactcgtccctagccggagccggcgtgttagctcctggagatggcacgttggtcccggtcagatatatgccaggcttcatcctaaccattacaggcaagatattgtatgaagaagggcgaacatgcagattgttaaactgacacgtggtggacaagaatgaccgatttgtgaccggtctgacaatggtcatgtcgtcagcagacagccatgttcccacgtcgcgcctgcttccggcggaagtggaggtaggtatgggccgtcccatcagaaggtcattcggacggcagccatacaaatctccgtccattaatgaagagaagtcaagttggagggaagagaggatgagtccccacacaaaagaaagagagggagagatggtgcatgtggtatccccttgagatataaaaggaggaccttgcccacttagagagaggggaaaaacgatcccagaactatcgggggctggctcgcactttgtagcttcttcatacatagatccaccaaaacacaggagtagggtattacgcttctcagcggcccgaacctgtatacatcgcccgtgtcttgtgtgtttccattctcgcgaaccttccacatacagactaggagcttagaatctcacccagggcccccggccgaaccggcaaaggggggcctgcgcggtctcccggtgaggagccccacgctccgtcagggtggttatgccttatattttggaatggagggagtaacaagtactctcactctctctcaagataaatttatctttaatcccttccatacatatcaattaagaaaaatactaaaataccctcacattatcaaatcctaatacaattatccttcactttctctactcccaatatatctgtcccttgcttttacaaacactaatacattgattattcaaagataaacttatttttttaaaaaaagtaaaaataatcatataaacttattttaagaacaaaaaagggtaaaaatgatcatgttttagtaataggatgaatatatatagcatttggaaatcgagaaaatattaaagacgccaaataataagaacggagtgattaatctcgctaagagcaagtacaatacacttttttaaaaaaaaattatttttgtcctctttcaaaataaacctaattttaagtaattattgtattggagtttataaatttgggaacaaatatattagaaatagataaaatgaaaacaattattctaggatttgataaaattaagatattatactctctttttttttcttttatactgatatactactagttcgtgggatgggcaaataaataaataaaattatttaggaaccgacgtactgcccactagaaccaattgttgccgctgttgtgcctagctgcactctgtctgcatcagccaccaacccctcattggcatcagagatcagattcagagtcacacagtatttgtactcgccatcaggcccatcaacagcaccatgccagattgttaattactcacgcacgaattcctaggccatatactagtacacatctccaagcccgtgatggccaagcagacagcagattaagaaacagagaactcatctgatttgtgggtttggttggtagtaagttgttggttagggcctccctgacagacagcgttccaatcagtttggtgatcacatttttttctcatcagagcttttggttttgcaaccaatggcccctcttggcgatacagcatctgatgcttaatcttctttaataaatgatccttcctcattgtggttcaacacgcactgtaacaactgtagtgttatttgacattttcatccctaacctagttagtatttttgtaaatatttctcaatatctgcaatatattcgcccttgtgaatatgtccatcagagttgagacctcctaacttcccctttgaaacacaggcgttttacaaacagtttatacttcgtaagtgatataaatcttttctatgattgcgaaaagtaaaccagatatggctcgaaaaatggttgccatttttttgaatgatactttttcctaaatcatagagaatattaagggtataactgcaaacacaaaaaaatgtaggaaagtgccccactaaggccaagagcccaccaaaaaatttttttcttcaatttgcaacctgcactaccaaccttttctgcatcttgcttatatttttgccaaaaaaaaagaaaaaaaaaagagagaaaggagccaccaaacccagaacccgcagagaaaagaagagagagagagagagatcagaggagagagagagacagacagagtgcggcgccgaggaggagaggagcaataatccaattccaatccattcctccgcgacctcgtcgtccgatcatggccatggccgcctccaggttgctgtgggcttcccgcgccgcctcctacctcaagatctccactttccccagggccttctccaccggtatctctctctctctcttcttcttctctttcggtttcttgttttgcgtatgtatttttcgtattctgtggtctgtatattcgtgggatcacgcgtggttggtggtggaatggcgtgatctcgttgcctgttcctcgcaaagattggattttgggggcaaggatcactgttcatcttatcttcttttattttgggttcagttggtggtttaggctgtgaatccgtctgcgtgaatgggaaatttggttggtctgatttgatctcttttcggcgaaatgtttcatcttttttttttgaaaaaggaatcttgtgtgattgttcctgctcttggtaacagcgtgtgcatggcaggtttatgtttctgcatttggatatgtgaatgttagcacactgatttctgaaattcagattagcctattgtatgtgttgatgaggaaggcaaagttttttttttagcctaatttctttctttgtcctgtttattcgaagtgttaggacgtttgacaccaacatatgaagcatctcaggaagatgcttttagtagctattaggagaaagctactaccgaccaataattggcaatattgttatccaatatgaaaatgttacaataccacggttgtttgtttatgaatttaaaacttgtgttgctaaatggtgtgccacaatcacatatttacagatctgaattaggcacaccaaggaaatgaattaagggaaagtcttattatagcagactttggttttaaaactttggtagtaggaaatgaaaaccatatggtaaaatatttatgcaacttaagaagtgacaaatagtcaattgttaatttgcctggccaagaggctttggtttctaacaagcattggacaaatggtcataggaaaatacacctaattttcagtttataaattggcttctaggggggggccattaattccagttgttctggaaatttcgtatgctttctgtggaaaccttgtttcctcactgccaattcagtattttacacatctgatgaagttgtgcatattgcttgttttctatttttttcagtgctgaaggatctgaagtatgctgacactcatgaatgggttaaggttgagggtgattcggcaaccgttggaattacagaccatgcccaggttgatctattcatacgttatatcacattcattgcttcattctgtacatacgcataatataagcattccatttcttaaacattacagggttccaatatatgttatcatgttcagtacatgtagcaaggactagcagtgctaaagttgatcatgtgttgtttttttttcttttttttgcttccagcaccatttgggtgatgttgtgtatgtggagcttccagaagttggcagcagtgtatcccagggaaagaactttggtgctgttgaaagtgtgaaggcaaccagcgatatctactctccagtatctggagaggtggttgcagtgaacgatggactaggcgatgaacctggattggtaacttttaattgcgtaatagatcattgtgagtagattgaacacttctatgaactgtgttttttttttttttgcataggttaatacaagtccatacgagagtgggtggatcatcaaggtcaaggttagtgattcaggtgagctcaattcattgatggatgacgcgaaatactcgaaattctgcgaggaagaagatagcaagcattgaacaaataccagtgacttgtgatctgcaaagaatgcgccttgacccttttgtcaatgcttgtgatgtgctatcgagcacttatctttaccaccggctgctcctgaaatcagcaccgatcaacacatgaataaattagtgttggcattgcctcttccacaaagagttgcaaacttcgaacctgtaaatgacatgagtttcgttatttctttgtagtatcgcgtgatttcatcttcaattgtagctctgccgcctctgctccgtttatttctgaaacgtgtgcttcgtttacttctgaatcgtgtgttcttggtgtctacgagcctgcattatgctgaggaattggggatgattggtagtagacgaatagctaaatataaattggggatgcttgattgcttgagaatcgtcaatatttcagaattaggaaaaaaaaactcatcccagattatggccttacttttcctagatcctagatagtctgcaattctacagctctgttcttagttcttacattatcagtatttacattcaggtgatgagaaagaataggctacttggaggattccctaatcacatagcaagttcatatcacaattcacatatccttctgtcatagaacatggacgccaaaattatcaaatgacacaaatggatgtgtaaaatcaccacgagaataacaacatatgggacaaaaacagtagatacttttatcactataagtatatgtcaaacttaagtgatggtcagcaacattagtgaacagtgatacagaactaatatatatgaatttagatacaaaaacctaggcgatgaagataaatactacccttagcctgacagaacaatgtcctcaacaaaatacagaaggcctcaggttgcatcacactttgatgttccacttgtgtgctgaccgtggaccacgagtgatcccctcataatattgggatggaagctttcctttgttccaagttttcacaaacttctcgaacagatcacgagcagactccgaagaaagatcagagaaaaatttgcctttttcttccttcaaccaggttgcgaactcattgttctttgcgaaatagtcatctttggatatttctttgaaatcctgtttcagtaaaacaaaagaacaatgataagcatggtctcaaggagaaaggaaatggagagctcaaagggtgcagtatgccattatgtatgttctcaacagtttaatacttccccaaaattgttgttagtctcaaaaatataaatggcatacatgatacaactcctgtccacctgtccagatacagataagccattctggttcttgtgaactgtgaccttaaacaagtacctgacttggtatcactaattttcatcacagacacacaaaaggaaataacctacaaactgatatcactaattcaattcgatggcaacagcaaaaaaaaaaaaagcttttcctttatattcagtcttcagagacaaaatacattctggcaagcttcagcaaaatttcattgttcaggaaaacaaaaggggctcctactcaggctgggtaagatggctacagaacatataccagcccggcgaaaaaaaatggtcgtaagaaatctgcgataatctatccctgattcacgcactgaagaattaactgaactagggacgttctccagtttggttctacttgtaaagaaaaaccaacctcgttccagtaccatagttatacgaaggctcaagcttgtagaacaattcatatatgaaaaaatgtggcctaaatagcctattcagatagcttaactgctaatatgcaaaatcatttgattgatgatgcccagtagattcatagcatcattcagacttagagaactcacatcatccttgtgctttcgcttgctcttctccttctccttggaatgcttctcctttgaatccctctctgtcaaaatcacacacacacacacactgaattactgacatacatcaaagctaatatagcaggtacgagtgtatcctcagcataatttgcacacttccagaatagttgagcatgatttcaagtaagaacaatataactgttttagaacaagaaatcaacaagtgccactgccaagccgtgaaggcaaaagatgaaccctagttccctacctttgtctttgcccctgtcgccatgcttcttcttcttcctcctgcgcctctcctcctcctcctcctcctcggcttgttcgtctcggctgctcctcctgctctccttcttgtccctcctcttcttccgctccctctcctcctcctcccctgaaccaccaaacgcaccaagaagattggcaaaatcaacacgcggagaccagatacgccgatgcctcgagagggggggaatggatagggggcctttgagcacctgacgagggtgacgagcgccgcttcctcgacttgccctcgccgcccatcgtcgccgccgccgccgccggggagaagaatcgaagagggggttagctcaggtgaggtctcgggacgggtttagttggtattacagatgagtccgagggctcatatgcaaaattgtcagaaggctttcgggcgcggtcgatccaagccgttcacgtctcatccgacgttggggagagagtacagcaatacgaagcactcacgctctacctaggcaaatcgtgtggttaacatcaagtttatggttttgcgtaaatttcaccctggaacacattttattactgaaattttcttttgtaccacactttcatcgatttttttttattttggatcaaatgttaatagtcttaccattgttatactctagaccacaccgactctcttatcaagtatacgaatgatttcgattataccagttactacttgtcattgaactcaaaatatgttgtacgaagtgagtgctccctttgtccaatgatattataatcatgaacggattagacctatcctaaattgtaatattttgagatgggggaaatacttagaacatgcatctatgtcctctttgcgaatattaaaacatattatttattcctcacattaaaaaaacgttttaaaaaatttcccacttgtattatttaaacaacttttcaaagctatttgtcaagtttattttttaaaatatttaatttatcattataattaaatagataattcgtaccactaatatgtccaataatctaagtactggtactagttaattaattaggtagtaacaggtaatctgcgtcataatttatagttcaaccataattaacaatctacagaaatggcattaatcctcaagtaaattaattaagctttgtcgttgtgttacatcctaaaaacctcaatgatctctctgctaattaaccatgcaaatgcatggagaccttaatatccaactccagttcagtagttcacacaccaacaaatcaaaaggtacttagcagctgtactagttaactaggtagaaaagcttgattattctgatgtgctaattagacacacacacacacacacacacacacacacacacacacacacacatatatatatatatatatgtccagaacgatgaacaattgaacaacacagcaacccaactcgatcgtctatcatcagctgatcatgcatcttcatggtctccaagttactcctagctcccagaatcgacaatgccatcatgtgcttaattagcaagcaatcatctagatctctgcagaatgatatcaatgcatgattaattcgcagctgtgttgcgatgaattatactccctccgtttcacaatgtaagttattctagcatttcctacatttatattgatatatatatgtattcattaatatcaatatgaatatgaaaaatactagaatgacttatattataaaacggatgaagtacataaactagtagataaaatcattgcgatatatatattcacatcacacacctgatgagagtatcaggatgtgccatgtatgctttgcttcgtttgttcttaccacagctgcaggccgtggccggcggcggcggcatggaagctgctgctgctgcagccggggtcctgcaggttgggctgcgtcggctgcagccggaacccggcggcggcggcggcgtcgacggcgtgcagcggcggggtgagctgcagcgcggtgctcgacgactcctcgccgtagtacgccggcgccgccgtcagcatcgacagcaccggcgccatctccaccatcgccttcacgtcgccgccgcccaccgccgcctgatgatggttctcgttgatctgaattcatatatagtttcatgtacaagaatcaaccaaacaccataattaatgtacatatatgtgcttcaagaatcaaaacattttaatgaattcttgattactgattaactaactatacgtataccatgcggcacaggaagctgttctggtcttccaggatgtgctcctgttcatcaatttcatgcatagaattgaatcaatcattttttttttcatcatcatacagcaaagtatttggtgtttcatgatcagtttagtagtgcaaattaattaccttgcgacgaaggttgtccagctgctggttcaggagctgatgctgcaacaagcaagaattaatgtgaaacaactattttttatttttttaacgaatcggcacttagatacacctatttcattgaatataacaaaataaaaaacttacgaaagcaaagctttacagaaaagaggaaaaaactatgggatcaattaatccctaaaccctaaacttaccatttaccattgaatcagagactgatcattctaaattaactctgaagaatgattcattcatcaaatactatcttcttaatcaattactagctctatttcatattacaagtcattttaattttttttcttttaagtttgattaaatttatagaaaaaaatagcaacacatgtaataccaaattaattttattaaatctatcactgaatacattttgataatgtttgtttttgaaatactaatatattttttataaacttgattaaacttaaataaatttgtaaaaaaaattaaaacgacttataatatgatatggaggaagtaattacctttctcgcacggactttggtgacggagaattcgagctgctgctcgagatcgttgatgtcggcgagcgtgaggttggagaggtcgtcgccggtgaacctcctgatgccaccgtccagcttctccatctcgttcctcatccgagtcatctccacaaatatttgctatatatatgtgcacattaattatatttgatcagtgcatttgaaagaaaatttcatttcaactgctggcagatagatcgatatatattctgatattgatcagacattgtgttgctgattgtaaaattaatgtatacctgatcgtggttgatctcctcgaaatgagtgttggtgacggtctggtaatgctcgatgagttccctcaaactatatattgtcaaacattgaaacaagtaccttgattagttgtgagttaattaatactttgataagttcatgtatctaattggaatggtgcatgtgtaattcttttgcgcattcaaaaaagaaatgacaatctctgatgtacaaatcagatggtataaattaattttgtagctagaattttctcttggtgatgtatatacttacagagagtatattattttagatcaaaatgaaacaaacgaaaatttcttaactaataacaggaatgaacaggggatcggaagaaagaacttcacatgaatattcacatattaattaactataatatgctgcagaacagtataaaatcatgtgagaaacgtctggggatcttccggctagctccacaaagtggtggactagacaaccaaggttcgaaacctcacctcttctaattatttaatattaggtcattctcttatattcgcatctttttttaagtataaaaacatgcataacataagataagatatggtcgtactgtcgtacacttgttcaaattatattccctgttgatatacatcttttagtttgattaaattagccacatatgaaatagttttttggggaaatccacctaaaaaacccagctcgatcctagaaatcattagaaagagggaaataaggattaattaactagttgactataaattcaggatcaagttgcaaatctacatacatatatgttgctcagagatgtaaaagacaagtgcgtaatcaagtcacaagagacactagggcatatagatcattgcttatgtatgcctttgatcatgatttaattttgtaatagattcttggctcttcgaaaatatatcaaaggaaactgcagatgcatacatatacactgaaaatagttaaaatgaaggtaggaaaaactcgatcgatcaggagttcaggacaagaaaaatagttcagatgaagaataaatgcaaggcatccatccattatatgaacagatcaaatgatcataattaaacactcttgcccaaagaaaacaaagggtagaaactgcatgagttagttaattttctctgaaaaacaaaataaaggccgagagaaacttagccgaaaacttaatctcttggttgacaaaaaacaagaaattaattaacccatcaaatcaagcactaaaaagagaacaagagacactaagctggagaaaggaaagattgaacagcatctgataatataagagaacaaaacaagaaccgtacctgcaggtagggctgcagtactcgaacatcttgccggtgctggagaagatgacgacgccgacgcgggcgtcgcagagcacggcgagctcgttcgccttcttcagtagccctccccgcctcttcgagaatgtcacctgcctgttcgtcgcgttctcgatcctcttgatctcgatcttgccgcgccccatgcctgctataccttcctgatcgagtttaatttaatttctgtgttcttttgtttctccttcttctgcacaagaggaaactgaagaagaagagaagaagaagaagaacagaaatggccaagttatgaacatatcgatacatggacgaattttgttaaaatcaacataaggcatgggtgctcaaattggatttccccccacagctatgtaaagggtgcaatcagaagtagaaaaaatttcatgtagagaagagaacaactagtagctagagatgtaaaaactctttgctgcgaaaggatgaagaactagctagaaaaggtgtccttttttttttcttgaattactcatgaacagggtagatagatagggcaggagtagtaatgtgctatgtacataccttgtgaagtgctaagcttgcttcaaaggctaaggcaggaggtgcagaaggagagacatatataggagagagagcttgtagtaatgtgcaacacacaatgctttctctctgtcacacactctcacactactactcctgcaaatcaaatcagtgtactactccaaatcaaatcaaaagtagatggagggagtagtaaatatccagaaagcaacaaactacatttttaactgtaactaatatgctagctagtctagttttacatttacccctgcatcagtgtgtaattaggatcagatagtgagtcaaagcaagaaacggatgcagacataagcatgacttcatgatgatgatgatcagatcagtgtgcatatccatgtgtgtacttgcagcatgcaatgatgatgcactagcatatactctctggtcgatctctgcacaaatacacgagcctagcttgtgacacaaaacacacactgcaacagtgcatatatcacgcacacaaaagttcagagatatcagtgtatgtagctcatgcaatataatgcaacagtattactcatcagagcacagtgcagctatatatacatgggcatggtataaaatcatgaacactacatgcaattgcgaggaaggtgtatgtagctatagcaactctctgcatgcccctcacaaggcaccatggaaagcaacatgtgtgtggacttgtaaccaccctctgacagtgtgggcccacccggtttcctcctccttgccgatcttggcagctaggtttgttaggttggccatggccatgaggagctctccagggacagggtacacttgctgcttatggcaacagagccaagaaaaccctagctcccttgtttgttgctagctagctaagagagagagagagagagagagagagagagagaggtatatgtgcagctagcatattgatcactatggttgcttgcttgccttgatgggggactgccactgcacattgtaccacatggggtggagggggggtggactgcacccctcatttgggaaggaagaaataaatttggcagagattttgatctctctccatgatggcttggctaattatatagtagagagctagggttccctatgtgatcaagttccgcgagattccgtgtttctcctttacagtaagtttagttttacggttttgctagctagccgtcgacagttttggaggctgaaaacttttgattttctggccgtgcgatccacgccatgattcgtgcgagatttggaaaaaaaaatctgcgcgagaattaaggtgtgtccttgcaagggcttgaacctaggatatccatccccaagccgtgcgtgctagccacttagatctgttgcatgtttttaaaaaattaattgagttacatgttagttatactccagttgcaccctactataactgcattgtgtaattgcattgtaactacgttatcatctctatataatttagatataaagttacatatattattttaatacttatatacgagttacattatagttatagtaaaattatattacaattatactatagttagatttgaaagttttttccttaaaaaacttgcaacagttttctagttagtccctagttttattacgcacatgcaagtgggttttttaatatgaattcagtgagatcggggatatgttattggttttcatctctttgaacgtgtattaggaggcacattcgctggtgtgtgtgagcgtcatggtgcatgtgcgtctatcgtgtaaccaggaaaaaaataattttaattttattaagtattcttaagaactaatgatatctaagttattatgcattttatttgctttcagtcagtcagagggtcattggctgttaattgttggttgaccttctgtttgtccaaatcaatacataatttttgggtggacaatttagtatagaagtccatacgataggggcaaaaatcaataaagaagatcattcagtaacttattatatatcctgaggaatattcagtctagctagctacctcgatctgaatttgacgaatcagtaatgctaaagtaacaacgcattcatgatcatgttgaaatgttaatggagagctggtggcatatattcggagcatatatacatatatatgcatatagcagcccttttttttggtgaggacatgtagcaaatatataatgaccatatataagcacacaatataaacaaatatgtactgtagacaagaatacaaaaaaaaacttaggctcagaactgtgtaagcatgctagttagcttttagaaaatcttacattaaccaaaagtaaatgggcattcttacccacatatatatgatcagcattttcaggctacttgttgcatgaacatccaaacaatcttaatttgcacatatatttgtacatatatttttcatctcatccactgtctgcaactgttgcatatgtagaaagcgaggacttccatttatgaaacactgattgtgaaaggaaacggcctctttgcatcaagttctgtggctttcctttgtcgatgaagcttggtttcagtcccagattctttctcatatccaccaaatgtgcaaattcagagagatcacacgctttacatcgtctgattgatcgactgccggttcagattgagacatacacaaattacacgaaattctatatcactgtatatttccaaagtaatccatccaaatatgcatggttgatttctcatccaaactgtctgcacatatacaaacgcgtgcaattgagttgatccactgcagcaaattcaggtaactcaggagatcagtaaaagattggaagaattaattatcacttgccaacactaatgaaattctgatcaacttgatgggctaacttttgttcagagttggcagaaatctgaacatcattaattagatgacatttgccacgtagttgtgtgaaatcagatggcaacagaaatggaaaaaggttatgttgaggaagcttagcaagaaatcttttgccatagatgttcctgatgagttgtaaccaccaccactttacagcaatgacaattattgatgtgccaactgccaaagtattcaagaaagatcagcttgtagtatatattgttttcaggggtgatttaatttatgtgatgagaaagtaattaaacaaattacttacaatacttgatagtaatcataaatggagtccgaatagtggatccaccaaactcaaaataattaatcagctttagtcagctaggaaacagattcaactatataagtacatactttggacccctcttctgaagctgtaacctgttgattatcatgaaggcaagatgtgaattcatatacacatggtctgtgcgtatgaattcacatcttgtctttgtctgactgatagctacagcctgatacttgcagcagtacatgattacacattacatctactaccattgaggaaagggagagaatatgagtgactcatctttcctaactcacacaaaacaaggactcaaggatgacacacaaactagtagtactattcatttggtattctgttgtgtgcttgtgccttgtgacatatgcatttaataatacccaactctaccattaaaggaaaaagaaaatgttgttttccagtatgatacatggacttatgtaacttgtgcaaggaaacccacctcatctcagtcgatttttccatccatccgatagatcaagatccaatggtccaggtcaatcaaaccattcaatacaaataccaatttctaacacccacctctcttctactccccagctgccgctgccatgcatccacaccttctgcttcaacaggactcctccaacgatgctagacgccgatgagccctccgccgaccaccgctcaccattgattctacctaagctttgcgaggtgcccccgccccatccacgtcctcgtcctccgactctaccatccgccaccacctaaccagttggacgagattcgtccaccttgttctcctttttcttagttggatcctgccacgggatctaccataaccgtccaccgctacctaaccactcgaccgagatccccctaacctataccctcccccttcgtcttcaatggctcccatcattagatacgccaccactactacccccccccccttctttgtacccacgggtccgatagcaccaccgccgcctcgtacccttgttaccaccacccaccattgggccacacatccccgggcttcctctaagccggggaactcccttctcttcctcatcctactgtgacctccaactgtgaattgtattctaactgggtggggttgttgtagccagttaacagagttcatcaaggtcattgaagatggaggagaagctcaccgaagcacggtncaaagtaatccgaaagccagaaatctgtaagatttggaattctattttctattgaatgtacgttagcagttctgtatacaacattttcaagcacgaatgatatggcaactggtctatatatacatagtaaattaatgaagtgtgaaaacttgttttgtgcttaagaacagaatctaaatttgacctgaagaagataaacttttatgaacagctaacgcggtgatgaatttgagagtagggaaacgagctagctagagaatgaaacttcatacaggatacgttgtggacatggatcgattaggatatatccatcacaaagaaagcaaccatctgctcttccatgcttcagcagcagcagtcctgaattcctgatgctttgcacatcgatcagcctcagctttggcccttggggactgccaaatcgagtgcaagatttttgtaaagcaggaggtatgatggccaatgaaagctattacccacgatcccaaacatcaagcgaacataataagattacgctttggttgtatgcatcgatcctagttatgcagaggccacgattgttctcaccgcagttatatcaccttgatataatcgattagttcaataaaaactttcatcatctaaaactaattaataagagtacgcacacatgatcctaataattttgaagttgcttaaaaaaatagcggtctaatattatctagttctggtcaaaactaacgagggttcgtgaatgggggagtaattcatttgtcgttacaaactcaatataagaaaatagggatggtacatactagctggtattcccttgttattttattgtgtactgatatcttgtagtctgaccatttagtactaatatgggacacatactggattgaaggaaagaaattgttttccactatatttgccccctcttaaccagtaaataggattggacgaggctcggacaaacaaagcgcatttgcactaaccttatcccctcctcgtgccaaccttatccccttcccatatgatgtacggaagctcctcgtacccaaaggtgtccatggtgaggtcgaagtccaccaccgcaccgcacatgaactcccacagtagcactgcctcggtcacctgtagcggcggctccacctaggacaccctcttcgactggacgatggcctagacctcattgaggccatcatcagtttttccggtcacttggagcaagcaccgccgggaaggtaaccccctcaacgagccaccgttctgggatggtggcctcttggacaaagctcctcaccggcgtcatgtcccaaggctaggttcgattaaatccgctgtcaattaacccgccagcgccagacgtcgtcgcaccaccgcgggttcctgaccctaccccatgctcaatgtcaactacggcacaacgaggttcgagcgtggcatccccttctccttttttttgttttggctcacgagctaaataagctggctctggctcaagctagcacacaagccgagccaagtgtttagcgcgttagcatagcaagctgagccaatccaattcgttatcctaatgagcccggatgaactgagttgactcgatatccatccctacattgatatttgaaatgaatcaatgcctgcatataccagcaagcttaaatctggtccctattaatcaaccctatcatatctattattcctagtttaattgggtatgatttggctagctattgtacatatacaatcagttattaatggcattatttatttgtgcatatcttggtcacctatatatgtgtatatatagaaaatgttgattacaccataaagataggccttttattatttgcaatcataacttttttccaaattattaagaaatcgaatagtgtgtttcaaaaaagaaaaggggggccatagcagctataaaaagccatgccaacccaatcagatagccatcaccttcacagccaggattagcctagctaacagcacccctgccgcagcctcccttttgcaattcgccgtcaattcatacgtaaagcagctatagccatgcataggatggtgaagctactctgcacgctgctgctggccctttctctcacggcccactattcgggtaaatttctcgtcgtcccaaaataactccatttcttttctcttatccaagttcatatctagaaataaaatgaagtacttgtacgatcgatggaggtagtactgtttatatatcgatttatatgacgaagatcgtcttttctttttgattatatagaatacgcacatgtgaaaacttaataagttttgatttgatctgaatttgcagatatgtcgatgaaggtgtcggccgattgtcagagcgtcaacgtacccggcccctgttctcccacaacgtgcgatgataactgcaagtcgcaaataggtgctggggctgttggcgagtgtacgtccgggggatgccaatgcaccttttgtactctccctcctccaaagaagaactgaataattaattatgatgatgatgcatcatggtctgtgatgtatcatttaatcctagcataataaaattatacgaaattgtgtcgacgatatatgtggatgtcttttggttcgagcgacgtttaatttggtgcatctcttacttgaagattcttgtttcgtggaattagagttgtactaaatatttttgagatctcgaataatacagaaggatgttgccgctccgtttctgaaaattatggcccgtttggtatacagctcctacactccgagattcttgtttcgtggagctgaagctgtaccaactgtagctgtcatatccactatattaatcataatttaattcgctttattttcttcttctgctgagattttttattgattagattttgccatatttgcaagtaattaattttttattttttatttttttttgcgaggacaagtaattaattatttgagcgtatcttggttacctatgtatagaatatgctaattacaccataaagctaggccttgttatttgcattaattctatatcctttcgaaagaaaccgcatatatgtttttccagaaagaaaaacctagcgtcaactatgcaagagtatatatgtgtctataaaagtcacatctgtcgttcatcctcacagtaacagctatccctcgcggtctactgttggggtaaaattcactactcccatattataagtcgtttattttttttaagtcaaacttcttttagttgaatgaaatttattaaaaaaatcaaacgatttataatatgaaacagaaggggtttcatttttattgcacataagatacgtagtgtaaacttaaaataagcttcgatatgatctgaatgtagtagctaggtgtgtcgatggaggagttggccgatggagcaaccccaaaggacttacgcaaaaccatcaccatatatatccggtctgtgttttccgaagttaagtcgtgccttgtttacagcaacaagcaagttgatgcagcttctaccagcgggatgcctatatacctactgtctctaaactttaaagagaataaaatattttctttgtctcaatataagtaaaatctagtacaaatataacatatattaaaactatgaatctaaacaattttatagttctataatatattacatctgtattggattacacttatattaggacggagggagtagctacgttagataccatgcatgtacaatggatccactaattaattagttcttgctaccagcacattacccatgttcaagggctccacaaagaaaaattagaggaattttgaaggatttgattcgtatggaaaaaatattcatgtgtggttctttggaacaatagagaataactctcctaaaatttataggaatttcggagaaattcatggttttctcttccagtaacataaagtttgtgtcatccaaacagtaattttgaaattttatatgttttaagttcctataggaattcaattaatgggcatgacgctttactcatgcattttttatgtttctatgttctcacaatcctgtactctgaaaagtcctaatctacctaaaactgtggtaataaaaatgccccatttgggttggagcttcagacatatgataaggtgtgtagcaagaaatcttatgcttctgatacgtaacttgatggctatcatataaaacggagtcgaacttgtagatccaccaaactcaaaaccatccgcttgcttgcctgctagcagctaggcacaaattcaggcattcagctacaagtacctggactgtagataccaaatgaagtgcgttttgtgcttatggactgtactacaatctaaatttatcctgaagaagacgagcatttatgaacagtaaacccagaaatttgagagttcagtgaacaagctagagaatttgcccaaagtttatacaggatatgactatcgatgcaagggtacttgtcccacccactttcatccaaagtcaatacacaggcagttaactttcacacatacaaataggaataggattcaacagaaagaaaccaaccatctgttttttccatgcttcagcagcagcagtcctgatgctttgcacatcagcctctgctttgatgactgccaaatcagggaggcaagattcttgcaaagcaggaggcatgatgactgataaatgaggcaacagactgatgcatgacatgaacaaacactcaattcatacaagggtctccacatgccagcacttttgagtattggattagaaactgatgaaaggtaaggtacagttactacattagttgcaaatcacctaccaaatcacaatcttttttttttctactgctgccatagcagagcagaactaacattaggaaagcctaagacctaatcagattacccgtttcagccaacaatcatgggaatagttttgacaagagcactgagttttagaggccctaagttcacaggacaatgtatatcaatgtcacaacttcactgtatcatctttagctactttctggcagagagtgctgctcttcaggggcctcttcctgttgctcttgaggctgctgccacacatacgtcaccgggtgaccttgctgtccaccgtacatcattcctgatccaggcccctgctgcgctggcacgtagtaatatggatatgtgtctgctgcgccccccacattaggcggtaggccaaccctcggaagcccaagcccttcttctttcatttcatccctgggaactatgtccaccaagaagtcatagatatcagtcctggtgatggcagctgcaatgtcattcttctgcaaggtccggcgcttgttctcctccgtgtgcatccacgacctcaatgttaactctaatatgaatacctcgcatgcctttgcgaagacaacgggggcttctgccgagatcatccggacatcctcatcagccttcattatcttctttatccttgcgagtggcaagctgtggttcttgaagtcggttgtttgctcaatctcttccatttggttagcccagaactcacggagttgctgctgttgctgttgctgcagctgctgatgaaattgctgggcttgttggtagactagctggtgctgagcactgagttgagctggattagtggggaatggtgctgatggctgtgagccaggaggaacaacagcaggagctccaggaaccatggcttgaggtggatatgcagcagcaggaggaggatatgcttgtgacccaccagtggcaacacccatcacaggctgaggctgtgaggatggttccatgtcagctcttgtccgtccaaagccaaaggccctgtcgttgtgggaaacagttgcaagtattgatcagttgatcttttgtatagattaacgagaaagatcatgataggttctaaatttgtattttgtcaaatacaatacacatgagtgagaataccttggtataagaatggaactcactgcttttcctttacaaaattgtatctgacatacaaacttgcatgcagggaaaaaaatgattgaaggaacaaaggcaacttgattgcgacttttgttgcttatagtacaattaatgagcaacttgagtgctgcggttccatgtagcttgctgttgcactttaagcacaactcatgatctcaatactttcatctctattggttcattaagcattctaaacagaaagagacttccattgaatgtggaatagaattacagatgcataactaccagtatatgtgatagaacatgtgcaagctaaacagaaagtagaaccttccattaaaatcatccctatgatttgtgatgggatggtaaattaccttttgtactcctactatccatattgtgcaagtgggtagttgcatgaacattcaagccctgccattatcggtcaaactggttacggacaagtgaatttgtgggctgctattacaaaccaacatggataagtatgcatcatacagagtttgaagcttctcatgcatgtacagcataaatcacatgtcttgatgttttccggtagaagcaggtcccaaagataacccacaaaaggtagctatgcccccatggctccagttatgacttattagtctcccagaatgatggcatttgtgtccagagggcacagatcggctagttccaagccaattgcacaggttttagctcattgactgacaaatcaatgtttggataactgagatgggagatgggaaaatacggaatgaattgtatttctagtcaaggctttttttctcccctctactgttggatatccaacactccaaggatggcctggatttggtgtagttacccagctgcagttgcagctgtcatggcagggcagttcataccatggctatgtgttcctcctaatttactcgcagcatctcatctacttacatcaaaccgaattaagtctatgacacccagatgccaaatctcataaatatttttttccatgtcaaccagaagtgtgtgtaaaagaagactacaacattcaagcaagtaggaaaaaaaatgcacacttaaatatgtaagaaatgttaaaaatgatccgctatgtcattattaactttgaacaacatatcaagaagccaagtgatccaaattgccatcttactctctgtttgacacaccatcagtactaaaataaagtgctgtcaggttaagcttaaggttggggtgcaactaccttaattggattctttgaagaatatgtcaatcttgtagttccaggaggtccacacatttgggacaaacaaggaaagttggcacgtatcatgtcacgtgacatttgaacacagaaaaaggcaaatttagatacattccaaaactcagactcattaaatgcatgggaccaatcacgtctttttttagggaaaaaaaaagagaagagagcagcgtcctaacacatacgcgatgtgggtgatcatgtaattatgatccatcactaagagaaaatatcactccaagagaaaatcatcatatcacttcatgaaaaaacaatgcaacgaatggtaggaaattaggagtgccctgttttgacagaacatctagacagcaaatcatgagatcctaacagtatgaaaacaacaccaaaataaacaaatttagatgtggcatcagaacagtactcttgcatctaggaagtttgcactcgtggcagaactacgttaagcgcgcgtcagcaatccatcatcactgaccatggtaatggtttcctacgagttgacccactgttcttacaagaagatgcaggtgcggacctaacacggggcaaggccagggtggtcatccatccacaccgtgcttcttgctagtcacgcaggcgaggaactccagctcgcactgcagatcggaaacagaggagagtacgatcgcgatggtgaaggagggcatcttggttatctcacttctttgaagctccatttcactagttagtaagctccattcccaaatcaaagagaacatcaaacctaattctcctctacagcagctccttccaaggctccggcgcggcgccaccacaccagcaactacaaaccctccgcctctccggcgagctcatgaactccggcaaacaagctagggttagaattctgggcagtggcaaggcggccatgacacgggaccaactcaacactcatgaacacaaatttaccaagacgagaccgcacgtctctccacacatatagcaaactaaaaatccaaactagaactaagcaggatcaagcaatcgaaacgaagccgacgactaatcgaaacctaaccatatgctgccaggatcagctccacagccctagaaacagaggcgatgattcctccctcagctacgagccgagagagaattcccccccccccaagctagcaacacccaacccacgcatgcagccaacaatccaaacgggatcacccacggaattgggaacagagagatcgaggaaaggtggcgggaggcggggcttaccgagagacgacgcccggatctcccgcgccggcgggagcgggagcggcggcggcggagagcgctccctccggcgaagggccgcgccgcccacctccctctcgtggagccctcggcgtcggcggcggagagagagagagagagggagacgcggtcgcccttgggtcagaaggacgcgaggaggaggaggagaagagtcagcgcgaggaagacgaggagagaggcagcggcggccgcgggcgggggtggtgggctcggtgggccggaggtttctctatgtgggctccaggcctggtaaaattccgcgttgtttctgttggagaaaaaagtctaatttgcctcccttcgttatagcccatttcgcaccgtaaaaatttctaacgcgcaaccaactctaaactcacctcacgctctacacaatcacatccattcacaaagcctctgatgggttatcttatcagccgtagctcaattttgaaatttctaatttgattctacattttttttatcttagcctatttttaatattagattttaaatcaagaataacacaaatataaattttatatctgtaatttattttgttggctttgttcatttttctatgccttatcagctataagtcaaaacgatcaaaacaaaacaaaagctggagacttcgcaaaggatataatgaatctcgatgctaatgtgaataaataggatatggatttttttaaaaaaaaaacattatggacacaagtgctcatgtacaattgcgcgcagagagattactgtatttctagtattataaaaaattaaaaagtactgatatacgtacaatccgattatacaactcatatatagctagaaacttgcaaccatagttcaatctttaacacatttccccgcaaaaaaaacacacacacacattcatatgcactacaatcagcatgcatgcacgggcatctcatctgagaagattgggaagatacgcaaaacgaggtaagtcattagcgcatgattaattgagtattaactattttaaaactcaaaaatggattaatatgatttttttaaacagatttcctatagaatttttttttaaaaaaaaacaccgcttagtagtttgggaagcgtgcgctcaatgtatctggaacgaacgcagccttcctcctctacccccgtaatttttgcagtggtggacagaaccagcagttacaattgtttgattttgagtggctaaggccttgtttagttcgtgaaaagaaaatttttaggtgtcacatcatatgtttgaccggatatcggaaggggttttcggacacgaataaaaaaattaaattcataactcgcctagaaaccgcgagacgaatcttttgaacctagttaaaccgtcattagcatatgtgggttactgtagtacttatggctaatcattgactaattatcctcaaaagatccgtctcgtgatttccatacaaaatgtgtaattagtttttgtttttatctatatatgactttttgagaaaaaaaattaggaactaaaccaagcctaaatatgtgaaccctatagcctgtgagttgtgagcctatcagggtttcccaaaacgccggggccagagttaccgcgctccggcggtaagcacggttaccgtgcggttaccgcggtaaccgtggaaaaccataaaaaaccgtgcaaaatttatcaaaaattcaaattattttttaaatttatttaaatttaaggaggttaccgcggtatttatattaccataccccgcggtaaacccgataactacggtaaccaccggtaacaagggaaaccctagagcctatacgttactaacccacgtaaaaaaaaaagatagtacgtccgatgagcttcttccgtggtgacccactgaacctggtgcgtcaaccgctagctagctgagctctcactcaactggagagaaaatggtgatttcagggtgaagcaataattgaaattaaatttgaaaatatactttttattttttttcttagaaataccctatatgcaaattttgacacaaatatactgatggtttctctgaaccgttgtgcgaaagtgacgatgtgaacggtctcgcgcaacaagtctgcgagagtatttcaaaaattaaatgattaattaattataatcagttattaattatcttaattagtctcgcacggtctcactcattctccacgtgacaccataatatcgacatcataatatcaatggtatatttgtgccaataaaattacatctagtatatttctgagaaataaaaaataaatggtatatttttttaaatttaattcacaataattgtgttgctccactattcccttcgtccgaaaatattaaaactagaatcgaataggatattttctaatatgatgtatctagatatatgacatgtttgattggagggagtttttataatggattggaagtttaaagtgatgaggttattaactgttttgtttggttgggatacatagtaattttggtgggatggccggatgtggatggggaattgaggaaggaactacctcattttcaatacctgggtaggggtggtaattgggagataattccttatttattttgcctaaataaatcttaaccatctgtttttattaatgacccgatctctaaccaaacttcttatcgactttcaccacctctaccaaataagatattgggattaaaaattaaattttcatcttaatctcatcatcaatggatcatgtaaactcctaattctcttccctcgtgttgccaaacaagtcgatagagtttggtttcagaaacgttgtaataaacgtcacattcattcaatcctatgtgagcatacatctttgtccaccaaagctaggtaggcagttagcccatcacttatcgtgtctagtattcccttcgcatccatccacgattcatctatcgtcaccatccagctgatccagcgaacgcacgtatatattccccttctccatgccatacgcaatcttgatcaacatgttgatcaactaatcacttcaattacactctcagatagctgcttgggttccccaagatcggtgcacgatcgcaattaattaatcttaatcacatctgtacagtacacatccatccgacaaatgaacggatcttcgcttgcaggagatagatagatcgatcgatgtcgtgctattatttctcttccaatattcacaatttcatccttcccttcgatctcatctcatttgcagccatggctgggagatgcatggcgatcgagaagaaacaaaagaagaagctcaaaatcataagaaaaagcgaaaagaaaaatctaatgggtggccgtggctggagcagtgcggccggcggcgaggctgctcgggtgggcgcgagcggcggcggcggcggctgccgggacgacgaaccgggaggagaaggagtactgtagagagctgcgcggcgtcggagtcgtcgtccagcccgccggcgacgtagactccgccgcggtcgaagttgcgcgcgtagctgagcgggtcgtactggcaccggccaccgcggagccggctcgacgccggcgccggacgctccgcgcacagcgccgcctgacgccggaggcgccgcaccagcctgcccagaccgcagccgcaccgccgcgccaccaccgccgccgccgccaccgacgacggcggctggccgccgacgccacctcgcccatccgccattgccggcttgccgctgagcggtggcagagtggagtagtgagagagtgagagtgtgtgctggctggctttcttggtaggtgaggtgaggtgaggtgagatgtgtttatttataggtccaaggttaagtcaaataaaatgtgtgtctgtgagactgtgaccatattaaaaccatacaaaattacaaatcatgatttcaaagatgtccaaagatactggtgtcctagtactccactagtttgaacaagtgccaaatttggttctatttgtaagggctgtttagttcgcgaaaagaaaattttagggtgccacattggacgtttgaccgaatgttaaaaggggtttttggacacgaataaaaaaactaatttcataactcacctggaaaccgcgagacgaattttttgaccctaattaatccgtcattagcgcatgtggattactgtaacacttatggctaatcatggactaattagactcaaaagattcgtctcgcgatttccgtcctaactgtgtaattagctttttaaaaaaattctatatttaatgtttcatatatgtgtctaaagattcgatgtgatgtttttggaaaaaactttttgggaactaaacaggccctaaattgaaacaaattcagcacacaaactatgtgggtttatgcctggactggggcactaggtagcagtaactcggagtaatggtaagcaggtcatcgtccgtagtacgttgctaaacgctggaaactccatgcagattggtttcttggttccagaaaagtcgaaaacggtgggcagcgtgtggtccaacagcaataccatggattagtgccgctcatgcttcggagaaaaatgagtaactgacacgtggacccatgatggatggtgagcctcagcagtcaggaccttctccttccgttttttttttttaaaaaaaactctaacgataagatacatgacgttgagtttcactagttaggaatttactgtgtccacgcacaagcggcgcatgcagccacggcggacgccacagtcgtcatgggccgctgcttgtcgcgccgcgccaccgatgcgatgagatccccccatcacgcaccgccgtggcagcctcaccgtgcccacccacgcatctgatcccatctcgcaaaccgtttttgtttttttgtttttccccttttttgagagagaaataaaactgcgtaaagtttttcaagaaatttccaggcagacaacggtttcatcctctgctactgcgacgtcacctttgaaagaacaaattcttctccaacaaaaatcgacccaaatttgcagcagtggccatgcatacacatccacgggaggacagacagtgtgcatgtgaatatgctgtgatctaatgggcaggcaatgggaggacccacgttgcacacattcttccctaaccaagatgccctgtctctctggattatagtagtactaatcacactcccctgaattctgcgaatggattggactgatgagctgagcttgttgatgagaagacattgcttaaagcgaacggctccatgattcctaaccagtgtagttgtagtactagaaaagttggaaaaagttcatgcactttagggtttaatccatccatcctggaaggcaactgccgacaaggttgccctggagcccatcatctccagtagtacgccgatgagcaatcgatctgatgatccccatttgctttggatcctcagcagctggtggttcatgctacagttctgcttgcttgtcaagatcgagctcacatgctcgcactgtttggtttggtgattgtcactgatttgaactggtacaaagttaatggttaacttaactcaggcagtgagatgagatacaactggggaaagtgtctactagttgcaggtattctaaataagaatcacatgagatcagcaagtttggaagaaatttttttttatggtaaactggcaggaataatcatcagatggagtcaaacatcgcaatttggcatgggatcaacagatttgtcggctacgattcaagctgccaccatttcttgctgcgtgatatataaatgactgtgaattcagtactgggggctctgcaatcctaacacgataacatggcactgttcagaactgcaacgtaacagtgatttttgggtcctgtttcaaaatctaagctgaaatcgcctatagctgacaaatctactccaaaaacatgtattggaccatgcctttctttagtaccaaattccagggctcatcataggaatgatataaaaaataaaaaaggggaccctaatttcatttgagatgtataatgagccataagcaatatgcctgaaaattttacattctctagtctgtaatgaagaactaacaatcctccatgaaacatttttcctaaaacagtagtcttatgtaattgaacctttttcctttttaattttgtttgagtcaattccttttgggtatctatatatcaaaagtgatttttataacataccggtatgcagaaaaaaaaaggccgttaatatatttagtacagaaaagcaaaatatatggacagaagaagaggagggcatagctctgtgagcacccagtggggatcaaccacagttgaaaactggaacacgagcagggtatcaaatgaccaaatatgtacaaatggaatccaagcaagcccgttgctagttagcgttgaatcctttgagtgggagcctgaaattttgcagaacagacgccattaatagttcactaatcatggatatacctccgccgtttcacaatgtaagactttctagcattgcccatatccatatagatgttaaggaatctagatatatatgtgtctctaaattcattaacacatatatgaatatggacaatgctagaaagtcttacattgtgaaacggagggagtagcatttttcttttgatattaatttatatagagtactgatgatacttttcaaatttaatgtgcagaaacaagagttagataaatacaaacaaacgagaaaccaccactgaatgttggtatagaacttatgagtaatgactgcaactggtgcccccagctcaactattccaagttgactcaaattaaagaaggcttagcttactacttgcgatcagaattatctggaaattaaaggtgcttttcttttgagaacccacaggaaatctgtgtgactgcgccatagtacttggaagaagagaaaaactgtggcagacaaacccagaccagcaaagaagaaaaaaattggggcatccaaaacaaaatcacatctacccttatgcttaactgcaagtgattaccttaaaatatataatactagatggactgccatatcatctcatatcaataaatgcatttttgcaataatacaatccaactgcattctctgacataaaatgaggagagtttatgcatcaatgtcaaaactcacatccaagtgactattaaagattccaaggtactccctccatcccaaaatataaggaattttgggtggatgggatgtattctagtactatgaatctgaacatacttcatatccagatttgtagtactaggatacgtcacatccaaccaaaatcccttatatttagggacacagagagtatggaataggtcaatctgtcggctagaattgcctatctgatgtgctactgctcaagtagtaacttatcccttatctataagaataaaaatcagcatgcactagtctgcacaaactgttaaaataaatattatgccaactagggagggactagctagacacactacacaaaaccatacattgtgggatgaagggtctcgtaagacaaccatatcagtaaaataacattttcatactatgcagtccttgctatgctcagacgtatttgaattgaatgagataatacaatgagaaacatgcacatcttgtaaatttgaggtagcaaaataggatgaaaattgtacttaggatcaaataaataccttcaccaaacaaagacataagggcacatcaggacaacttttacaaaatacaacagcttgcttgtccctgaaaaggtacaatcactcagttattttagtatagctatttcataagacatatagttacaaaaattagagtagttttaaagctaaactttaaaaacatgtcaaaattgcatttttgagtaagtttgaatatttgatgtcaatgctactaaaaatgttgatgagagctactcacacacttatgctctcattttttgattggtcagtaaggcccaccttataaacaaaaataccattttaagttaacagcaaggagaagcatacttctttggatcttggtatagtcttaaggcctccaggaatttgttccaaaatgggccagtctcctgaaggctaacgttttctggtcccccaaggtatgcctgaacaatgaactcgtgacttctttctctgaaagagagaagatagaatgtgtcagttttttttttcatttcgctagtacatttattcactatgctgaaaacatgttagcatttaatctcactaaccttccttcatattgtgacaaccatcccaagtaagctgcgccaaagtacattgatgtaaaaggattgtatagatcatctacggagctgacagtatacgccctatggccacaatctctgcaggaaaaagctaactgcaagtgaagataacttcatgaaaactataatattataaccgaccgagagtaactgcagtgtgtcttctgatagcctaagcagctaacttctcctatgcctatttgttttccagattaatcttctctagaatatgattgcctgacatctgaagtaacataaactagacaagtagtagaccaaaataaattatcatagtttaaatcaccatatgaatatgtatgaaggtatagtccaaacaatagttcagccatcctgaacagtgcattactctgtaagcattcataactagtaaaagggcaaaaggaactggtaaggtcctactaggattaagcaaatagctcaccaaaactgttagacaaaaagcaaagctttatagataattaaaacacaactgtaaacttaatttcatgcttgcctgtaaagccatgctgcagtagggtagtctattcccatcaagccagtacgagaacgaacaccatggacaaaacgcatactgcacacctcagcaagagcagctagggcttcctggcagatatgaatgagaatagagaatttactaaatatctcaagctttcttggaatgctaaaataagagtaaatactgttattgtaacatgcacccaaataggccaacaccatctttattcaccattttgaccaggacatatatactaacacaatctatggacatttgcataattttagaatatccacaaaatagagaaaatgctttgttgacaaaatatacaacaaatccattaactaatgcaatgatgttacatgaatcgacaaccaaaataagatgagttttatgtaaaaaaagaacaagatgagtatcagcactgatgtgatggataatcatgctaaagtactaaatgtatgacttagaaaagcaataccatgcaacaaagcaaataggttaagagccaaaagaatttcttcagtttgcctaaatgttggcctcatcacatatttaaaataagggagggccatgttataggtgatacagaaagcgatataaaacaacaaatttaatacataattagtatcattatacagatactatatgttcactgatttataaacaaaaaaacttactggtgttactccttttgagctcaaatgacgtgatatggttatttcagcaacagcctgagaaaaaaatttacaaccacgtaagtctgagatggatggaaattaagtattggtgaataaaataacaaatacatgaaacctgcaagacattttactggtgagcagatataggattattgtatcaaacaaggcatgagtctgggattgttccaaaaagaaggaatagctatggcaccaagtataagtaatgcttctgtgaacaatatttgtccatgtaatttgtatggcatgataggaaatgtatagcactgcagccacacctacaaactacaaagttgattttattacatgccatccacacgagcagttcacttgatcaaatcaaggatgcaattttaacagcacaagaatattaataagattatagtggtagctttacacaaaaacatatgtatgtcaacattttagcatggtaaaaaaaggtggcccgtatactgcaaatgcaaagtaactacaaaaaatttaaagaatcatcttttaccttcacctcaactcgagaaagataaggcctcctcttggagtcatgagaaaacctcacatttcctcgcctctcaccagattttgtccactccttaatcacatcgggctgactccacatcgcatccatatctacctctgataccttggaatcccaataaatcaactgtccttctgactcaaatgtgataacaagatgtcagcttgaatgttagaagcatatcaattctctgggaatcataaaacgaagggaaaacaacttcacatctaaatcataacctagtatttgctaacatctcgacaaaccacaaaccttgaatagcagaaaattatttaaataaataaaaaggtaacacagtaaaatttaacctgtgctcgaggaattggctaggagattaggagttaaatcattaaaactttctggctgtctgcagacaaaatagcaagaagcagtttgtcagcaagttcagaactggaactaaagtaaaataaaataatagctcctctacaaacataacttttggatttcgatccattgaatatgtttctaaccctaacggaaaactcagaagagcttgaaattctgaatatatttgagaggccgagcaaatgatgcaaccatcaagaaacactcatgtttgaattaagaaatatcagtgttttaattaacttggtatttcgacaggtcaggtgagcatgaattacagtaaagaaagtcactaaacatattgctgtccatcatgtgtttaacctgccagcatagaaggtccacatagcacagctcaggggtcaggttcaggggttcaaacttgagatgaaaactactgttctttaaattatgtgacatgtcataagtaaaattttaggttttttacctcaaatcttcaatggccagttgttttgagaagttcaaaccaattttctccaacttaaaggtttgctaggcttccaaataacctcaatacctctaaaattggaccttggaggttcacaggtgctaagagaaacgaatttgtttagtgcttaaggcacacttttcacagaataagaaagttagaagctgaatatggaaataaattattaagggtgaaacctcatagacagcaaggcctccttcacataaagatagcgttgaaagatgggggaagttgatttgtgaacagccttctttttgcctcccttgtaagctctaacaacgaattcttcagttctttctctgaagtgtttttggcaagtaattatgtttggcagtagaagataaaatatgtcaaaggaaattaattgcaatggtcaagcataatctgacaatcaaaatacatacttatcgtcacatgagaatagccattttgcataagcagcaccaaagtagacattcacaaaaggccaatagagcaaattagcatcttcttcaatgtcataatacttgtaacccaattcccttgttaaaggtaaagaaaacaaatatttagtatgaaaacatagaagaaaagatagttactaaatctgggttatcaaggtttcatggtacctgccaagccattgagcaacttctattgtcacctgcattatgccagctttgatctccttagtctttcggtcataattatcgacaaagagtctccttccacttgcaatttctgcaagggcacctatcatatactgcatgagtgatgaaagtaaaaaataatgtttaatgtacttcagcagtgtctttgatacatatacaaatccaaatattgataagtcataaagcaaaagaagcaataccgggtctagctgtgacttgaaatgcttatgaacagtaattgcagccaccgcctgaagaatcaatgaatttagttttaagccaaaattgtacagataagtagataacaagtacagttttgaaaaagaaaataaagcaaaggacccttaatttgttattgtttccatagcttcgaaaatttgtttagatcagcgcagcagtaacaaagttgtcaacagtaatttagtcacttggataaatataggtaaaaactattatgttagactcttaactcacagcactgattgatttttgtcttgtttaaacttcggtgaatcaatttgctggcactagtataacctgcatttaacgccactacagcataggtacaaggaaattattgttcaaaagtaacaaccaagtataatataaactgctcaaaaaatagacacgatacgtacagaaatacagcttgcgaaaaaataaatacaatgatttacatgaactttggttttttttctttttagataatgacatgaactttggtttgattgccactaatgcaggttttagatgtcaagatacactggctacagctgatcactcaccatcatttcagtttgtgtgagatatgcctcaccatcaggatcccgtgacaggtgaaccttctgtcccggcccttccccagcatcaatccactctttacttacatgaggatcagcccacattaattgcatatcctctggatccaagcagtcatcccaatatttgaagcttatagccattttgtactaattagcaattgtatctgtcgatctacactgggagcaacaaatatgaaaattatatgcaataggataacttccttaaagcaaaaggaaatccaatgtgccaatctgcattttgttcagggttgacatagagggtgatggaattttgaacagttagaagccatcaaataattaggaatgggaacgttgccaaaacaaaaacaaaaaaagaaaagaagtgagcaaacaataagaatatgttctgattgcatcgtaatagatgcgaaaagcatccgcgcttctacaaccaactatgcattcaatttgagctcatagcaacaacatggagtaatcactgaaaagtgacagaaataattgcttcaatcacagttacaggataagtcaccccagaactgcatgctgaactcatcacccaaaaaagaagcaaacagggttcatgatcaaaccacaacacaaccaaaccaatcatcagagacgcatgaagcacatataaccggggcaattcaccccagaaacaaatcagcagaatcaactccagaggcactgtatacacaaccctctgaaatttctcaaccatgttacaccgaactattcatattacgaccgaattgacaaaaactacttccactccacaggcgcatgacaccttataaatcatgatcactgccttccaccgcaacgcacctcaaaatcacatgtatgcacaatcccacgacactaacaagtaccggaatcatgaaatcgaccatgggattggaggcagtaaacaaccgcatgcctgcatgatgaagcaacgcatacacaacccaaaaaaaaaaacgcagaatccgatagccacacaaattgaatggtcaccccaacccagcagcagcagcatcgccgcgtcacggaaccagatgcccacacaccaaaacaccatagcgtcatgcgcacgcctccgcgtccagcgagaccacccgcaacaaacaaacagcagccgcaaccgcattcgccgaaccaccacgagactagacgcgacgacgaacgccgtcgatcccatccatgaactccatgctccccatccaaaaaaaacaccaaaaatcatcgcctcgctcgctcgctcgctcgcgcgctggatcaccaaataaagcgcaaaaaaaatgaaaaaaaaaactgaggcgggatcggaacgggagctcaccggcgcgcgggattgggagacgattcggaggattggattcctctcgcgtcgacgggggatttggttttgggagggaatggcgggttggtgcgtgcgttggtggaatggggaattgaggagagagagagagggaagggaaggaggggagagagagagagagagagagagagagagaggcgcgtattgccgtttggtatacaacgagggtaggggtggcaggcgcgacagtttaaatgtcggggagcggggacacgtgtcaggtggttagggcgcaatgcagctggaatttttttcgcgagcaaattgcatactttggcttttttttttttttgcaaaatttgctgtaggacatctaaaaaacgctaatttgctataggacaccacaaaaaattggtaattagctgctggacacctgcagaattattttattatatccggagaaattggatagagaaacaatcattaaagacaagttgcccttggctcaaatgagtacaaacgtgggccccacatgtaagctcaaatgtaagccccccctctttctccccacgcagggccacgtcgaccagctggaacacgccattgcatacccacacgaggacggtgagacgccacattcttcttcgaggcgtcccggtgacactcatcgtgctactgctaccgccgcagccgacctgcctccaccgcatctctctcgtcaacagtcggttcccgccgcgtgctcactagccgccggttcctccaccatttcagcgacctccacatcagcgcgccaggggctcccctcgtcgggttcttccacaaccacaaccatggcgcctgggcgaacaaccgctccatccctatcggcatcaatgacaccggggactgccgtcggagccaccatcgcggcgccacgacgcgtaatcctgacggggtgttcgccttgggcgacgccgccgagtggcacgtcgtcggctcccgtggcgggcgcgtcctcctccttagccccacccagctccgcctcctcgtgctagagcccatgcttggtcgccgccagtacatcccggtgccaccggcgcccaagtacaggccgtcatacttcagcaacgcgcaacaccgttccaaccgaggtgcccgcactggcccgcgcctcgtcgcacgatcaccagcgctccctcgggctcgcttgaagagcagagagagaaagagagaaagaatgagatagagaagaataaggaagaaggagcagagaaggatagagaaaaaataaaaagaaaaaaattcgaagggtagaatcgtacttacacagttgtttctctctgcaatttctccggatataataaaataatctcgtgggtgtccagcagctaattaccagtttttggtggtgtcctatagcaaataagcgtttttgcagtgtctcccagctaattacacgtttttttgatgtcccatagcaaattttacaattttttttactattgttataacttaaactatgtatgtaaatggaccatgtatgtttaccaaaattctgccctacaggctacacctgttcttctacctccagttttttctcttctctagttctcttatgtttctatggagggtgaaagaaccaccgatgacagattggtagctaatcgagcatccaccggccaccattgccatgcgcttgagatgaaacttgaatctccccagcctatgttttcacttgagctaaaaaaataaaagaaacaaacaaaaaaaaccaattgctaggatagagggggacatgtggagctcgagctcaagcgatgcgtcaatgttggcaaaggttgagatggagcatggcgctgatcagtcgaactagagctcaagtgcaacatgaaagctagtaggactcaaggtggagcacatcaccgatggaggcaaaagatcaactgcggtgatggtgcctacggagctcaaggtggagtgcatcaactaagatgcttgtgctcaaggttgagcacggggcagaggtctaggttgagcgtggcaagcacactatctactagactctagctaaagacaacatcgacacttgtggcaaggttgaggtttcccgcacgcactacactagctagcctcagaactcgaggtcatcattgacggtgccactgatgatatgaagaggatagagcagagggagggagccgttggtcaaaggaaagaggagggggatccagattccaggacagagccatataaggcaagagtctcacgtatggttctcttgagaagagcgtaataccaccaccgatgagagaggggagggagggagctggagaaaaaaacaagtccaaattgaaacaatttgtcaaaataggtggtccaaactagaaaggtttggttacccttgatccaacacgtaagtgtggtaaaaaaattcatatcaatccaataggcaatttactgttatttctcatacatatgagcatgcatatccacaattaatccttctattcacatgtttaaaagaagacgaccaatgataaatatgtgatttttttactgtatttatattttgtataggaagatcatacatatgttcaaaagaaaatcataatgttgtgaccttactaaattactattttatatttaatacatgggtggtagggtttgataatggataccagttccgctctcatgtggctttgtttattgccatttcagatacgtaatttcgaaactctgcaatttcacagcattattgtaatatatctaatacaaaatatactagctcctatgagataagaattttgataaacttcatggattctttgcaaggtacaaacaattttgtttcatttcagtccaactttatctgtgcgtttttcacattggaattcttctccccatgtttcaaaatagaagagctgtgctattgtcttctgacctagcaccacatatgcaaaatatgaaaccatgcaaggatgcattcactattcgatgataaacaactcaggttgtgatattacttacactgtactatgaagatagcatttgtatggcgtggtacgttaaaaaatcggagggagtaaaattgttttctctcgtggcagagtaaatttgaattttgcaccgctcaaacatcaaaagcatggtcctgttcggaccagaatggtacggctctgatgctctggcacaaatcatgttcttctcgtgtaatccctccgtcctggggatttttgatattttacttttactgtttgactacccatcttattaaaaaaaattatgcaaatataaaaaccaaaaaagttaggctcaaagtactttggataataaagtaaataaaaaaataaataataattccaaaatttttattatcaaccaacaaatcagccagccaaaaggcagcttgtcattacaacttgatcgattacttataaataagctgtatcatactattatgtgatgaaaaaaaatgattaattaaggatcctttcgttcaaatggatccacaggggtttattcgccagaaaaacatcgaggtgagattaattcaaaaggtggttcacggcaaaaaactgtgaaacatgtaaaacttcaccaaaaaaaaaaagattctccataatgagttgataagatcttacattgcttgtccttttcaattagacatgttgacatggcagtaggaaaaaaaacatttacatttattttgaacagtgtatggtttgtcattcatttgggaagcacccgtttggccagttcttttcttttcctctccttttcatttcggtccttttctgctttggttggttcgcctcttatatccttttttttctttaattaatttcttaaagattataaaagctcaaatctatggtagaaaacagaatgcccgaactttaaacaaacaccaaatacactcattcgtcaacgatgtaatggccatcatagacgaattagcatttagcaaccagactattgacaatcccttcttctccttctccaccttcccattagccaacaaaaaattttaaacaaagtgaatgaaaacgagaatctttcttccatttctcaatttaaaaacaaaaacaataatttaatgacaggagaggtgaggttgggggtccacaaccccagagagtcgggagggcgagagatccgattcggtgcggggtaggcgacccacctacccattctagtaccctctctccctcccattttaaacgtagctataaattttcgtgtttaattttaatcgttcattttattttataactaataattttatatagttattagatgataaaatatgaatattactttaagtgtgactcataattctattaaataattttttaaatataacagacaattaaaattagacacgaaaactcatagctgcgttttttaaatggacagagggagtattctacagtacaacattttccttttataaaaaggagacgagacgagtcgctcgcctcgccgccaccttccccttccccccctccgccgcctcctccgccgcgaaacgaaaggcgagctctctctctctctctctccgcggcgcggtcaaaaccctagcgcgcgaggaggccccccccatggcgcagcagctctccgcccccttccgcgccgccgcggccgccggatcccgcgcctccgccgccgccgccgatcccgccaaggtatcgccctcccttccattcctcctgtgctccctctccctcaccttcttccccaccccccctccggaattttccggtttgttccgcgtcggggttcgattggcagagggttgggacgtcttcgttcgttgtgtgactagttgtgttgctgatactgcgcctagatttcgtcttaagcttggtttccgtgaatctgggaaccttgggttggggggggggggggcaaatgctggggttcgtttcttgtttatgtgcgttctccctggttgcttcgtactataatctgttcatttctgtgctggagtatggaggttacttttatacatactagtggagaatcatgtacccaggcgctttattgttatcagcaaaaagttctgtactgttatcaacatagttgattcttggtcaaagaaatcctattcacactcttcaattaagatgttaatactattcactctcttcaattatgtgttgctcatagttagtttgttggatttttagttttttagtagtagaaagatgtccctcctgttgatgcgatttgcctgctatggaacaggtgttacgcttgagaagcgctggctcagctcagttcacctccatcgcagcttcctcttcattgtaactgcctgcttctaatgcctatttcttcctcttcgttgtaagagcgcttttttgatctgattatgttttaacgcatctaaataatttttttaactcaagtgctaggaacattgagccgctgagagcgatagctactcaggcaccccctgccgtcccacgtaagtgtctggtttcccaaacaaatgtgtaataatagaattgtgcaggcagcagcatttgattattcctttttgtttctgtctgtagaatattcgagtggcgagaagacaaaggttggcatcaatggtgagttgcttctgtttattctaggaactagtccattaattttaatgggatatattaatctgtttattctaggaacctagtccattaaaaaaattgctataattttaatgggatatattaatctgtgctggccaatgcattttgtcttgcatgcgttttttcttttctttttttgcaaatatatgatatcaattgcaactgaatgtgttagttcgagttccatgtctttaggttttccaaaagcaatttttagtgctcagttaggtatatgctacagcaactgaatcacccatggcttgttggcagaagtagtttacagtttattgtaccatacatcaaaagtaggcgaaataatttattgctatttgtttgtaatgcttgtcttatttttttggtatcatagggtttgggcgaattgggaggttggtcctgcgtattgcaaccagtagagatgatattgaagttgttgctgtcaatgatcctttcattgatgctaaatacatggtaagaaaatagttcaaattatttgcctacctcccatatttcataccttggttgcttcatttaatcaatgaacattatattttcaattttggggggatgaagttttgcttgcatttgctacactgcattagcttatatgatgccatgttacgttcttttaggtttgtaagtgttataaaccttgacgaaaagattggccttttctcagcttaagctaaattaagattgatgcagataatattttatttgaaatcattgaaaaacctacttaatgtgcattcaccttaagttacttaaatatgctatgcagtccattgtgctacatttcaatttgctagttatatattggcacagtttcttggttcttccatataatcacacgaaactgcatccctaccttatgtgttcggttcaatgaccataatagtccatttcaatgttttactcctaatgcaacataattcctgtcactgtgggagtaccaacccatccttccatgcggatgcaacatttggttgtgccttttctttctgtagataatctctttcttttttccaggcctacatgttcaagtatgactccactcatggtccatttaaaggctccattaaggttgtggatgattcaaccctggagatcaatggaaagaaagtcacaatcactagcaaaaggtaatatcaagtccacttagggactagtacatgattacatagaatgtcacaattatttgttatctaagtattgtgtttgatgattattagtaaaaaaaaaccctcttgaaacattgctagtaaatttggatctcacaattattgaggtattgcatcactgtgttcccatgccatcatggattcaacctaaaattctttggatcactggaaaaataattattgtagcctaacgtataatctggtcttttgtcgtatcactgcttacttgtatagtcgaatatattacaatgtgcagccttgtgaaataaagaaaagtaaagtgtctttacgactctaaccatatctggagtatggagtgattgactgaacatgctatacggatttataattgagtaccttttagtcctagctcctaaagtaactcagtattgttgtgtacgttgtacatttggggtacttcacaatcctttcttcaccgtgcccctgctctcgatacacaattatgtttctgtgactacattaatttctgttagttcttgcatttgcacctaagaatttgcccccttcttttccagagatccagcagatattccttggggtaactttggagctgagtatgttgttgaatcttcaggtgtttttacaacaactgaaaaggcatcggcacatttgaaggtttgtacaccatttctatacattgccatctaactgagaaatggcaagcttttatattggataaaatggtgatgtttttatgccttgtttgtagggcggtgctaagaaagttgtgatatctgctccatcagcagatgctccaatgtttgtcgttggagtaaatgagaagagctatgatcctaaaatgaatgttgtttctaacgcaagttgtactaccaactgtcttgctcctcttgccaaggtaacttatctatttctaatcctgttactattttcccattttaatcataacaaacaatttgctcttgtgatttttcatattttcgtccatccaatggagctaattgatattccatggggtatgcaggttgtccatgaggaatttggcattgttgaaggtctcatgacaactgttcatgccacaacaggtttctttcccttatgaattttgtcattgtcaaggatggcgactgccatttttcagtctcctcatatcatgttgttcattaatcataacagacttgcttttctatattcagccacccagaagactgtcgatggcccttcaatgaaaagatagagaggagggcgtggtgctgctcaaaacataattcctagttccactggtgcagccaaggtacgatgaaccaaaaatctaccttgcttttctagatttctgttttggctgactgttttgattccttattaggctgttgggaaagtcctccctgagctaaatggaaagctcactggtatggccttccgagttccaacaccaaatgtgtctgttgtcgacttgacctgccggattgaaaaaagtgcatcctatgacgatgtgaaagcagccatcaagtatgtaggactatcatttgtccatgcacattatctgctgtttctgtttggtcaattgttttaagtcttaaaatgcttgagttggtatacagtagccttcaataatttgaacgtgaacagaataatacttgtgttcacaaatgaattgcaaaagtaacatatcccttgttacgtcttttgactgtgctagaaactgcggtcatgcacttgtaccgtctgaagattctgtgatgtgcctgtatgtaacattgtgaatcttttatcagatttactcataagctgtgtgtttcagggcagcatcagagggtgcactgaaaggtattctaggttacacagatgaggatgtggtttccaatgacttcgttggtgatgcaaggtaagtacttctagatgtaccgatgtaaattgtgttgtgctcaaaagggagtggttgacataactgcccctttctgcatatcaggtcaagcatctttgatgccaaggctggtattggactgagctcttccttcatgaagcttgtgtcatggtatgacaacgagtggggctacaggtgagtgtctatatttccattaaggggcttaactcttcatctttttttccaattgttctattgtcctaatgattctgttccattctttgtttcagcaaccgtgtgttggatctgattgcccacatggctcttgtcaacgccaagcactgatttgttgaaaatcctcctccgatagtatctagctaggaaaggctgcaattttgacggtctctttctgttgtcttggaataagatgtaaacttggaaacaaagcaaaaaaagaatggacattgatgtccatgacattgtttgtagcaggcggtgaaatttactctgtatcgacctgggcaagcggaactgttgagtgaaccatatgtcggcaacctgattgattcattgagtccaatgctatgccattctatatttactttaaacatgcttgtttcatgccagaaatgttcaacagacaattggcaatttacctcaactccagaatctgcagaattttgtttcaattcagcggcttgttgagagtaacagcagagaattatgtaggctgttaccaagagggaaagtttccggctattcaccttcaataaaatcagcagcagcagcgatcgaggagaagccgaaggtgtgccagagaagccgtgccagaggagccgtacgtgttggtggccataagtcggaagcaaggctatacaattgcatagttccagtagcttcataattactgcttttcattgaccatggttcccattcgttattctctctatccatcccagttttatatcatatttgtaaatggagccgagactaaagcaacaaaatctccttccttcttaaaattaaatctcatcggtcaaggtacgcaaacgtgcagacatgtaacgatatcatttactcctatacacgtaaatgaataagcatgcagcgatgtcatttactcatatacaaataaacgattagatgatgattaaaaagaccttaaaaattttagacaatgatcaaattggaatggagga

SEQ ID NO: 15988 - DNA, 35345 bp, Oryza sativa
gtccaccccctcgccgagtccgccgaccgccggaacgccgtcgaccccgtcaacccgagccgcgccgccgcctccctccgctccggccgcctttttcgtcgtcgccgtcgacctagggtgagccgtggaccaccgcctcttttcccccttcccttctcctctctcggccgccgctccgccatgcctatggccgccgccggcgaccataggggtgcgggcgccgcctcctgccggccgcgccgagtggccgccgcgtggggcccggccgtcagccgcccgcgccctcgggtgcggctgacgcgtgggacccacggcgccggccagtgcgagcccgggtgcgcccggtccacgtggaccgtgaggctgccgcgtgggccccactcccgtggacctggtccgcgcgcctcctcccctcggctgacgcaataaaccctttttaaattaaaatttaaatacagaaattcgcaaatattcatttaaagagcatataaacttcaaatggccataacatggccatttgaactcggaattggaccgttcaagtctctaatttttccttaagaactcaagaacccatttttgtgctttgttcctgcttattatatggagtttattagagtaaaagcccttttattttccgttggtcgtgtagacgttgcagcttcggaagatccgctcttcgtggaggttgaagctgacgtttgggaaagtgagcaaggcaagtcacatcatccttgaacatattgaatcccagtttaaaaaattattttgatttaaattattgcattatcgctttatttaaattcccgcgttatcactgttttatctagccatgcttatttacctttgttatgaccttattattgttattgttattatttccttgttcaccctagaataaacaaaaccccaactagtggacactctactcatggtaccactagtatgattttaggtagatgcttcgctggttaattaggcaatattaggtggttttacaactctagactttgggaatactcttatcacctggacactatggaatggttggattattatggaattggactcacacctccccctctattcaaaaccctcaaaatggttttaggctgggctcggggtgcattgttttgatagtagcacctcggccatataaggaccgatcttcgggcctctgttgcaaagcactaccgtacttccacatgtctagtgggtaaggcttagtttgtggctcagtctggttataaacaaaagtacacggatggagatggatgaagtcgggagtcgatggacatctctagggcaaatgaaggctacacgagctgcggcccggtagtcgagatgtcatggcacagggccggtgtcctgctgttaggggttcaatcctgcctacctgtcccgggggttccggccgtaggtggggttgggtcggtactcttgtttatggctaggatgggttggaaactatgtcatgtcttccgtccgtataccgtggtggtatgtggcacgtggttacacgtgagaaagatgtgtcttgtgggtaaagatgtacacctctgatcagagtataacctattcgaatagccgcgccctcgtttatgggcaagccgagcaatgtacccaagttagtgttttaattcttaaaacctgcctaacagctaaaatgtggaatggttggcctgggttggcttgggacgagctgggacccagggtcgggttgccagttcggtctgaatcatcgtaggccttgggttaaggcaggttcgtgtgggttcacggccttggttaataatattgtatagctctaggaccgtgtttacaaagtagctttgagcaactaagtgacttttaatgctgtttactgcaaaccctaaccccctatattatggctcccttgtactcccttgcatttattctgcacttgtgggtgtgtcttgttgagtacggtggttgtactcagtcttgctcaatttttcccaaacccagaagaggagcccctggatgatgaaggctttggtgtctagctcgtgcctgtcgtcaagcgcctgtggtcgtcgccctagtcttccgctgtttttcgtttgtcttcttgtgtgctgggccttcgccgcccatgtaataaattaattaattacgcttccacttgttaaactctgaattgtatcaatttttggtgtaccttgcctcctgggacaaggaataatgtacgcacgtaaggaacgcccgttgggttatttccggtcgtgacaacatgacagatctattccctgacgtcataccccgggtaaactttgtcatcactaaatttcataacggttagccgattcattacttgactaatcttttgttcctgttctgtagacaacagtgtcctcccctccacatcagagcaatagtggtaggaacattgaatatgccccaggtctgattcctaatggaggcggattgtccccctctatcatcggctatcatgcccccaaggtctcaaccctcctccaaggtgccatcagggaaccaaccgatgtaaccaagaaaagaaaaactagatcatcggctgtgaacaccttgactctagctccaaagaaaaaggccaagtctaagaaaaccaagccaaccgacgacctgcctgctttggatccatccattgaacaagctctggatgaagaagatattgaggatgatgttgatcaggctgcagccgaagtaagtgatactaaaaaaacaccatcggcttcgcctaagcagataccttcaactccttctgcccccactcacttcttcagagtaaaacatctttccttgcaaaccctattataatcattatttttcagccgactactcataggttttgtagttgcaaaagaagaaaactgctataaagaagaaatcagcagcaccaattctcaaaccagcttcaccagtaagacactctcaattttactagttgattttagccgattttgtctaacacttgtctttttacagcctcctcctccttgttctcctgtacaacaatcaccgagtgaccgaactccatcggccgtggggagtcatcatattgtggaagaagaacaaccggctgctcctgctatcccagtaagttttcctttgatgcaagaatttagatcgactatattgacttagctctcaaactttctgaacttatacctgtaggttctaaccgatctcttttcttttgatatcaaagattatcttgatgaggcagaagaagatacttcaagcaaagctctagttcccttatctaacgatgcaaagaaaacacttgaagatatctcgcgtcggctagaggcctcttctctggatagcttagtggtcgactgtggatcgattaggacacgattgcacgaagttcaagctctaattcctgaagaactagccgatgtcttaactccagccgcttatcttgagcaacatcaatttaaactagcaaaagccaagctaagattagccgaacaccgtgagcgcaaggagattgaagccacaatccaagtcaatcggcagcttgtgcatgaagaaaaagtcaaactcgatcagctatccgaaggtctgatcaaatccaatatcgatcggcttgaagcccgcaagattgatctctttgcacagcttgaagaatgcaatgctgaattggatatggagcacaaaaagctagccgatctcccaaaatctgtcgaagagcaaaaagcaaggctcaaatcggctatcaagaatgttgctgacctaaccaagtccctgaagatcatttctggaactgatgctcaagatgcccaagccattgaagaagtggaacaaattaggaaaagagctatttcggctatccagcagtacttgtctcaataacttttgtgtaataggacttaaaaattcttgtaatcggctaagataccttaataccctgctgttttaacaatccttcgtgccgattaacataagttctaattttcactttcatttttggtatatatgtgccccccaattttataatgtcaacagcattgataaaattagaaaaacaactaatggcgatataacaatatcggccgttatatatcggcaaaccataaccgattacaattggaaaaacgactaagggcgatataacaatatcggccatctcaagacgatgtaaaacacatcggctgtcatgcatcagcaacactagtcgatcatgcgtcaacccaaacacttgggtaatacttcttcaagtatttgccattgagcgctcatccataaacctcaccatcaagcccttgcaacatatatgcccctttagacacaaccttatagatttgaaacggtccttcccaatttggtgaccacttgccgaacttgttatcccgagttccaatcggtaaaatcaacttccatacaagttcaccttccgaaaaatccttaggcactactttcttgttatagtgcctagcaactcgttccttatctttggtaaccttagtaagggctcgtaaacgcgattgaaccaagtcctccctctcatcggccataagattataatactcatcggctgtcaaaccatcttgcaattctatccttctagagccgattctaacttcccatggcaaaacagcttcatgtccataaacaagcttataaggaggaacttgaattgatccatgacaagccatctgataagaccacaatgcttcggccaaccggttatgccattgccgaggataatcagaaatcttccgcttaattaatttgatcaagctcttgttagatgcctcagcctgcccattagcttgtgcataatatggtgaagaattcaataatttgatacccacgctatcggcaaactgaacaaactcatctgacacgaagattgaaccttgatcagttgtaatagtttgaggaataccaaatcggtaaattatatgttcttgaacaaattgaattgcatccccagaatcaactttcttcaaaggaatggcctccacctacttggtaaaataatcagtcgccaccaatataaacttatgccctttacttgatggtgggtttatcataccgatcatatcaattccccaacctctaaatggccatggtttaataataggattcatagctgacgccggcgctcgttgaattgccccaaacttctgacaatcttgacaccccttataatatctaaagcaatcctccagcattgtcggccaaaaataccctgcacgccgaagtaaccacttcatcttatgggccgattggtgagtgccacaaattcctttatgaacttcgccgattgcaactttagcctaatcggcactcaaacacttaagtaacactccatcaatcatccgataataaagctcatcatccaatagagtgtacttcaacgccttatatcttaatttcctagaagccgactgagatgtattatgtaaatattgatgcacatcatacctccaatcatcggctgttattgctgcaatttcaaccttaacatctttgatcatcggcttataccccgatgccccttgggtcagatcattagcttcaatattttgttctcgagatacatgctttaaagtaaccagccgaaattccttcatcagttcttggcacttctcattataaactattaacgtatcattcttgcattcatactcccctgccaattgactgattaccagcaaagaatcccccatgatttcaatagcatcggcttcaacttccttaagcaattgcaaccctttaagcactgcttcatactcagcttgattattagtcgcataaggtttaatagtataagcaaacttgaaacatgccccctaggggaaattataactaggccgataccacaaccatgagtacacaccgatccatcaaagaataaagtccatggcaccatttcaaccgagccgattgaatcatcacgatgttccacaataaaatcggctatagcttgtcccttaatcgccttcgatgactcataccgaagatcaaactcagttaaggaaaatatccactttccaacccttcctttcaatattggagccgataacatgtatctaacaacgtcggccttgcatataatagtacattcattggacagtaaataatgccttaacctcgtgcatgaaaaatataaacataagcataacttctccacaggagaatatctagtctctgcatccaagagccgacgactaagataaaatacaactcgttcttttccatccaactcctgaatcaagactgagccgattgacttctcaccggccgacagatacaatctaaaaggtatccctttctgtggaggaatcaaaacaggaggggaactcaggtatcctttaatattatccaaagccttttgctgctctgccccccaagtaaactgctgatcggccttcaatctcaacaatggtgtaaaaggttctaattttccggacaaattagaaataaaccttcgaacaaaattaatcttgccgatcatctcctgcaattcggtcttgttttccgggggcttaatctttttgatcgcattgatacttctctgagttatctcaattcccctctcatagacaagaaatcccaagaactggccagccgataaaccaaaagcacactttgtcggattcatcttcaagccatatttcctggtcctctcgaaaacttttcttaaatcggctatgtcgtcttttattcccttaaatttaacaaccacatcatcaatatagacctcaaccagccagccgattagattatgataaatataattcatggcccgttgatatgtagctccagcactcttcaagtcgaaagttataacaacccattcaaataagccgattgcaccaggacatctaaaagctgtcttatggatatcttcttcagccataaaaatttgattataccctgcgtttccatccataaaactcaaaattttgttccctgacgcggcatcaaccagttgatcggctactggcattggatattcatctttcggtgtagctttattcagatctctaaaatcaatgcataccctcaccttgttgttcttcttgatgacaggaactatgctagaaacccactcagcatatcggcaaggacgaataaaactagcatcatataaacgcttaatctcagctttgacaggttcaagcatatcggctttgcatctcctcggaggctgctggtgcggcctaacccctggtttgataggtagccgatgttctacaattgatcggctgagtccaggcatctcataatactcccaagcgaagcaatctctaaactcttttaagagctctatcagcttggttctaaattctggagacaaattcttactaataaatgtcggccttggctgatcgcctggacctatatctatttcttccaaatcatcggccgacataaaaccttgaccttgcttgtcatcgagatcatctaccgtatccttagtgtagacacttgaaccctccacgacgccctcaaaataatagcttgggttctccatcttcaactggctgtatatcagaatcagacacttttagaaaatctccattccaaacttttccagataaacaatcaaggccatccatctcccaaatagctaaatctgcactggtaacattaactgacctgtcggctggtacgatctctattttgtcgccttgccactgaatcaagcattgatgtatagttaaaggaatacaataattggcgtgaatccaatcccttccaagcaacaagctgtaagaacccttcccatcgatgacaaaaaacgtggtaggaatagtcttactgccgactgtcaactccacatttagaacacctttggtttccgatggattgccaccaaagcccttgagcaccatatttatcttgataagatcctcggcatttctacccaacttcctgaacgtagcataaggcatcaaattcaccgcggccccaccatcaaccatcattttagacatcggcttcccattgacatagtcatttatatacaatggtttaagatgccgattctctgtcccctcaggcttctcgaacaccgcctgttttggtgacagaaccaacttagccgattcctcttccacctcgtcgacatcggcttgatcgatcccgaattcagttggcaaggtaaaaaccatgttaactagtgccgtcacaacactctttccttttaccaacctctttgcctcatcagctgcaacatcatcggctacatgagcctgattcttaacacgccactcctgcctcggttttgctttcttcagccgatgattaatttcttgctcgacctcctggaagcgttctctactcctcaatctttgaacccttcttttctgatttttcgtaaaaataccaggaggacaccattgagtcttcttattttcgtcatcttccgaatcaccacgttggtttactgggcccaatctctgatgaacaggtactcttgtctgttttggccaatttcctccatcgtacaatcggcttgaaccccctgcaacatcactgcatctaggacaatcctcgatagatggtaacctcatacattcattccaacagaacctgaagaactcacagccccaatgaggatcaaagccaccattatcttcttcatgatgcctttcctgttgcttgtcgtatttcctttgatatttgtttataattctagctgaacttacttgataacccctcatgcgccccgtatcagttgttcgaccagctgtgtgtaccatgttaacgggaaatgggttaccatcgaccctcatcggctttttggaatcatcaaacttaatcttgcctccctcaatggccacctgaatctgttgtctaaacaccttgcaatcgttagtagaatgggacccagaattatgccatttgcaatatctctttttgcctaattcctcatccgatggaatcgtatgaccagcagggagttgaatttgcttctctcggagtagcagatcaaaaatcttgccagctttagtaatatcaaaatcatacttctcttcctttccagaactctttacccattggcacggtatgacctttttactcctcacccattcggctgcagctatctcagagtcatcttcatcgtcatccgacccatacatgtagggacaaacatgattaatcttcttagagcttttcctagcctccgcagacctatgctcatgcaaggttaccttttgtatcagatgtgacaagctatcaaagtcttcagacgagaatttctccctaatcgtgcaatcataccctgaaaggccagatcggctaactgagcgtcagttaaactcaagctgaagcatttgttcctcatctccctgaatctctgatatacttgtgcacaggttcatcatgccgctgcttaatcgccgtcaagtcagataacttcatctcatgaaccccactttagaaatagctgtggaattgcttctccaaatcggcccaactattgatcgacccatacggcaaagaagaaaaccaagtaaaagctgatccagacaaagataaccggaacaacctaaccctcagagcgtccacagccgatgcttcaccacactgagctaaaaatcggctaatgtgctcataagttgacacaccatcttgtcccaaaaatttggagaagtccggaactttgaaccgattggggagaggaactctctcaaaccactcagggtaaggctgccgatacaagcttccagtctcttttggtttaagcccaaactgttccctcattacatcagcaatcacatcggcccacggtcgttgctgagctgctccctgtgactgttgttgcatgggctcgaactgaccgtactgagacacaaactgaggttgagccagtccccctgactgatattgggcttgcggggaaggatgatgattttgataattcaagttgcccctggtaattatgaaggttcggctgaattttacgtgccaaatgctcgggaacaacttgaggcattactgtgccatccggctgtacatggtgaaccaagtgttctgggacgacttgatttaaaattgttgtacaggctgtccaccaggcgtcacaaacccggccgatacgctcattgagccttggtgctgaatcggctgaacgatttgctgtcttaacgacgtttgctgaatcggccgcggaggctgttgccttggtggcgtttgctggactggttgcacaacttgttgctggattggttgtacaacctgctgactcgggagtgtctgttgaatcggctgctgctgtattggatcaatagcaggttgaggcggcagaaacatggcagcaatctgatcttgcgttggccgattcacaacctgcccactatgctgtggctgctctctcattaacaaccgagggtttaccagctggcctggtgccaatactgacggagtaggtaagggagtcgatgccggctccgtcggctgagctgatggtgcgacggggggaactgcctgaatagatggttgggtattagtgatcaaaggccgataatttggaaagacacctccttgaaaataaactgggcctgcagcctgatgctcaactattgatccatcggctattgacttcatcatgtttgataaggtattgactaacaccctagactgattgatcaaagcatggtgcacagcatagtcgacccggtcttggaaattattgaaaaaatcttgtgccgcatcactattctgattaagatttctcccttgcaacccctgagcaccatcaccttgaactccatgcactccatcgccttgaactccatggaccccttgagagttgtcaccttgacttcctagagaaccgtcggtagcccctttgtcactcagtcgagccgagccatctggagcttgtttcccgtcttcacctttggaagaactggtcccagggtcatcggcaactacctttactttatacttctgaaccaatgttcccttgcgggtctgcatgaatgagttcaagaactgatcccgggcttgctgcaacattgcttcaaaatccttcttctgctcaggtgtgaatttctctggatcgataggcacgacgtttccttcattgatgtcagtcaaccccaacttctggatcttttctttaacagtgcttgggctagccgaggatggcgacagcggtggcttctcggccatgaggaagaattgcttgctgacttctaattggtcccaccaggcgtgccaaaagcgtgttgacagaaaacacgaggcctgggagatctgcttaactccagtgcaggtccaaagctcgccttcgaatgtatgagcgtgccagttgatttgatcctgtaatcaacaagaaatagagacaaagaattcgtggttaaatctataaatgatagtcgatcggtaaggtgctgatgacatatcatttatctttgagccgatgtcatatatgaatcgatcggcggttataaatagatattaaggaactaaatctattcgatcggctgtagatattaacgatatatagttcttatattaatatatacttaaatcaagtgattgggatagatcggtcaccatgccgagacagtataaatcacttagatcgaaatatatattaataacatgattatatatgtttatagcatagccgatcagatagatctagcatgtatcggctaatactccgatactactttatataaagatattaaaacaaatataatataccaaacaaaagcttaatatacttaaatgcaataagatcctgacataaagggcggatttaacatgtcattgaagcatatagatcgaatatggttaaatcagataagatcggctgaaactccgatactaccctaatcggcaaccagaggacaggctagagattgatattctaagcacgacttaatagatcaaactcaactgatgcagtattaagtatgaaaagaagaacaatatctagacaatcaagccgctgggttttcataaagtggtagatatcttatataatctagaacaacatcgctatttaacctaatcggctgtcttctattaacagatgttagccgattgtaggttagatgatgatattgccaaagattatgtaggatatatgataacttgacgaattatatagacaagattagagtgtcataaagatagaatcactaatctcgagaacgtaagtcgtcataacaagttttacctcttgttgaagatcgaaaccgatgcagcttaacccgaaagcaagaactcgtcgaaacaaaactaaagcaaaaaggtggcgatgcgccgaaattgtattgaacgtgtgtgttctttttttaaattacatagggctcggggtctatttatacccgagaattacaagatatgtccataccggacacgaccactatctctaacaaactctagacttttgcccaaacatatctctaaggaagttacataaaacagcataattaatagatacaattgccttctcaggactctatccatgtgcggcaatcatcttgaagcacctcaattcaacccaatatcatacaccaaatcatactgtcagaatcggccgcatcagctcacctagtccgactcagacccagctgatcctaatcgtagccgatctggatttcagccgattcttactctgttctcagatcaatctccgccttcgactccaccttgatctaatctccttttccgatgctgatattaccaaatttggtcgttaacatacgcacataccctcgaatgttagtgagaataggaatataccgttggtttccctttctgtttcgtgttaggaggcatattcgtgggtgtgtaagtgtggtgttgtgtgtgtactagtgtatggtgtatgtacgtgtgcgtctgtctgccatgtaattgaaataaggaaaaaaaaacaattctttgctacataatgatggcgagaaaattgtttgtttgtttttgttttgacaggtgcaaagcacaagagggagtgtggcgagctgaatgcgccgctgccgctgtgcgaccccggcggcgacgcctgcatcgcgtggtgcatcaacgagggctacgccaacggcaagtgcttcgtgtcgaaactagatttcggcaataataaaagggggtggctatcaagctcggaaagtgtatgggtttggagacaaggaatttatacaggttcaggccttcttataaaagaaataataccctattcctgtccgggggatgaatccgccgagtgtattattgattgtatgatttgggaaaaaatcagcatatgcccctagaggcgcccggaccccccttatatatgggaaggagtccggattacaaaagataatctatattcctaacggaacatgaagatacaggtaaaatacagtcgtaaccgactaagtctcagggtgtttccttgatacacaagttaagaaacaaacccaagatacagataagatattctatctacattaagtatccggtacccaatccaaataccgttgccgtgtagatatgggatacccataatctccacagtagcccccgagtcctttgcagtcgaccatcatagtcttctcaaagatagtaatccgagtgcttcaaactcttcaagccaaaacctgccgagtggactgtaaagggcgaaaagataaagaatatggtgcatcgaatagatgcacctaattaggtgtagcccccaactatgtgattagttaacaaactaatcatatagttgaaagacaaaataataacacaattgtgcattatatgacaaaagcatacgcggcgcctaaataggcatgctagccgaccgctttttagccacaataaaagaaatccgagtggattacactctaaaaggttcacgaatgaacacacttgacaggcatccgaatataaaaactctaaagattacccatcaagtattatgaagattatggtaataaataagtcgaatagcctaggccatgactatttaccataatgaaaataggtatatcacataccaaggaagtgactatagtaaaaacaagtcattcctagttaacccaaacagcttttgtagcctaaaaaagcttgcaaaaacagcataacgcctttctgtcgggcacctttttaatttgcattgcaataattccaaagaattatatgaccgcataaaaaggatttgatcagcattgggcaacactgttgtgcgcataatattgccaaagcaaaatatgcctaagtccctaaggaacacaatgggccacgctgttaaaagtattgggctgaagtactgttcaggcctaggcccattagcacctccgatacccttaactgaaaaatccgatatccaagcgacgcttcgtcttccccgccggaactctcgccattttccccactccctgctacagtgtaaagctgcgccggcgaactagggttcacaactccggccaaatccacctccgaaaagtgcatcaaaatccttcccgtgatccaccgcctcaatccctcacctctcccaagccatccctcaaatcaaatcaacacatttgagtgaaaccaatggcggaagagagagaaagcttcgaaggccaatgggcgtcatccgacgtaacagaagagaatcttaaggagatggtggcgcacggcgttctccctgccaaggagatcatcgggtggcgaccagcgcacggtgaggctttcccgtctccggatactcatgagattgtggtcttctcgcatttcttctacggcggctttgctcttccgacctcaaaatttttccgcgggatcttgaatttctatggaatcagcttgcatcacctaaacccgaattccgtagtgcatatcgccaatttcgtccatgcttgtgaagcctttttggggatcaaacctcactttgccctattccgccggatcttcttcctcaagccccaaccaaacaagaacaaaccgtgtgtagtcgggggggcaggattccaactaaggggaactctgagccaaaaatatttctcgatgcccttcaagacttcgaacaaaggctggcatgcaaactggttctatgttcagaatcccgagcctgctcttcccgggtactcttgtcttcctccagtgtaccaagatacttggaactctcttccaatcggagatgaagcagtacaagccttggagttgttggaccgtatgttaaatcttaaagaacaaggtttacagggagagcagatcactcggcacttcatcaaatgccgactggcgccaatcaaggaaagatcccgcacagcattcgagttcgacggcaaacatgatcccaaccgtgaagaaccagactccctggatttcaaaatcatgaaggagaggatgtataaaatcttctcaaatgcaattgtagtcagctactctcatcagctgccagtagtgccatataatgcgttcaatccgcctccgcaggtatgcatctgaaatcctcaatctatggccaaaacataatttcatcttcatgctgagttgactaactatggaagcatcttgtgcaggaatatgcattgatgaagtcagatccaccagtctctcagcgtcggtctcctcgccaacacaccgttcagggaggtggagggccaacgatcagaccagatccgcaacctcagacctccaaattggctggtcaaacaggtcctcgcaagagaaagctggttcttgatgatgatgaaggcgacgatgataaatctggggataagggctcgcctaataaacccccaaagcgtaccatgcccaggaaaaaactggctggccgtgcaatgccaaagatcagaacatcttccaggtattagacctctcgatatgattccgcttcagcatgttatgctcatgaaaatgatgctgaatactgaaagaacactttgcaggaaaccatctgatatagatccatctggaaaagaccccgatcctgccatgacagagcaaaatatatccaaggaccccgagccgactgctgaaaaccagccgactgctgaaagccagccgactggcgcccatgcttcgggcgatagggccaacccaagtgacctgccgccgactggaaaccagtcggcaacaaccgaagcggcaacaactcaagaacccccgactggaaaccagtcggacgcaggccctgatcaagagatccccgaagtagaagcgcagacgacgacttcgcaaggaccagaggctggtaacgactcgatagctgggtcttcaggtaaagaacaaagatcacctcacgctcagctaggtacatcttcaggttagttgtcttctcaaacaatggcgatttaaataacctcagtgtatccgtctaatgtcttggaaacacatcaggaccatcaggtgatgacggagaagaaattcctcgcataaaggcgaccgacgactctcgtcctcctatcttgatcaaatggtgggacgagaactcacaagctgccggcatagtcataaaccgtcaaaaagaagatgaagaagtgtgccagctgaagaaagcgctcggagaagccactcgtattgtaaatgtaagtcttccgagtgacggccttcagtaactttgttttctttttagcagaactgaaccatgatccatcatgcagagaatccatcttcgcaatgaggccaagactacaactttggaaaagctggttctcatttgggaactctagaagcagttagggaccagctgcatgaggccaaggagtgcgccaaaaagacagagaaagagttaagggaccgaatcgcccagctccaggatgcaaacttcgagctaagtggttcatcaaaaggtaatcatctagatctgttccattgatttatactgtcataattgcatcctcaaatatttggatttcaaacagcgcaagccaccagaatggctcagatggaaaaacagattgaagccttgaaaaaagacaaagcaggactggctgcagaaagggactcagccttgaaagaaattgaaggtactgccggctgatgatctgaactttcctctttttaatgcagtagagtctgattgttataaatgtgttctgtagaccgtaaaatcaagtctcaagctcagtttgacgtcctggttggtaagatcaagaggcttgaaggagcaagagatgaagtcgccaatgtcgctacaccactcatccaagccatgttcctcaataacagtggtccgagtgcactcgacgcaaccgaaatattcgacaagctgagtgttgctccggatgtatatttcaaaaatatcaagaaagctggaagtatgggagctagcatggccttggcgatgacaaaatccttgtacccgagaattgaagttgataccattgatggatttgcagacgggacaagtgaagaagctgctcttgatctcatcaataatgcgcagagtgcggctgacaaaattgcgagtgatgttgtagagcaattccgcaacaacgacctccagccgagcgataataactctgatgatgaaaggactgattctgactgagtgtaaatgtaatacatggaggctcaatttgtacaatactggtgtatttatgctgtgcttgatgattcttgcgaagtttttgatttcttaaaagtttttgctaagctttattgagcctaaaacccaaagaagctattaaaaactttcagtcctcgcaaactaagtagaaaaaccaaacaaggcaatgataaaccaagtaagcaaactgaattgataaaaaatcacactccattattatgatgatagcccccgactggcaacttcaaggagaaaacttgatgtttgacagtcaaaatagggaaatacaatgataaagttaagcgtagaaacgacgaagatgttcaatgttccaagagttgtcgacgagagtgccgtcttcgcgcttgagtcgatatgaacctggccgggtaacttcagagataataaatggcccttcccatagaggagataacttgtgccgatctcgtgtggtttgaattttccgtaaaaccaggtcgccgactaaaaaggcacgagatcgaacattgcgattatgataacgtcgcaacccttgtaagtaccgagctgactgaatcaaagctgcttcgcgggcctcttccagtcggtgcaagtcgtccactcggtcttcttcatagcgttcttcacggaaattacggaagcgcaaagattcgaactcgacttcactcggcaacattgcttctgccccgtagacaaggaaaaaaggtgactggcctgtggcccgactgggcgtagtacgcaaagaccaaagtactgatggtaactgtgacacccatttgccggcatagggtttaagccggtcaaaaactcgagctttaatcccttgaagtatcatgccgttggccctctccacctgtccgttgctcattgggtgtgctactgaagcatagcaaatcttgattccaaagtcttcacaaaagtctttgaaaactccgccggtgaattgtgtgccattatcggtgatgatccgattgggtactccgaatctatgcacaatgttgatgaagaaatcgcgagcattatctgctgtaatcgtgacaacaggcttagcttcgatccacttggaaaatttgtcaatggccacgaagaggtgcgtgtaaccgccgactgcctttttaaacgggccaaccatgtcgagcccccaaaccgcaaacggccaagacagcgggatagtttgcaactcttgagctggtagatgaatttgtctggcaaaaaattggcaaccttcgcatgtgcgcacaattttgtcggcgtcggacactgcagtaggccagaaaaaaccctgccggtaagctttgccaacaatggtgcgcgctgcagcatggtttccgcatatcccagaatgtatgtctttcagcaattgtctcccttcctctaaagatacgcagcgttgcagaattcctgaagggcttttcttgtataactcagattcatgcataacataaagtttgctccgccttgaaatccgctcggcttcatctttatcttgagggagctcttgagaagttaaaaatcgtatgaagggctctcgccagtcggcttcaaccatggcgacatcatgggtgcccgtaacttgagtggcatctttgtgaggtaccgtcggcgtataaaggtgttcgacaaaaacatcagagggcgctgcctcgcgcttggatccaaagttcgcaagtctatcggcagcttcattgttgtgtcgaagaacatggctgagctcaagtccatcgaacttatcctccagtttgcgtacctcttgtcgatatgccatcatgttgtcgtcaatgcaggaccactctttcataacttggttgacaaccagctgtgaatcacctcgaacaattagacgctttatccctagggaaattgcaatccgtagcccatgaaggagcgcttcatactcggcgacgttgtgagacgccgaaaaatgtatccaaagcacataacttagtctttctccagtcggggaaattaaaaccactccagctccagtgcccgaaagtctttttgacccgtcaaaatgcatggtccagtgctctattttctccacgggggtatcctcttggcactcggtccactcggcgacaaaatcagctaacgcttgagacttgattgaagtgcggggcttgaatgatatgtccaaagacatcaactccaaagcccacttagcaatccgcccatttgcttcgcggttgtgcagtacatcgccgagtggaaatgatgtgaccaccgttaccgagtgaccttgaaagtaatgagacagcttcctggtagtaattaaaataccatataacagcttctgaacctgagggtacctcgttttggagtcggccaggacctcgctgatgaagtagattggtcgctgaactttctggacatggccttcttcctcacgctcgacaaccaagactgtgctcacgacctgggaggtggctgatacatacagcaacaacggctcctgcggatgtggtgaggctaagaccggtggcttggtgaggagttgtttgaaatcttcgaaggccttctgtgcttcgggtccccattggaaattatctgttttcttcagtagcttgaagaagggcatcccccgctcgccaagtcttgaaacgaatcggctgagcgccgccatgcatccagtcagcttctgaacatctttctgggtgcttggcggtttcatgttgaggatagcagtaactttctccgggttggcttggatgcccctatgagacaccataaaaccaagcagcttccctgacggtactccgaaggtgcacttttcaggattcaatttcatcctgaaagcacggatgcttgcaaaggtttcttctagatccgagatcaaatcatccttttgcttggtcttgacgactacatcatccacataggcttcaacgttgcggccgatctgcgttgagaagcatctttggatcatacgttgataagttgctcctgcgttttttaatccaaacggcatggtgacgtagcagtatgccccaaagggcgtgatgaatgaagtcttcaagcagtcggattccttcagtcggatctgatgataccccgagtagcaatccagaaaactgagaagctcgcagccggcggttgagtcaactacctggtcaatgcgaggcaacccgaaaggatcttttgggcaagatttgttaaggtcagtgtaatcgacacacatgcgccattgccctgttttcttccgaactagaaccgggtttgccagccagtcgggatgaaggacttctttgatgaagcccgctgctaacagcttggtcaattccaccttgatcgcgtccttcctgtcttgtgcaaatcggcggagtcgttgtttaataggcttggcgtcttctttgacatgtaaggagtgctcaatcacctctctgggaataccgggcatatccgaaggtttccacgcaaagatatctttattattttgaagaaaggtgatgagcgcgctttcctatttacaatctaactcggcgcctattacagcagttttggtaggatcagaaggatctaagggaatctttttagtctcggcttcggtttccccactttttgaaattttggcagcgggcacttctccttcgctcaccgtggttgcagccaatcggatttcctctcgggcagacgccatctcgcgggtttgggccatgtcgcaactctccttgtcgcatgtgacagcttgcttgatgtcgctccgtagggttaggactcctcggggaccaggcatcttcatcatcatgtatgtgtagtgcgggacggccatgaacttggctaacgccgggcgtccgagtatggcatggtatgctgtctcgaaatcggcaacttcaaagctgatattctctgtgcggaagttttcccgagtgccaaaagtgaccgggagagtgatctggccgagtggagttgcggataatcctggaattactccatgaaaaggcgcattgcttggttttaactcggagcgagggatctgcatatcatccaaagtcttggcgaagaggatattgagtgcactgccgccatcaatgagggttctgcgaaacttgacgttacggaccactgggtctagtaccagggggtaccgccccgggtggaccactcggtcaggatgatccgagcggtcaaacttgattgcgatctctgaccatcgaagatactggggcgtgtcaggttgaacagcattgatctcccgttcagtcaacttctgcttccgtttagactcataagccagggggccgccaaagatatggttgagctccttgcggtggtcttgaaatccagccgggatgtcgccgtcgtccttcttccttgacgtgctttgttcctcgtcggagttcttccgagtagacttggtgtactgctccgcgaactgcttgtagatgaagcattctttggccacgtggttggagtttggatgatgcgggcattgggagttcatgatcttgtcgaaggtgttgacgcgcgaacgctgtcgagaagagtgagcggcggttgcaacaagttcctcaggcttacgcttgcggtccttatgattgttacttccacctcctcccgtagccggcgtatttttcggcttccaactgggacccgactgcttcgatgcggtgacggcgtcttcggctttggcgtactcgttggctttttcaaacatgagcttgactgttctgggaggtttgcgcccgaatttgccgaccaactcttcgtggcgaatccctttggtgaatgcggcgatgatgacgtcgtcggtgatgtcggagatcttgttacgttgttcagaaaatcgccggatgtaatctcgaagagattctccggacttctgaatgacgttgtaaagatcatattgtgtgccgggacgctcgaaggtgccttggaagttggcgatgaagtggtcgcgtagttcggcccaagatccaattgtaccacggggcaatccatggagccaagatcgggcggaatccgctaaagccactggtaaatagttcgccatggccttgttgtctcctcctgctgcgcggattgcgagaccgtagacggtaagccacgattctggattagtggtaccgtcgtacttctctattccagtcggtttgaagccggctggccaatccactcgacgcaggtcgtcggtgaaggctgcaactccgtcaaggtcgtcgtcgcggcgatccggcgagtgatggtagcctcgagctgctcggcgctgtgtgattgtgtcgcgaagatcgatggggcggcgacgaggtggtgagcgaggccgttccactcggcgctccccatgaagttcgggaggcgagtgaacagaccgctcgtcgtggcccctgctcctgcgattggatcctgctccagtgatgctgaggcttggatgacggtagtcatgagatcggaagtgggggacccggctgccagtcggcgtgtggacgctttcggagttaactgggaccgtcgccgcaatcatggtcttcgtctggttcaagatgttgacgacgtggtcggaacgattgagctcgttttggttgaggagggtgtcgagaagggtgatcgcggcaaccgcattctgttgaggggtgcggaaaaccagtgtcccttcgacatcttgctgaccgatgagatcacgtgctcggcgccctgcttccaaagctcgctgacgtcgatcctcagcctccttcgcagtccgctcacggtcctgctgctcgcgccgtagccgttcttgttcttgtgcttgatgctcctcctccagtcggcgtcgttcctcggtctcctgggcttggcgttgctcctccgtctcattattggccatgaaaacgccaaagtagagaggggtgtagttgtcatctaggcttccgtcgaagtcgtcgaagtcgttgaagtcgttgtatcgagaactaaatttgtcgtactccacgatgtcagtaggacgtgagtcgacggtgggagagctgttgtagtcatccagctgatctgtcgaaaccgtgccgagtggttggaggatgacgccgacttccctgaagctaggcgaactcggtgttgaagccgacttccgcctaggcctacgggatgaaggcgctgtcgtggtgaagacggccgctaaatcgtcggggagcttcatcaggaccggtgggtaagccccatcatcttgatctggtatcgttggagaagatgcgatctcggccgagtggtttgaagccgactcggttgagatggtcttgaagtagctttcagccgcgttcgggaatccaagcgggaccgaaagccggttctctcccgactggtctgattccgagtcgaggagagaaatcttgccgaagttgttggtgatgaagtcgaggctgccgaaccgaaacgcctgcccgggtgggaagacgaggtcgtcgatgccggagacggaacccattgcactgatcggcgaaaagcttgacgctacccctacctggcgcgccaactgtcgaaactagatttcggcaataataaaagggggtggctatcaagctcggaaagtgtatgggtttggagacaaggaatttatacaggttcaggccttcttataaaagaagtaataccctattcctgtccgggggatgaatccgccgagtgtattattgattgtatgatttgggaaaaaatcagcatatgcccctagaggcgcccggaccccccttatatatgggaaggagtccggattacaaaagataatctatattcctaacggaacatgaagatacaggtaaaatacagtcgtaaccgactaagtctcagggtgtttccttgatacacaagttaagaaacaaacccaagatacagataagatattctatctacattaagtatccggtacccaatccaaataccgttgccgtgtagatatgggatacccataatctccacacttcggcggcgacaccggctgcacctgcctcaggccgtgcccggctccggctgctcagcccacgccggcaacgccacgaaaatgggctgattttcactgaaaatttttctcatcaggctttcagttacgttggtggtatacatgcatatactatcattccttcttacaccaaggaaattcatctttacggtgctctttagtgataatattctattgactattgccagtattatcaccaataaaaatgattcccataattggcttatgagttatgttctgccatttgtacgtattacatccgtgcaaaaatagttctctctaagattgtcacttttgagtattacatgctaagattgtcacttttgagtattacatgtctcatcaatcatcttcattttagttttttttattctaccctcaactatccttgcacatctataaccataccctatttaataaggagcactatagtctttttctttaaaccttaatctaccctaaacaatttagaatgacaactatactacgacggagggagtacatatgattcactagattaaaaaataaataaataactggtctagattaattatactaccacaaaacaaggatatcatttcatttactccattttttttaaaaaaaataaatgcaacagcatggatttgcacataaatgcaagtgtatctctctctacacataaattcggttggaatcaagctatgcacattaattcattgcagatgcaaattaattcctatatatatatgaacgctgcccccatcccatttacatccatcccagaaaattctctacacaaaaattagattaatttgctcttaattcattcctggacttcttgacccccctcaaaaaaaaaaaaaaacctctagttgtcgaacagttcatcatccatggagtttcagagcagcaagatcgcagctgcattcttcgtcttcttcctcctcgccaccggcggcggcgccgccggcgggtgctccgtcggcgagagcagcacgttcagaggcaactgcgagatcgacggcggcggctgcgtggagtcgtgcaggggcgaggggtacaccgacgggtactgcttcaccgaggtcgccaaccctggctaccacgtctgcacctgcacccgcggctgctactcgccggcgcagtcgacgaggaagatgatggcgcgcaattaattagctgatgattgattcgatcggcggcttgtttgaattgaatcgagtttcggtttaataatcaaataagaaattaagaatcaagcagagttcattcgaatgtgacgtagaggggcttgataggaatatacaggtttatgacaggggctattatgaaaaagttccagaactaacgccaagcgacgccaggagaaaattttcttagagacacgctataaaattaaagcagacacccataacacgtgtatagttaccctatgaacgtacgtacacacagccttctcatatgagtatactttcagaacactagaccaatattttttgagattgacgaagtcactacggacgtctcgttgcttaggggtgaaaacggagcggatattatccgctccgctccgaatccgtccgatgtgaggatatggtaagaatctttagatatccggccggatgcggatgcggatgcggattttatcatgcggatgcggatgcggatatggtatcaacgatatccgacggatgcagattatccggtattttaatcggattatccgatgtactgtttagcggataatccgcacctttcaggctatacaacaactctatttagcccattttacatcggacggcccatctagcctatctagtgtaacctaatccaatcctcccctaaatctctctctctatgtgactcttctctcggtcccttctcctgctcccacacgcgccgccgcatggcaccataggtgcgccgcgccaccgttgcagcctgctagcgccaccgtcgccactcctccttctagttcgccgacagtgtgttgtgtgctgtgtgctgtaagcagtgtgctgtatggaactagtgtggtgtgtgccgtatgcagtgtgctactgcgttgtgtggttgtgtgctgtatgcctatattgttgtatgcttcattgcctcatgcctgtcgtactgatgagtgaactactaaactgaacactacatttttaaattttaagcaacgcagtgaactgctgaactgaacacttatattatgtttttgatggatatgttatattaagcaaaattatattattgatgtgttttggttggtttttcatagagagctgagatcatgttcatatgttgtttggccatcgtattgcagctaattgtattgccgccctcttgttgtatggattgaatacaaacttgacatccgacaactttttgtccgtttccgaaccgagtccgcaccgactccacaccgaatccgacgtacgaaataatctgctccgcatccgcacgtcatccgcacccgctccgcatccgcttaaaagaaatggtttaggatatgtgacggagctcgtggctcctcaccgggagaccgcgcaggcccccctttgccggttcggccgggggcttagggtgcaatctcaagctctcgctctctctctgtatgtggaaagatcgtctgccagcaagaaacacgagacaccggcgatctatacaggttcgggccgctgagaagcgtaataccctactcctgtgttttggtggatctgtgtatgaatgagttacaaagtgtgagctgacttctcccccgttctcagcactcaatccgggaaagaatcaaccccctctcaatgggcaaggtcctccttttatacttcaaggggataccacatgcacccttccctttccaaactggactgttctttttctctttaatgggcggagattggtatggctgctgtccgaacgacacttcgatgggacagcccacacctacctccactcccggcggagacgggcgcaacgtgagatcgtggctgcccgttgctgatgcgatcagtgtcagaccggtcattcttgtccaccacgcgtcagtttaataacatgcatgtttccccttcttcgtgtaacacctcgcctgtaatggttaggatgaagcctggtattcatctaaccagggctaacgtgccatctctaagaaataacacgctagctccggcttgagacgagtgcctagaggctttcgtcttgacgggatggggcaaggcgtgcgtcagaccgccagtcgccacctaacccttgatctgaccggtctgtgactggtcacagaccggataaaagagcgtgctgtactgcgatgcacgcaacgtgacacgcttgaccagactgcaatgaatgctgttaggtgagcacagctgtgctcacttatcccatatatgtggcgcagacttctttaaggggtcggggtgccccggccctcggggccggggcaagcgcaacccgaccccccctcgggggaaatcacgaggagggcggacacctcaccctcgggcccgacgtccccgaaggtgccaggccacgtgggcgattgcgtctgcctcaagcctctggtcatgatactcccggtcccatatcaccgacagtagcccccggcgttatgccagagcaatttcccttcccaagggaagcggtcaggtgtgacgccacccctaaagcctggtgacaggtgggaccggtctccgtagttgggcaaaatacccaacagtctcaatccatgcaccttggtactggtaactttggtggtccataatgggcggtctattcaagactgccacaccacttgagcagcgcgcgaatctgggcgagcagatttgtctcgctcggagatacggtaacgccgcttcggtcggcgagcgtaattaacgcgcgcacgatacaatccgtttcgattgccacaaccgcatatccacttcatgcgccgtaagcgggcgaatgggattagtggaagcgtgggcacgggaaactagggagcgagatagcgagatacgagggagcgaagtagtgggcgcgagaaacgaggagccaggcccagcgatggcaagggtataaaagcatcgagaaaaggatttgctcccttcctttcgccattgttcctcttgccttcgccgcctgagctctaactctttctctgctacgccctaccttcgccacacacgctcgttcccaatcatctcttcctccaccgccatggcacggggctctgctctgctcgacggcagtgtactgccgccttcccgcatcgtgaacgagaggcacgccggactgccgcgccgcttcatgccggagtccgccaccggtcgggagatagtgatgctgggcgaggggcgcccggcaccagactacccggggcggtccatcttcttcctccctttcgcaatggctgggctggtcccgccattttctcatttcttcatggatgtcctggagttctacgatctccagatggcgcacctcacccccaatgcggtgatgacattggccatcttcgcacacctgtgcgagatgttcattggggtgcgcccctctcttcagctgttccggtggttcttcaccgtgcagtcggtgtcaccgccgtcggtggttggcggctgctacttccagccgcgggggccggtgttgaaccgctacatcccctgcgtcctccgcaagaattgggacgactggaagagcgactggttctacaccccccttgccgacgaagcgcgtctccgacttccaagccagcccccggcgcaggtctccagctggcgggcgccggtagatctgggggaggagtacgacgccgtcctcgaccgcctggcgggcctgcgatcccaagggctcaccggggccatggtgtacggcgattacctccgtcgccggattgcgccgctccaacggcgcgcccggagcgcctgggagtacactgggcctgaagactacatgcggacccaccagggagccagatgggattgggctcccgaggacttcaagatcgtggtccaaagggtgctgaatcttagctctgcggaggcgtctcgcattcctcaagagatcctccccctctgcagcgatcccgaccgcgcctccattctaaccattatgatgggggtcggggcctcagaggagagagcccctaagggccacgacggcgcgggcgagcgccgccgggggaaacaatctgccccaggagggggtcgtgcttctgggccccgcgtcgggggctcggggagcagccgccctgccgacgcccaggggaaaaggaagctgggaggaacacctcccccatctcctccccgagggggcggggcggcgcgtgccagcagtcggcgcccggagggggccgcgccggcgtcgcagcccgagggggagcgcaagaagaagcggctccgcaagacgggggagacggagccatgccggggaaacctgatttcccctccaaggtggtcattcacccgaccccctcgcaggttcgtctcgctctcttcgcgatcgccttttcttccatcctaaaagcaagttttttcttactcattttgttcgtcttctggttttttcttctgcttcagcaatgtcccgtcgcattcctcccgccaccccaagtccggccagtccgaggccgaagatccggcggctgcagaggagcggaggcgagaatctgaccggcgtgaagccgcagatcgccttcgggaagccgaagaggccgcccgggaggccgcccgggttcgccaagcggaggaagctgctcgggaggaggccgcccgggctcgccaagccgaagaagctgcccgggaggaggccgcccgggctcgccaggctgaggcgacagctgctgctggcgcgtcactcgggcccactccctcgggcggccctcaggcgacatcctccgaggcggctcgcgacgaggccgcgggcgcatcgcctgggcctacctcaccgggcgacgcccaggaccaaacgggcccgggggacatccccgagcccagcgtatcctccggggggccaagccgtgtcacattttctccaaggcggcttttctcctcctcttccgtcgccccggtgagcgccgagcccattatgcaggccttggccgccgcaaacaccgcggtgctagatggatttagcgcccaggtggaggccttgcgagcggaacgagcggagctcgaggccgcatgggcgcgcgtcgaggaggggcggcgctcggtggacgccatggtggaggtgggccgtaaggctcaccgccgccacatctcggagctcgaagcccgcaaggcggcgctggcggagatcgcccgagaggtggaggaggagcgagaggccgccctcgtcgccaccaccgcgatgatcgaggcgcaggactccctccgccttcaacacgggagctgggaggcggagctgaagaacaagctcgacgccgcccaaggggttcttgactccgctgctgcccgagagcggcgggcaacggaagccgaagcggcgtcccggcggcgcgaggaggcccttgaggcccgtgccatggcgctggaagaacacgccggcaccgtggagacgggcttcatggaccgcgaggccgccactgctctccgggagacgacgctggcggcgcacgaggccgcctgcgccgaggaggagtccgcgctccgccttcgcgaggatgcactcgctgagcgggagcgagctctcgaggaggccgaggccacgacgcaacagctggcgaacagcctctccctccgcgaggcggcgcaagaggagcaggcgcgccgcaaccttgaatgcgtccgtgccgagagagccgcgctggagcagcgggctgccaacctcgaggcacgggagaaagagctggccgcgagggcgcgcatcggcggggcggctgcgggcggaagcgacttagccgctcgcctcgcggctgccgaacacaccgtcgctgacatgcagcgcgcgctggattcttccattggggaggccgaggccctccgcttggcgggcgagatggggcccgacatgctttgggactcagtctcccgcatggatcgcgccggtcggcaagcgggcctctggaaaggccagacgaggacgcgccctagcaacctggaaggcctcgctccgcacctcaacaggatggcctgggtcctcgaacgactccccgaggagctcgagaagaccatcaagtcatcctcgagggacctcgcccggggggcggtcgaactcgtgctggcgagctaccaggcccgggaccccgacttctctccctggatggcgctggaggagttccctcccgggaccgaggacgacgcgcgcgcgcgcgtccgggatgctgccgaccatatcgtcgacggcttcgaggggtcggcccctctgctcgcgttcgcccccagctccgacgaggagggcgacgccagtgatgaggatgacggcggcgacgaggccggcgacccgggcgcattggaatgagcccccaggcccccgccaatcttttttttcttgttctttcttctaaggccttcatgcctcttttttgtacaaattaacttaatctgcaatcagaagaaaaaatttttgtgttagttttagtttgctatgcaatgagctgaggatgatctgtgccgtgatcctcttttcgtgtcttagcctgatttaagggcccgtgcccaagtcctaatcctcgaagggcgcgggtcggggctagtgcctggggagatccgcatgtcgagactggccaggccgggaacgtggtgaccgagggttatgggtgacccgattgtgggtttttgccgattcccccccggagttcaccacgccccggggcacggctcggttctgggccccgcttggcgattttagctgaccgaaccgagcccccgagggcaaggttgagcacgagtgaccttatttcaagttaagattcttcagaaggaaaaacggcacagacacaacctttaggaatttgaaactgcttttattgaaatgctgaaaggaatatatgtgcatgtgtggtagcccccggctaaccctgcacacccgaggggggtgcggggttagcccgagccaaaacctgacacccgaccccccccttcaggggtagaagcgacgaaggtgttcgatgttccacgggtttggcagctccgtgccgtcgcccgtggccagccgtaccgagcccggccgggggacaccgatcactcgatacggaccctcccacatcggtgagagcttgctcaatccagcacgcgtttggacgcggcgtaggacgaggtcgtcgacgcagagtgatcgggcccggacgtggcgctgatggtagcgccgcaggctctgctggtagcgcgcggctcggagggccgcgcgccgccttcgctcttccaagtagtcgaggtcatctctacgaagctgatcttgatcagcctcgcagtacatggtggcccgaggagacctcagggtgagctcggatgggagaaccgcttctgcgccgtagacgaggaagaaaggcgtttccccggtcgctcggcttggtgtggttcggttcgcccagagcaccgctggcaactcctcgatccatgaatcgccgtgcttcttgagaatgttgaaggtcttggttttgaggcctttaaggatttctgcattggcgcgctccacttggccattgcttctggggtgggcaggtgaggcgaagcagagcttgatgcccatgtcttcgcagtagtcgccgaagagttcactagtgaattgggtgccattatccgtaataatacggttaggcactccaaaacgggccgtgatgcccttaataaatttaagagcagagtgcttatcgatcttgacaaccggataagcctcgggccacttagtgaacttgtcgatcgcaacatacagatactcaaacccgcccggggcccgtttgaacggtcccaggatatcaagcccccagacagcaaatggccatgacagtggtatgatctgcagggcctgggccggctggtggatttgcttggcgtggaactgacacgctctgcatcgccggaccagatcgaccgcgtcattgagagccgtcggccaataaaatccttgacgaaaggccttgccaaccagggtacgcgaggcggaatgggctccgcactcgccctcatggatgtcagcaagaagctcaacgccttgttcctgaggaatgcacttcaggaggattccgttagccgcgcgccgatagagggtcccttctaccagcacatagcgtttggaaatgcgttgtacgcgttcactcccttcgcagtcctcaggtagagtcttatctgtgaggtatgtttggatctcagagatccaagcaatcaatctaagggagcttggagcgctctcttcgggtcccgaggcctggactccgacgggcctcgggggccggtcaggcgcatccgtctcccctaaggggtcgggtcgcgccgacggctgggtaagcctttcttcaaaggcgcccggtggggtctgggctcgcgaggacgcgagccgtgagagttcgtcggctatcatgttatcccttctgggtacatgccgaagttctatcccatcgaaatggcgctccatacgccgcacttggcgtacgtaggcgtccatctgcgggtcagagcaccggtactccttacagacttggttaataaccagctgagagtcgcctaacaccaggaggcggcggatccccagcccagctgccaccctgagtccggcaaggagtccctcgtactctgccatattattggtcgctcgaaagtcgagacggaccaggtatctgaggacgtctccgtttggggaggtcaacgtgacccccgcaccggcgccctggagagacagagaaccgtcgaactgcatcacccagtgggcggtgtgaggcagctgagaggggttcgtgctggcctcgggtattgagacggtctctggagccggggtccactctgccacaaaatcagcgagggcctggctcttgatagcgtggcgtggttcaaagtgcagatcgaactcagaaagctcgattgcccattttaccactcgtcctgtaccctctcgattatgcaagatttgcccgagggggtaagacgtaaccacagtgacccgatgcgcctggaaataatggcgcagtttcctcgaggccatcagaatagcataaagcatcttctgggcctgtgggtatcgggtcttggcgtcccggagggcctcactaacaaagtaaacaggccgctgcacctttcggcggggccgatcctcttcgctaggggccgtatccccggggtgctcttcgtccaagtggcccctcggggcacactcgtcttctgtgctgatgacctcggggtcggaggacgacaggagcggccttcccacagtggcctcggggccgtcctgggggtcgggggctcctggcgtcgtcagacaagcgagcaaagggccagctccggtcgtcaggggcctcaggcctcctttcggctcgggggcctcttctccctgctctctcccgggtcgagtcagcacagggttagcctcggggtcaaagggcggtaagtgcggccttcccttagtggcctcggggcctctgagggtcgggggcacccagcaccgtttgacaagcgggcagagggccgactccggtcgtcgggggccttaggctaccgttcgactcgggggcctctcctccctgcctgctcccgggccgagtcggcacggagtaggggtgcgcaggatgaggattgtcctcatcgcgctccacaactaacgccgcactaaccacttggggggtcgccgctaagtaaagtagcagggactcatttggctccggggcgactagaaccggaggagagctgagatacgccttcaactgggcgagggcattttcagcttcctccgtccaagtgaacggccccgagcgcttgaggagcttaacaagggtagcgccttctctcccagccttgatatgaaacgactagggcggccatgcaaccagtgacgcattgcacatcccta

SEQ ID NO: 15989 - DNA, 2248 bp, Oryza sativa
ccgggctcgggaaaaaaatggggaaacggacgaggggagcacggggatgctttttatgggctcgggaaggcgggatcgaggccggacgtggcggaatcggccggcgaagtggagcgccgtcgtggggtggtggaggggttaaccggcgccgtttctagcggggtgagtgggggaaaaggtggaggacgtggagggggtcgtgtccatgtggttggatgcgagctcgggtgcgggaggtcgccggattttgcggcgacgtggggcggctcaggcggccatggcggttgcagccggccagccagaggaaggaggaggagctgacgggtgggaccgccggtcccacctgtcggcgaagggagagaaggagggacgcaaaacagacttttgcaagcgggccaaggaagaagggagccggcccgagagagggaggaggcgcgcgggccgcgggagaggaaggagggggaggaatttgggccgagcccgaaagggaggaaggggaagtttaatttgttttctttttattttaattgatacaatgatctttgtgttattaaaactatttctcgagctccgaaaattcacggaaaattccggagagtattttagggcacaaagaatattgcaaaatattcccggccaatgatttttaagggaaaattttaattctcccattatttcacttgattaaattgattaactttttattcaatttctaggaaatgcatcattaaatgatttttaatcccgaacgaaaatcggggcgttacaaatctaccccccttacaggaatctcgtcccgagattctgggatggctagaaagaaagccggtgctgatgggcggtctgactgatctgctgacacatgctgcctctttctgattcgaactgactgactgactggtttcatcggattagatccctggagttctggtacccaacacgaccgattagctgatgaaacctatacgagcgatctggctggattcaacactgttgtcccgttgcttcccaaacctgaattgattggttctgctcaaactgacgcagactaggactgcctgtactcataaaacttacttatcttgggctgaactgtcaatactagcaatttgataacccgacaattcaccaagctggtagaagagggtgaaacttgcatctggcatttgtaactcattgatcctacgtccgcttgaacgggtcctgactcgaatgacacgtaattccaggaaacctgcttgacaagtctttcgtctgaactacaaccgtccctgatgctgcttctcaaagctgagctattgacctagcctcaccggtgtacctcagaattcaaacggatgccctaagatcggcttagctcttctgataccttgcaacaggcttcttcaagtgctacccggattgttgcagtgggttgaaccttcaactaaaacagcgatgaggtgagccaaaactcatctccgagacctaccccccttacagtgggtagtcttactttcgcctgactgagaacctttgaactgttgtccttgaaaaaatgaccaacatttctcggatttacagatgccctgactttgaagactaaaacttcatcggtccatcaaattgaagcaatggcgatgcactttcatcccgacaagatttggaacttaagccttagttgatgataggaaattccacataaaagtgactctcatttagctcatggacacactgactcttgactgcaacacactactgctggagttctttccgctacacttgaccttgcatcgagctttgcatctcccgcatcaatacatccatcatctaatcttggacaccaaatgttgatcacgagcagggttcttctggcactgggataccttgtagctttcaactgaaccattgattggtgactttaattgatcttatctctgacactgaccatccgctgccaggacggaagagaggtggaagagaggggttgctaaagataaggtactaaaccacttgcctactgatatgttgtgagtagacttttattcttcaagttgcttaagcaaacaacctagtatggtcgcatccccaccaatgatgcaaaccatacccctacacacaagcaaacaacacacgatctagaaagctaacggaactactcttctgggaaagattgggtttaggtcatctccgagaaaactccacttgatcttcgcagaacgacgactctgaactgatcttctcgctccttgcacgaagcttgaggctc

SEQ ID NO: 15990 - DNA, 15532 bp, Oryza sativa
aagttatatcattaaaattctgaggacatgatctgagcaaatagattggtgaaatacgtttcaactaagtttgcatcacaatggaccaactacaacacaatttctctttcaggcaatctaccgatatgtgaaaccagcattgatcaaaacactcgtagttcctttaacatcattgaccagaatattgagatacgcttgggggtgtgggtttagttaactattctttcctactaaaatcttcaacctgagactaaaacaaaattgtgttccataaaacaagtaaagtaagactaaaacataattgtgttaaagaaaacaagtagtgctcataagtaatgaatcaataaggagattagcaatgctatctgtcagtaaaggtgcagtcggtagcttaccttaactgctgtaagtctagttatttcattacccattctatcaacaagaacgggaaggcatgccggcagttccctttggagaccatcaccaaacgtggatagcgcaaggctcatgcaagatatggcacactctttaacttcctgaaacaaatatttccataagagacctgagagagaaagagacagatgaggatagggaggtgttaattttgctcaacctgatcctgatcctgatcctgatttgccaagcgggccaagatagccttatagattggaccaatatatggcctgtaatctggagagtgtggctgtatcacaaacaaacaaaggcttcaagaaacagaacttagattttgttcagcaacatatgaaatacaagattgacctcagaatttggacgaagtacacgaactagctcttcgcagactcttaaagcctcagcggtgaccttgtcatatctgtctccaatagcagacaatattgggccagaaagagcctggaatttcactacgatcaatacaatgatgacaaatgccataagtatattttactgaagatatatgttacagttacctgtatgtatggatgaaacacagctggggaatgtgaagccataacaagtcttgtaaatacaagggcttcaatcttcaggttggaggtagatgacttatcctatgaaaaagaaaacaagttagcaacaagtagaagtcctgcacataatcttttttagcaaaatgggaatcaccaacattcaaagcgttctcaatcccaggaacaagtgacccaatatgatcagcaagacagtctggcagtacaacaacaagctccttcaatacagagaatgctccaacctgaaattttatctaaaatcagaaccaggtcgatagacatgatttgcagtcaaagagctcacctttgtcttgattgatttttcacgcaactgcctattgatggatttgacaaccttaggtacttcttgtttcagcaaccatctagggctgaaaagcaaaaggattgccaacataggctcagtgctctaaacatggtagaatcaacttcaagcatgtaaaagtatttcaccaataaactgcataagatgctataacttggaaaagttgaaaataatgatgcaaataagagcacaatagacttgcctagactcatcaatgtcaccttatccttttgtcatgttaccagtttggcgtaacaactcaataaatgtgttaaagatgtcgatctagaatcatatagaagcttcatcagattgacaaacagaaagacaactcagagacaactcagagactgacaaattattgatacaaagcaattacctttacattttcctctctttccctaaaccattcaattaactttggacaagcctgcatatattttaaaaaataaaaacatcaaagttaaatggggcactcaaagttaaatgggtaaaaatcattacagaaacactgtctgaaacatgggagaaatttaaacatgccatcaaacagaacatttttcagataatcatatgttggtttaacatgattatgtcaatatacctccagatacatcttagacaacatttcaggacgagatactataattgcatataagcactttgctgaagccctccggactttccagcttgcatcctcatcatctgtgtattcatttgcgctctcactggagaaaatatcgaaaacatattttgatcaagtaaacagataacatttatctattactgtaagagcatcaattaagtactcatcatcttcctcatcctgagcctcatcatcagtgtcctcctccatactatcggtgaaattaggatcatagcttatatattccaatgcaagatttaaaatactctcacaatatggagatatatctcttggacacctcagcataaaactctcgagggcctacattatgggaaaaaccacaggagtcatacaagagaacactcgttagtcatgtaacattggaaagaagaaaattgctagcctgcaagctgtattcacagagctcttcatcattttctgatgcacttgtacaatagtttatgagcaaaggaacaacttcagcaaggtgtggcccaaaacggtatccaaccgagcgactgtaaatgaaacaaatattgaatcaaaacttggattgcagcacaccagataagaaccactaaatcgccaaaaagtagtaaatatctggatttcaacttgctagataaatttgaagtgtgaacatgatctcatctaagctattgcgaacaaatgagtgtgccctgttcctcaaaagaactactcaaggcatacatgtacagttgaaagccaaagtaccttagagcaccaatcatctggatatttgttcgggcaatttcagattttgcacttctatttttaagcaactggacaacctcaaaagttgccttggctaataaatcatcagacagacatgcagcaagtgatgctgaagaaaaatagcatgttaacagtcagtgtaaacacctttacaaactcaagccacgcaaaaaacaacatataatagcacagcacatcagttcgacttaccaatgcaagaaatagactttttcctaacacttgcttggttagagctcaactgggataacaaggcagtcagcatgcaatcatgatcttttgtgatcaagttgccaaatctatgaagtacatcccccaatatatcaaggcactcgcatttcacttccgcactttttccctgtcaacagaagaagagttatcaaacctacccaagacatcccatggtataacaaaaccagttatatgctactaagccccaatccgtatattggtgctactaagccccaaaatccgtatattggtttatctattataggcaggtgttaaacatgatgtgctggcaaaggcaagtaattcaataaaccgctcttgttttttttaaggtaaagacgtaaaggtgaaaggtgttcttatagttatgtggatagctagacattgccagatttgcagctaaaatctgtcttgtgttaggaaggatatcacagtttcctaattaatttatccaaataaaagattgctcgtggtttaccatttgcattgtatttgctgcagtagctaaaattgcggtttgaaatttatggtggctagaaaaatctagcaatattgactggtctggaaaactatccaactttctgcaatagcggaaggtactgtactatgccacttactatcatggctctcaaactagaaacaaatgttaaaacacactttctttttggctctctgtgctgataacataactctggagttatgatactagccagcatataatgacttaggctgaattcatttcagcctgttccgaacccctctccctcgttttccgcgcgcacgcttttcaaactgctaaacggtgcgttttttgcaaaaagtttctatacaaaagttgcttaaaaatcaaattaatctatttttgaaaaaaaaatagctaatacttaattaatcacgcgctaatggactgctccgttttccatgcggaggagaagggttcccaacccccaataacaaacacagccttaaattgaatatggcaagcaaacatggttgcacacctaaccagactggatgaatagggaggtaaaaataaatacatagttacaaggtttgtaaatgtgttctttggtattacacctcacaaaagtagaatgcaccatcagaaacgcggtaaacttaattagcaggctgaaactttcaattgtaacggcaaatacaaactacatggtacgaatggcgcacaccgcaagattaatatggaagcatgttttaccacaattaggagacgaattaagaacttacagcagtggcgcccttgattagctgtggggcaagagacaccaaaatcttttcagcaagtgttgttgtcgtaacttccgcaatgattgtcttcagagcaatactagcagtgtctcgatgttggtcctttccattgagtaacttatcacaaagaatgttggtcatctccaccacactatcctcaccaaccttcttgacaagtggagccaagctaaccaagagaagtaataatacagattaacatagcaaaccatgaagtgcagaacacaggaatgtggaaaacataacagaacaattgggtatcaaattgctatactaaatgtgcttcaatggatgcaataattgagacatgaagatgcagtgaaaaaaacagcagttagagagatacagaaaaaaataacatctactgtaataatcaatgtcctatattaatccagaaaattgaatgaggcagtgcaaatccttaacaatagcaactgcacctaacataaattacaaaagtagcgagatccaaattacagcgaattcttgcaggaaggagcggatgatcaccattaacaaaacaaaatgctaataagacgataccgctctcaataaagggagaaagcacttaatgcataccatttaacagctaaaccagagacttctcctgaagtatcttccagttgttgaagaacggtagtagtcaactttggctcaatgtcttggtcagctttgaagccctctttgttcaatcgctaagcaaatttgaagttgccatatatctgtagtccttatctttccctgtcatctgaaagcaaattttacacgacgatgttaaaatcaaatcatagataaataaagagcaaaattcaggtatacagttcacatgcagatcagtgaaacccataccttctccaagatggtggttatgttcatgtttgccattttagctaaaccgtatccaaaagtccttttccacggaactaatcactgttgccctggtggaaataataaaaatcgagtataatgagattaagttccattactgacaaggtaaacaacacacattgtacacattgttgagtatttgcttgctgacacagatgcaaaactccagctcacgatcacagtgacaatccccagtacctccctcctttaaaaaggaggaggtgggcgtgatggtgtggtgtgctctattctgccccacttcgggaaacaaaagatcctgctctctgctagatctacggtaacacacagaattggaaatatacaggtataatgaaacgaaaacagattaaactatcaaactgcaatattctgctgaagctgcataaatgacgcaaatagtaaagtcatgtcatgtatatcacaaaatttgttcttcaaacgtcccaaatcctggattttggtgcaaaaaaaatttatactgacatgctccatatcaaaacaaactttacatttgacatgagctatatgctacatgggagcgtatcctatgcacacagaccctcgcgtgtacacaccatgtacaccaactaaaaattatcacaaaaaattttagaaaaaatcatacatgtactttcaatagtattacatctacgtgcaaagtcgcatcttcaaattcattctacatagagaataacaaaaaagataaaattctgacaaaattgcaaccttaaaactgtcagattttttgttttttttttgttacggctaaaatataatgaatttgacgttaagattttaacctcttaaccctaggtgtaatacaattgaaagtatgtgtatgattttttctagattttttggtgacattttttagttggtgtgcacgtgtgtacacgtgagggcctgtgtgcataggatatgttgccatgctacatatgaggggaaaaatgcaagatggaaatccgttctctatgtaatctggaaaatcctgtacaattcatttcttaatgaaattcaggtgggggaaactgagacttaagtcccaaatattttacctatcaggtgcccttagtcaggatgtgcgcaagcgcaaccagcgtgaactgagtagtcggagataggtggcggagaggcgccgccggcggatgtgctcgggtcgcggggtcggcagcggatgccgaaggggcccggcactgcaaagagggcgctgacgaggatggaagggtggcggtggtcgggggtcgggggacggagaaaggaggaggagagaagacgacgagctccccgcctccccggcggcgtcgagaactcctggggcgccggcgccggcgccgccaatgacacggccgacgacgaggaggatgtttggtttaatccacatgttagcagtcttaaattgagcccattaccggaccattcggcggcccatccatgtctagaacatgtttggatgggccggattcagcccgtgtcggatcccgaaaactgttttgtattatgtgggccgtacttggaacctgcaatggtataatcacctgacgtccctcaactttacgtcgactttgttcaagttccttagaccttagggcctgtttggttggtgccctgagtgatgagcctaagaaaaaagcatgcctaggtggaagaaaatctataaaatgttttccctggtcaggcatataagagggtttgttgtttggttggtaccctggacaagaaacaagcatgagagcatgaaaccatgtgaaagcaaacaagaaaatataaaatattgcaatctcaaccggttagtacaagtaaacattgtgaaatgacgccatgcaactagaatattccaacctcacctaatctaccttctttaattcggttgcctgagtcaggccacccaattcaagcgcctgagcctgagcaaccacgcctgtgtccagcaccttctcaggacttgaaccaaacagaccaatgaaaatgtcaggcatgcttcagctcaggcgaatttgctttagggcagcaaccaaacagacccttaatctctagtactagaaataatctctatagtactagaaatccttactcctagactaaacaaaatcatgcaatttcgatccttcgacagtatggatatatggtttcgctgatgtggcatcttagttagtaaaataaaaattaaaaatgttatgagactcgtattcgaatgatttataaagagtaaaataattgaattttgatccaaggccagcagcaacctggaggctaaaagatgaggcaacaccgaggcggtcggctggagcgtcaattgaggagtaatcttaatgtctgaatatttagttgtcaaaactcccccaataaactcagattttcatttagattttaagaatatatagtcctgcaattcataaaataaattagaagttattagtagttggaaaatcagatatatatttttttcagattatcaccaaaatcttaagattttaagctcccttgccttagttttcaatcttttcgtgagattttctacatggggtagcgcttttctttttctccttcctaatgcagtgatgcacaaaaatataaagtgcttttttttttggaacaaccgactagtaattactttactaatataacaattgtattatttatgtaatataaaagcataactattaagtattttgaaggtgaatttaacaacatcagttttatcataaattatatcctaatggagtactccctctgtttcatgttatagggtgctttaactttttttttaattaaattcttgacaatttgatcaagtttatagaaaatataaaatttataataccaaattaattttattaaacctaacattgaacattgaatatattttgataatttctttgttttaggttgaaaatattgccatatttttctataaactataaacttagtcaaaggtgaataagtttagaaaaaatcaaaacgacttaaatataaaacagaagtaccttatttttgttttttgtttttttttatcggaggaccaagttctgaattgccaagtttatgcattccaaaagttttccctaatctattttgtcgtctatgttctatgacaaaactgtgccgcacaaaattacacaaacattttctttgttttgcacctccagaacataaccaataactgagtcagaactgcaagctatttcttgaaaaactggacaaaaatggagtcagaactgcaagcttatttcttgaaaaactggacaatgggttaatggaaacagtcagttttcctctaaaaaaaaaaactggacaaaaactcgacagcaactgtaactatcattgattgattatgcacaccggttttggcagaattggcatcattatagcttaattaggggtgctatacttgcatgttcacttgcgacaacagtttcatcctaaacaacataaacagggaagggattccaacatgttcctgagtctgtttgagcatcacgttacgtgttagcgaatgccaacatgatacagaccaacagattggtaagtgatatggcacatcacaagcattgacaaggatcaagactcactgcaatttgttcaatacttgtctttttctcccttgcaaaattttgagtaatcctcgtcattcatgagcgaattgagctcgcctgaatcactgatcttgaccacgataatccaccctgtctcgtatggccttgcatttacctatgcaggtaacgacaaaaaaaacagttagcaggttattaaagcgttttttaccatactcaacttctacagcttaccaatccaggtaaatcgcttagttgatcattcacttcaacaacctctccagatactggtgagttaatacccctggtggttcccttcacacttacaacaacaccaaatttatttccctgggatacactttggccaacttctgggagctccacagacgcaacataacccaaatggtcctgagagcaaaataaaataaaataaaataaacttaagaaccacaagcccttattctatacgctgaatatggtaacatatgttggacctaataacgtttaagaaatagaacgcatgctctgtgtacatgcatagagtgaagcaaatggatcattcaacacactgaggccctaaaataaaaaaaaaaatgctcagagtgatagaacatctaaatatgtacctgggcatgatctgaaatcccaattgttgcataatcgccttcaacactaacccattcatgagtttcagagtacttcagatccttcagcactgaaaaagggaaaacacgaaagataagtaactgcagctgtgttttgacaggcagcaatgaagctcaaccatgcaaatgaaaaatctagaaccattcaaattagtggcaccctgaaacaaatttatgggtgcttctgcgtatcaccatttgtccaattacttttgcatatctagataataagctcttcccttggctcagttattgtgcgcaattactttcgatttatagatgtgactgtagcacgccaaatgtaactggaattgaggtctgcaaagagtccaatatgtaatttttttgccttttgtatatatgaaaacagaaaaataaatcattatttccaatcatatattggataatagccaatttctcaagaacaagaatttgccattactcaagaagagcctagtggcatgcagttgttatccaatcacaagatggaaaatttatgcttgtgaaaacaagcatcaacaaagatggcatagcaagaacctttgtaggtgcaatttttttacttttcatgcagtgaaaaagaggtggtggctgagactattgcacccaatccaatggcacagaatatcctagaattccctcaaaaaggaatatcgtatactttcaaaagggaatagattttactttttcattgtggatgaaatttagttgagaattttaccttcaggaaatggggcaaaccaagctctcatcttgttatcaagaaaatgcatgtaaagataaccaagagatccatactgtggacagaagaaacaaaagaattagacaccattatgcgacaaaaatagacaatagatttggcataaaacgaagttacctccttatcaacctgctgacacacccagtccttgaacattccacactctcgttgtgcatctgtgggcatctggatgaatgaaaggagacgaaattttatactcctaagaaaaaaaataaaaaaaggaaatatttagatacaataatacatacataagcacgagtcctgcccacaaggcgatgaacctacaaacaaatgtcaaacaaatatgaatattataggcacaagagcattagattgtctatttgaaaatagcacaaaccaaatcatccatgtggtgatcagcatggggagtgctgaactctttaagccgtgtagtgtaactctacatgcccatcgcgtataagcttgagcacatcttcatatgacttgttgttgaagaggatctcagatgcaatgaaatgatagaagtcgtatctatcattcatcctctccatttccttaagaagctccaagcaatcttgcacagcagcttcaatttggaagtacagcatcttctgataagattgtgttgcaatggtgatggctttggctagaactgtatcttctgtgttaccacactccacggtatccatcagcttgtgaaagaataggatatattgtaggtccccttcaaacgtagaaggacgcagccaatcagacgttatacgctacaatagtagggaacacatgttattgttaagaggatgaaaacagttggaaaaacatttttttcctcaaaaacgaaatcaaaagagtagagacagaaacaaaaacgatgtcagtgttaccggaacatcagaatatagcagaacagaactatcggaattatgtttttttgtaattattttcatgggttatcagtacaatatgttttttttcagaaattctagatgaaaatggtatactgataaaaagggtaattcagtagcattttcacccctattaattgttgacatgtagcaatatatatgctaattagttggacaaggtagtgggagtaaatgatactccctccttcccaaaatataagaatctaggattggatggaacatttcctaagctgtctagattcgtattactaggaaatgtctcatccagtcctaggttcttgatatatgggagtgttgtattttattttagctaagtacatattatattgtttgcatatgtgtatgtgcaactactagctgtagatgatacagcaatatatattggaattttctcttttctaaactcagaacctatgatttaattatttgagatatgttgcaatgccgcgagcacgaaatcaagccagaagatttaaatagagatataaacaatgcttgcaagtgtcaataacatgctagtcaaatatttatgcacaatgtcaggcagcaagagtaaaaattgttgggagggaagttattgaattaccggtgaacggttgaagtcggggaagaagtgagcgtaggagggcgcagacttctggcatcgcgaggcaaagcagaggtaaggctcttccagcttgaaagggaggaagagctcctccacatcggcgtggctcgtgaagagggtgtgacgcgggatgtggttgcagttgcagtgatgtatcctgcgccgtgtgttctccacggctagctccagctcactcaaattctcctcctcctcctcattgtctggggttaatgcatgtgttcttcttctccctcttcttgttgccttcatattaggccaatcccctctcttcccacggctttctgaacagattactgacagctgttgtgacatcctcaggaagtcgtcgtcgtcgtcctcccacggccatgcctcctcctcctcctcctcctcctcccaccgccgcatatccttctcaagctgccgccgtctctccgcctcccgccgccgctgctcctcaatgcgcttcctcatgaggcccttgtcgacggggtcacggagctcgtacaggggcactctgatgaacgcgacctcatactccgggatgtcacggctgtcggcgaaagcctcgggcggcaacactcgggtgatgaaatcttctggagggacgtaatcatggcgctccttcagctccatgaagagatccatcggatcggacaaacaaacgagcaaattccgcccccggtgaccggtggagcgagagtgcctggggttgggggtgacggtgggtgtgggtggccgccgccggcgatcggtggaggcggcagcgagattggggtgggcgcggctgatcgatgccctacttttactgaggatggttacgatgaggaggagttggagggcgacgtctgcttttcatggcccagcccgagcccgacccagccaagccagtacgaaaccgactcttgaaaaccaaaatttaaattttcaagcttgatttttaaggttgattttataatacttttaacataatctctttttacattggcttttaagttgttacaaacaaatacataaaaattttatctcctaataaatcgttttggcttaggaggaaatattagcatcccatgaagctctcaaggagttgttgaactgggcttgtatgtttgcttcctgaacgagactatatgattgccatatgtttttttcgtcccgtacaaaaaatagagagtaaaatgcatggagtatcaattaacttgtttatgcaacttgggattttgccacctaccaaaataccaagtatattattctattcctacacatatttctgcaaattttctccaaaacggtatattctactgaataaagtcttgagcggaataaacagacaagtatgatgaaaggtgtctcacagtgagcgactactaaatgaaagaatcttttaaataaaaacaagggtaatgaatgaagtctggtttttaatttatttttttttctttttatttaaaaaaccgattttattcatgacccttgtttttatttaaaagattctctaaatgacaatgccattattatcgtcctccaataaccggattatatccaaaccggacgtacacgtacacggtcattggaggatgataattatgacatggcattttgattggaaagatgtattttagttaaaacagaaaataacaaggttcgtagcataaatgaagtgacaaaacatcttacaggttgggccagtgataaacaaacatcttacatgttgtttgctctaacagggaagaagatgtgaaagaaaatagtggtgagagagacaatcgagtgactctgtctcgagtctggctcgaaccagcatacataaagcgatgccgtcctatggcgatgtcacgctgatgctcaacaaaatttctgagaaatctcaccaagctgaccaggctgtcatcataatcgtcccaattaatctggtttgagcagaggaaaacagaaaatttggtgcttttctttaccatcgactgccacacccagtctcgaaagttttgcttgagagaagtgtttagatcgacacgtttgctctcagcaaggtcatacaatctctcattcatgggctcaatagcagcgactctttctttatccgaggccaagatatatggatgtttcatgattacctcgacgtcatcactgccaacaaagcgaagacatggatggttttgaaacgatcgaaaaggtgcaagatatatgaaaaacttagttgttttcttgagaaagtagtcaagttggatttactaaagtgaagtgcatgcatgctacgtgaactgcttagctagttttgagctattagatgatttgtaacaggagatgtaaaaacgtgttattgtagcaggtcagtggctagcccgataaaagaacatataggctgtgtttagttcccttcaaacttctacaaattccatcacatcaaatgtttggatataaacatggagcattaaatatggacgagagaaaaaccaattgcacagtttgcatgtaaattgcgagacgaatctttttagtctaattacgccatgatttgacaatgtggtgctgcagtaaacatttgctaaaaagaattaattaggcttaataaattcatctcgcggtttataggtcgaatctgtaatttattttgttattagtctacgtttaatacttcaaatgtacgcctgtatacgtcaaaaaaaatttggaggaggaactaaacacagccatactcctataaaaaaaggtctttgattttgtaatatatgataataaatactctagtgcatacaccttctactcttttatcctgagtagtgattagagctaataattttaattgttaaacttgttaggaatgtatataagtggtttctttagcccttgcattaattttttttaacaaaaatgaaatttggagtaattagttactaacccgtattgtacggtcaccttaaatgcttgatagccaagtgtattttctgccccgatttttcgaaggaatgtgcaaaatttcactcgctgagactttttggttctagtatcatcacatggcaagggacatccaccgactatcttcagtagcttgtcctgatcattaccctgaccataagcaaaagtgatggttgaattcatatagttatttccatatcccgccacatgaagtgcttccaaggcttcaaatatttcactacaaaatagattgtatgttaaatttttttacctgagctagatctatcatatgtaatctatgggtaagacattacctgatatttttcctccagcgttgttttggctgttgttttttttcactgctagattgttggtgatctattctatcctctttaaaggagaagcggttcagccgctcataacagacaaaatacttgcataagcttctgttatagcctatgaaatatgctttggcaactcttttgtggttaacttttagtgagcaactttgataactttctgcagtagccagactgtctacgagcagaaaagagcaaagaatgtcatgtggtttatcttctaccaggaaggacatcttgccattaatgaggtttgcagatccaccctcttcagatttgtcatcttctttatctattgtgtatgctattagaactcctccaacgacaagatcattggtggaacgtaagtgttgtggcacgttccactcaatgaattccttctccagcatttggacatgccatggcttctctggatcaactgcagggcaaacccaatgttttagatatatgggttaacttgtctaataaaatcataaaatagttcacagacaagtgtcacgaagcaagatttattagcgttactcattggaaaattacaagagatacttagagaacatgtagggcatctggtcctt

SEQ ID NO: 15991 - DNA, 11884 bp, Oryza sativa
tattaacaaaaactataagtttttacaaatgagaacttttacggtgtttgcatttcaaaaagggtaaagatccaacgctcctcaatcacaggtaccatgttaaaggtatttaagtattaatataggtatttaggtactaatggtaaaaatataattttgctagtagagtgaaaagggtagaattgtcctccaaattataataggtaccgcataggtacgctctacacggtatcagcgtatcttttacgtggtttcttgaagatttacgttgtattcgagttaagtcaccgtagtgttctttgatgttctcttttgcgtagatttctctagatttacattgtattgttataatacgtttgtagcctaattatgtgaattttttctacatttacattttgttccaacgaacacatgacaactcataccttaattctgttaaaaattatagtttgtttctagcaagatatttatattgtgtttcagaaacatgaccagttaaaatatcacccaaggttagcatcaatttaaattatacatttcatcaatttatgatacttgcctccaattgaacatgctatgtcaagttaaccaacaacatatcaacacaagtagtctgactcatggtgagcatgctcacaaacaccaatatcatacccgctagataaatatgtcagacaaacttcatcaacaacagcctttttacaacaaaaggtcataggttcttttccgtttgacctcttttgcggcatttcttctttcagcatatgattttcttatgctaaagcctttatcccaagcgtacttgttgtagaagtgaattccttcatcctcactattgaatgtcttgctgacaatttgttggtactccaacaattcctcaaccgatatccctgtatcctccatcagagcttaaaacctacaagaaacaacatttaatttttagaacaccctttaccatcttgagttaatttataattttaactcaaattgtacatagcaaattgctttgtataaacaaatctacaaaagctaatttagtgtacaactaatttgcatgcggtacatacgaaagaatagtgcactgcattaacaagaactaaactatgtaaataagaaaattcaatatgtgtcaattcaggccctacccaagtaaacttagggatccatgaactcggtaaaaactataacaattgcgtaaataagcataggagatcttacctatgcacttgttacgtacgtgtcaatcagattatgtctcatattcaaacacaagacagtgccaatgcttctccctcaattatgtcaccaagcaagttcacctattcaaaccctaatatgaagaacatattaggatatctctttttgatcccttgtacgaagaaatttgtgagctacataaataactaatcaactacgtaaataagcataggatatcttacttatacacacacctgtacatgtcaattagatcttgcctcctgttcaaacgctcaaccataccagagcttcttcctcaaccgtgtctcctcgtgggtacacccgttaaaacactagaagaacaccattggagaagatctcgtttaatataccacaaattgacaaaaattctaaatcccttatataaggaacttatgaactatacataaataattaatcaactctgtaaataagcataggataatttaccgatgcgttaggttgacgttgaccaggcgatctagtctcctcttcaaccctcaaccatgccaaaacttttctctctgtctccttttggcgaacctgtctccttccagtgaaacatccaaaccctagaacaagaacgaacccaagggaaagaagaatggagatgcgatctgttacggatcaatcggattgatatccgtgatttactcttttctctgatggcttaccgatctggatactgacttaccgatctgaatactgacagatggatgttagtattcaattaacgtataatgcccatgttttacaagttaattactccactgccatcatgttacaatatttttgttccgtaccttgcccctctcttatcaatggttcacgttgttccacctccaagtacctcgcaaacactgtaaaagatctctttacaaatagcaacaacacaggggaaaaaatgaaaaaagctcaatgagcaaactgttatcaggctaatggcgctatctcatccctcttctagacaacgtgtcggagcacggagctcctctagtgggaatgcaagataccttcccttcagagttcggccaaggtgcaggttctaagcttgtggccaggatgcaagagaaagaaggtgggacaggtggtttatataggttcgggctgagaagcgtaataccctactcttatgttcttactctatgtgatgatgaacaagatttacaacaggtgtagggggaatgtgctaagtgggagtgtatgaacttagtctactccagggagtcgaacttttttttttctcagagacatggatcctccccatgcatgcatgcggaagtgggacccagtacataggggttgttatgcttagtcttgtcactgtccctccaagtaggctggtcagatgggacgggcttaccaaacggctgacatgtggagcagggctgcaaaagtcttcatcttagttgtccatcagcctacctattagccaccaaagctaacaaagggggagggggtagtggggtgatagttgagggcgtgccacgtcgcacacctttttctccaggaagacgtgggcgtgtgagaggtagcatgcatggccacgtttctcacattgtatgtggtctgctatcaatattcatatcaccccgcaattaatgtgaaatggtggggtaaagtaatgcgcatgacctagtcaaatccccttaatggggcagattcctttgagacagatttctatattcattgaaccgccgaatatagtccctcaaacattcacctgggttgagttaaattgtgaaggtcttcctcgatcgcgtggcacttgtatgtaccctgaaagttggcgacgaactgagatcgagcagggtaggagatgaactagccatgatcgagcagatcctttcaacacagacgacaagtagtttgcgagcgcattgtcatctgctccagcagcgtaaagaaccgtggaataaacatggaggaattcctcagggacggtgcttccatcgctcctggttagaatttttcgatccaccgtatttctcgcaatgttggagtgaacgctcggttgtcgtcattattgcgtcgaggtgaacggcgctgatgtcggtgagcgttgtcttgttctcgtcgttcccgtcggcgcccgttcaagtggtcacgtaaatcgcgattatcttgaggggtggggtcccctgacgaggtcctcgaggtgaggtattgggaggttacgaccaggatctcagctcgaatgttcgttggggtcttcttcgacactgccgtcgacgtgcacctcttctcctcgagctgggagttgaggaggatcttgagccggaggtccagtcgccgccgcaaaagcactattgagattcaccattgtggatcgtagtcgttcgacccgccatcagggaacatgaccggatcaaaagggctctatcttaatattgagttgattgtgttcaaatgcttggcgggagtacagatgggatctgtggtcgcccgagcagttggattttgattactcggactactccctcgattacgttcacctttcgtagagtattaggtgccgaggactctagatcctccaagctatgtaaaaccgaggcctcgtgggggtccataccaatgaatcccgaaacggtcaggagctccctgggctctgttcctatgcaacgcttcgagtttgaactcgtcgttcttggatctgagggcgtggaggtttggtggcgtcaaggaagactttgcagcctaagagctcatgtcctcttgagtcttgacttatggatcagacaccaggtggtcttggttggtgaagcacgctgaataccccgttccttgcaggcttcgagttcagctctcacgtgttgcaccaccttgcagtccgtaaaagagtgattggtcgtcttgtggatgacgcaccaagtggtagatcttcgaggagttgtccttgccggcgcctgattcccagcaaatagatgatttctggccgctcgaggctacttctcggatgtcgtcatagtcgatgctctcctttctcggatgttcgtcatagtcgacctagttgcatccatgaggaaagcgagtgtggcggcggactattgctgcttgtacttgtcgccaacgaagatctcctacgaacgcaccatctcctttctccctaagattttcgccgcgaggtcctcgaactacctcatggttgaaaggtgcttgaagttaacgcgcatggcgtccaagcccgaatcgacgacgacgcatgccgacgggcatgccttgggcatccttgtgctcacgaggaagatgagtgtgtccatcaagctagcatagaggatttggggacgattcaatgaaaatccatgggttgaacccattttggacccaaaggtatatgaccgaaaaccagatcgatccaatccactttcagcaaagtccaaactgccccaacccaacagcttcgttagaccatttctacccaaaatgaaaaccaatccattataccaattcccacccaacctattagcaggcctatccacaatgcccatgcatgcatatgaaagagggacccaatacacaagggttggtttgcttggtcttgtcgctgtccctccaagtaggccggtcggatggaatgggctcacctactagctaacatctggagcaaggccgcaaagtcttcatcttatttgtccctaggcccacctatcaaccaccgaagctgacagggagggcttggggtgatagttgagggcgtggcacatcgcaaacctttttctccaaggtgacgtgggcgcgtgagaggcagcatgcacaaccacatctcctatgtcgcctatgataagctcacaagatttgtatcaccccgtaattaatgcaaaatgataggataaaataacgcacaagacctagtcaaatcctcttaatgggccagattccttcggggagacctcgagtcctgctgctatcctcgggggctcggggccctaatccacccaggttagacgtttcagccccggggtctgaaggacttgtccacgggctgttgtcttcctcaggtcatcttcgtgagcttggggcaaaggttgatgccgtgcgccatcttccccttgagacaaagtggggctcatagtgacccaagcatatgataaagtgaaaacccttgttcccacttctccgacaaacaacatcaatagcaacaaccgtggtggagcttgacataaacttaagaggggaaacattatataagcatgtaaagagtgttcaaaatatcaaaagttaaaacaaagtttctcttactataggacaggtatttaaaaatgtaaacgttttagtaaaaagtgtaaaatatagtataatgtcgacaagaaaatattagtagcgtgaaaataaaataaataatctatgtacgtcctaaaaggaaaaaaaaagaataagtagaatcaaacccctaattctcagggatgagacatccgccagctaacctacctatcaaatctaggatgttgcagtgttgcacatattactatctacatcaacttgaaaacactggaggggccactgcgcagtttgacctccattatgctctgccactggcaacaacacaggaaaaaaaaagaaaataagctagatgagcaaactgttatcaggctaatggcggtcatcccatctcacttctagacaactaatgtgtttgaggagtaggagattggggagatacgcaaaacgaggtgagccattagcgcatgattaattaagtattaactattttaaatttcaaaaatggatcaatatgattttttaaagcaactttcctatagaaaatttttgtaaaaaacgcaccgtttagtagtttgggaagcgtgcgcacggaaaacgaggtgctttctcaccctatctaatacaaacgaacgcagcctaacaacatcatcaaagttctggctaccaaagaaaaatgataacagcagtgaacagtattttttttggtttcccctagtaggccaagatcaactgcattatacaacaacatatattgtgacaaaattatcagattttaatttgttgcataggaaactgcataagtaaaatgtagatctagattattaaccaaccaacaacagaaaaagggtgcatttgttgttgataaccaaatggcaataagaaaattgaattactattacacacagagtacaacagccaacttttgtttatagttgttcaaggcagcaccagtcatttaacacacacaatcataacaattaagaacaatccaatcttggcatttgaagcaggtgtacagttctgtagcatttctctaatatatataacatcaatatacttttgcaactaagtcctttcaattcaaaatttcaaactttcaactccaacttagaacattcaactcattttcaaaattccaaattaataatttatttatcgttttactataaaagttaaattaaaacgctaagcactaggctgcgcgggggctgagcggcttacggttgcggcgcatactccctcgttccataaaaaaccaatctagtgtcggatatgacaaattatagtattactatgaatttggacatccaatattatgttggtttttcaaggacggaaaaagtaatgtgttactaggttggttttttatgggagagagtttgcgcgggtcagaccgatggatccgcatgtgaacattgatgcacgacagagtatgaggaatgcatatgaacctggaggcatgtcggcggtaggagattcagtaggattggcaatcccttctcctctgtgactgtgccgccaatccatttcctcgtcccgtcgccgcgagaacccatccctgcatatacaaacaaagaggtggccaacgttaagacgaagaaacaaagctgcatccttgacgtcccggacgagtgagtacgtgcatgcttcaagattcaagagcaagattgcactcaaagatggaagaggctgtaccatgtccttgttgttgtctgtccttccggtttgcttctccaatctcctcctcctgatactcctggccttcggaagtaggtgctcccccctctttccggtggatgcaatcctggttctggttgtggttggtgcccgtagtcgccgccgccgcgtgctcctggcggccggtatttgcctcctcctcctcccgatgagtgccagtcgccgccgagtgctcctggcggccggcgttcacctcttcctcctcccgagaagatgtgcccttgggcggcgcgcgctcctggcggccggtatttctcttctcctcctcccgagctgtgagattgagcggcgcgtgctcctggcggccggtatttttctcctcctcccggtcccggagctcgattcgtgtccatagtacgtcctggatgcatcatttcttggttagtacaagactacacagaaagaaacgtggagaaagagacgtacgcgcgcgccgccgcggcgtggtctccacggcgacgaaagatggagcctcctcgccgggcgacgcacgtgccggccggcgaggcgagaccaacacgcagtacgcacgcacgcacgcgcaaccgcaaccgcaaccgcaacggctcaggatcgatcatcgaacgcgcgcgacgggcgccggcggtcgaggagacgacgacgcgcgagagctaggtgggggtgggaaggaggatcgatcggggccgcacaccctttcctttcgatattgcttctcctcctcctccttgccttgattcttagcttccatcgctactccctcccccatccctatcattttcttgctcctcctgtcctgccaccctaggtagacgacgactactccaactggtttgcaaatctgggatggggagaggccgagagaggaggaggaagaggaggaggaggagagaacccaaaaccccaaacaccgaccacaccaccctccaccaccccaaggcttgcaggagacttctctctctctctcttcttcttggtaacgagacacatggcgcggatgaagcgaacagcctttttcttgcttgtttttttgctaacaagggaaagtgggaaacccaagtacagaccagcataccgcgcttggcccccgttgccactctgctcccctcgcagtcacaaggactcgattttgaaattgtatccattttgtcatgttgtttttttaatagttttaaaaatgatggtgaagatgttgtacggattttgtccagtttggtttaaaatatacttaaaattttcaaattttaaatttatggtcaaataattatgcccccctttgttttttcctcacataaatcattttttcacgttgagggatatagtcacttttttaaaaaaaatctaacaatcgacttgtggtcaattaacagaatgagtatagaaaaaaatcaaaatgaaaactcgatggcatgtagagaataaagcaaaaaaaaattaaggcatagaaagaaataaatgaaaattctttttttcttattaatatatatttctgtgccacttttttctttttttctcttttggcttaggccgtccttgtatataccctttttcttattaatatataccatggaggcctccctcactgtgttttgataaaaaaaataaacaaaaatgcaagtacataaggaatttgctcaacaataaggttggattcgaatgtgtagatttagtggcgcggaaaatacaacatatgtttcgctcatggtaaattgagtatgaaatattataaattaaaaaaatgaatttgtttgattttataaataaacttctattagaaaatatatgaaaaaaatattgtttagcagttcagaaatgagagagtagttaaccggataagctctttagaacgcaccctcacatatgtttgatctctaaacaattccatttagtcttaccaagttttggagaaaattgaaaaaaaaaaaagctccacgagtaacattttttgaactgaaaatttcaagtccaaacatgtgtccagttaaaaccggtcttaccaggtacagtacttgtgttttaaaaccttgattagcactgataccatttctttattaaacataaaaaaaattcatgcatttgtcctataaaaaactggtaattcgttggtgtacacacggtacattgcgtctgcatgcaagttatttcaaacgaagcttagattcatagcctgtgtttagttacacgctaaaattgaaagtttgaaaaaattgaaacgatgtaatagaaaaaatttatatgtatagaaaaattcgatgtgatggaaaaatttaaagttcgaagaaaaaaaaagttagaataaacagggccatagacaaaatagtaacctgagccacacgcccacacctacacacatccacaccggcgatgaggatccgcatcctatgcctttgctcccaagtcccaacggcaaaatttgccttaccttcaatctgaaccatccattaatggatcaatgatgtttccattgcccatgggacccacctccactaacactaaacaagagaagatacattgaaggaaaagctactttcctgcttaattaaaagaaaagacttcagaaaattaaaaggaggtggagattggaaaaaaaatcactgtaaaaaaaagggtttatgaacatatatacatttttctacgccatttgtttgacgtctcctctacaagcatccttgcaagtaatgaactgtttttttttcactgtattacttcgtaggagtatttcactatttacttcttgtggacaattttcctacttcctctgtttcacaatataagtcattctagcattttccatattcatattgatgttaatgaatccagatagatatatatgtcatagattcattaacatcaatattaacattaatatgaatgtagaaaatgctagaatgacttacattgtgaaacggagggagtagtcactatctttcattgtttactttttgtggacaattttcctagtcactatctgctttagtttcttttatttttcaagttaatattaatatatagagttcaatatcgtgtcttgttttaattaattgagcaggaaacaacaagttctttccgcgtactccccctcagaatggtagtcgaggcaaatagtagtcaattaaaacatgcatcatcctttgatctattggtctctcacccctcttcccgggggcagttgggatggcagagttgcagctttttcctagctagcgcagtcgcgtcgtgtggagagttcgatcgtgtgaaaagtttgatcggtgcggtgcagcgcggaagggcgcgtgcatgccaatgtgccatgccatgcgcggctcggatttagggtgtttagtcctataaaaaaccaacccaacacattttacgaatttggagattcgtagtcctaaaatatatcacatatagttttagattcgttttttaggatggagggagtagatccgtggatgaatgcgcatgttttctaagccccataaacagtgttattttcataaaaaaacattactctctctatataaaaataaatttattaggaaactttgttaaatttatttcaaactttataatatttaaataattcagttgtaccctcgaatagctatttattcacaacaaatcatacagtagttttctatagttggatgggcattcctcgaggttccacaaaatgaagaacacttctcaaggcaaaatatccagtgaagttttagcagagattaagttaagaggttaaggttacggtgagactacctttatacatttgagatttgacagctcattagttttcttgaccataattaaaatgaagcaacaaatacatgaaataatacaggtacaacctagtatatcaacttgtagcatttcaaatgttgtcttaaatatatacacttctctacatacctgtcataacaaatatctcattttatttcttcacctacttactgatcatcttaactactacttatacaatacagtagcaaatatttttttaccttacctttaatactaacaatgggtaaaagtagctataaaacggggcagatgtaggagttggattggaaaattggtactatagaaaacttatatttaatttatgaacagactagtcgtttatatttcggagaatgggactagtataagcatttctaacttttgactcagcagtaccatccatttctactcccacaatgaccgagagaaagctgcaaagcttttgcattaactgcaggggttgaagttcatggatccctgcaataaaaagaggaggagagattcacggacgggagtagtatggtcagggatccagggatgttccatcagtagttccatcagaccctgtttgatcagaagaaaaacaaagtgactttaaatcaaaggatttatatagtattcaaatcatatagaaaaaatttctatttggccatttgattcaaaggattgagggtccctttaaatcgcaggaatggaaaaacggaggaataggaaaaacgtaggattctgacaggaatatatgtgtaaaacagaggattggaaaacacagttaaaacatagaaatgaccgtttgattggaccacaggaaaaacacaggaatcgaatgagagagatagacttaaaggaatttttccaagaggttggacctcttgctaactttcctccaaaatctctataggattagccattctataggaattttaaaggatagtataggattcaatccttt

SEQ ID NO: 15992 - DNA, 10777 bp, Oryza sativa
  unsure (1)..(10777): unsure at all n locations
tcattttcatttgggctcatgttatacaaatcataccggccctcttctctattttagggcttctttggactgaactattttcaagtaaaatctaaatgattctaatctttagaaatgcttccctattagctcctttggaaaaaaaagaatatatttgagaaaaaacctatggacttgctctctactacccaattagaccatccccaagccagaaactatacagtagtttccatacttgtcatgtaatatagatactatgtatagaaactatctatccaatggatggtgtcttcaaattaaattctcatccaatcatctctattctctctcttttcatccacctatccatttcttgcatgagaaatggtttcttcatttttttacatctctcatcattaactctcttgccacatcatagttttgtttacgtggcaatgtattaaatgctatggacaatagatgatatggagggttggggatggccttacagagaaaaataaacgtggggtctcatgttatattttcctttgagaaatctcatccccccatttctacagaatgacattaaggggtgtcatgaatttaatcctttattagcaaatgtttactgtagcaccacattattaaattatggagcaattaggcttataagattcgtctcataaattagtcgcaatatgtgcaattagttattttttagcctatatttaatacttcatgcagatgttcaaatgtttgataatttataacagacattatcttctcagctaatcacaactcttcactattcagtttttccacatatctccacttcttatctaatcacagctctctttatttaattatacctattttttaatattttctctatctcataatataagcgatttttggtggacagacggtctgttcagattcattgtattaggatgtgtcatatctacagaaatctcttatgttatgggacggagggagtaacagtatacaagtttaaaagtgattatattctgggtgggaggaagtatggtttcatgtgacttactggggtgcttaaataaatataccagtgcgtaccgattagattacgaaatcatcgttgctcgaatatttccccgtccgctgtgcgtcgactccgactgctcgtgtgttcgcccgccgccgccgattcctatccatctcgcgagcgagcaggggcgccgtcgttcgtcctgctgcttccgccgcatccatcctggtgagcacccatccgttatacacgctctttccgatctctctctctacccacgcacttctactcgaatttgcgttaaaccctagcctctgttctgtaaatttgccctaaccttaatactaataacaatttgcctttactgtttttcttccttcatcttagctctggggggatcgatttcgtgtttgcctctctttagatagaatttttcccccaatgttcgagtgcatatattggtctggtcgggcaatcccttttatcttccttcattcatttacctgaaaacaacggcgtatcgtaccttttgcttttccctgtgctgttgtgaatacaagtgtggaggtcactgcaatgctgtgctgttcgtgaaaattgatgatgccactctagttttcaactgtcgatgtgtcttgatgcttcagtctctgatcattgctattcttaccgcttacagtgctaaagtttgtaccttgccttggaacattagtcatggagagtcagagaatgacctggctctacgatcgtcaccactccttgaaacataataaagctgaaagacaagccattctatcaacttatagattagcaaaacgtccaaatctctcttcagaaggtatgattggcgaaagttgcattgtgaggacaaattgtttcagtgttcatctggagtctttggatgatcagactatctatgaatatgatgtaagtttctgattcacataacttgtctataacatgaaatttatttgcgccattagtattcgtatctgatgttatttttatcaggtatgtgtcactcctgaggttggaatcaatcgtgctgttattagagagttggtaaaacagcagaaagattctggtttgggtggccgtcttcctgcctatgatggaaggaagaggctatacacatctggtccattgccatttgattcacatagatttcttgttctgctggatagtattgaagacagtcctgaagagtcaaggcacttgagagtgagagattttgtggtcactttaaaatttgctgcaaaaatttccttatggactttacgcaagttccgtggtgggaagccaaaccgagaaagtcgagcggccctgcgagcacttgacgttgttctaaaggaattacccactgcaaggttagctttcgttctcactgtgttccgttttccgtctttctgtattattattattcccattcaataattttgcatattcaggtatacccaatttgctggttcattttactcacctaacttaggagaatgccgacaattgtgtaaggtcttggaaagctggcgtggttttcaccaaagaatacaagctactcagatgggacttcaactgaatatcggtcagatcccaactattcatcgtggttttgtatttcagacctgagaatgagaatttctatgtcgccccttctgaaattgatcttgctttgattgagttgaacttcttataagtaataaggtacaagtggtaatgaagaaaaccgtaagattgttcatattgaaaccgtttcatatgttgtgtattaggaacacatgtcctcaataattaccgttcagtataaaatatggttacatgtttgtaccatttccgtaaatgcttgaagctgcaatatgaagtatgatacattgcagaaatcttaaggtttcctaatttatttctacttttttttgggaataatattttatttctactttaataagctcactagcattttatgcatgctaagggccaagaatgcatgttcactgtattcctatatacatcatatagtgggataagtacgtcttgaacttgcctctggtctttttccatgtcttgaggaagtttagtactctattgcagacgtgtcatcatcagtgttcatcaagcctgtacctgtggttgactatgttgcacagcttcttaacgaggacatcttattagacagaccattatgtagcactgagttcttgaaggtcaggtcgttttgtcatcctatttaatcacaaactgatcattgctattctgttacttagtacttgatttaaattcctgtgttcactccattacaagattcactttttttcccctctttgttagattaaggaggctctagaaggtctgaaggttcagattaatggcattttgttcaacacatatcatgtacaagaccttgtccatcaagcagcaaggtatttactgtatgcacttgctttcacacataaaaatattctcttgtgtctatagttctgctctaaataggccatctatgatgataataggttaatgctattttggtttttcctgcaacagttttccagttaactttagtattcagtacccatctttgccttgcttgaaagtggctcattttggggagacaatatttctgccattggaggttagtatcctgagcgaacatttattctacaatatccaacaatattaagaatggacacacactatcgtcttataaaaactgcttcttatcaccttctgtattctaggtctgtaaaattgctgagggacaatgtcaccagaaacagctcaatgcaaaacatatggctgctcttcttcaggtagctcgacagccccctaatgagcgtgactacaacattctgcaggtaacctgatacaaaaatttctacattcagtttatgtttgtttaggatttcttttaaatattttagccatgtcaataacattaagtggatcagttcaatctgcaaacttccacaagttagttataaatatcatatcatgtcatatcatggatttttttcgatgataatcaaaagacctacatgaggatgtgcttaaggtgatcatgctgtcatccttatgcacaagatttatgttatgctattaacatgtcatgagcagtgagcactagaagatcatacatatttaggagtataaactggcataatctgatctaaatgtggcacctaagccctttcgcaaacaacctaactcctagagccaccatagcagatgcttgaatacgtgcatgtatacgtgttgggaagaggagagtggtccttcactgattttttttaaaaatatttttggaggcaaccctaccactccgcctcagagtgagtatgggtcttatgggtggagaccttttatattagatggaacataaaaattatactaacatgaatgaaggcaaaaggtattggtttgactcaaaagtatttggggctaaaccggttgcctcaaatttgcataccccccggcttggcttaaagaatgatattgaggtaaacgaacatttacctcaaagtactgttcagaggctaacacattacctcagaatttaatttgaactttgaagggaaccaacttgtatgagccttaggatgcacctctgttgtgttctttgttgtagtgacatttttcattattgttagatttttgagattgtgcacacagatatttcttgtccatatgaaaataagctgtttgtcgcaccacttgtaatttgttttgtgatcttgaagttttattatctactatcatcaggcttcagttttctttatcatggccattgactattttcatgcatttgacatggcatatcaacaacccaaatttgcttaacaggtgcgattctaatatgaaaacagattatttaaagtaggccaccatatgcggattaaagtttccagttttacatgtaattagttatcatgttcttttggaaaagaacatattatgctctagattttcttatcatgttatgtctttggttaccagactgtgcatcagaacaaataccaggaggacccacatgctaaagagtttggcattaaaattgaggaaaaacttgtatcaattaaatctcgcatcctacctgctccttgggtatgtcttaacagtcatttacatatgctgattgcgatgtctgttgcatgtgttatgctgtaggtctgacttttctttttctatcagcttaaattccatgacagtggcgagacgacagaattcttgccacaacttggcatatggaatatgatgcataaggtactgaggtgacatatattgtgcatttctccttccaaattatttgtttttcagaactgttgtgattatattttacagaagtttctatctttggcaatattgcatacagctgcaaattaattttatggtaatgctttgttgtagaaaatgatcaatggtgggagagtgaaaagctgggcatgtgttaacttttgctggagtgtacgggagtatgctgctaggaatttctgttatgaccttggctttatgtgccgagaatctgggatggtaggttctctatgacccaaaaggtgattccattttttttacctcacagttattcacaattttgacctttcatattccctatgtctcaatgtaggtcttttcagttaaacctgtgcttcctctagtgattgctaaacctggatgtgtagaatctgcactcaggacacttcatgacgatgtcatggacatacttagaccacagggcagaaaacttgacctgctgattgtaatattgcctaacaacaatggatctctttatggtataccttttactttgtaacacatgtgggcagtttctttatgtaatacatgtgagcattgactgatcaattaatggtttttatttaatgtacttgtcatccacaggtgatgtcaaaagaatatgtgagacagatattggactgatctctcaatgttgtcttgcaaaacatgttcttaagatgaacaagtggtatcttgcagcgttgcccttaaaatcaatgctaaggtttgttgtgctgtactatttgcttgactggtcattcatcaggtccttatttattcctttggttgtgtacgtagatgggcggaagaaatactgtactggttgatgctttagaaatgagactcccccatgttagggatacaccaactattgtatttggtgctcatgtcacccatccacatccaggaaaagctaatagttcttccattgctgctgtaagtgcacatctcactatttaagacgccgttgcctggaggcaggagtcctgcttatctataacttttaagtgtatatgtgtgctatatgtagcaattgcatgttttatgcaggttgttgcttctcaagactggcccgaggttaccaagtatgctggtttaatcagtgtgcaagcgtgccaccaggagtcaatacaaggtctttttaaagtccaggatgatccggaaagaggaaccacaactagcggaatgatcaagtacgaatgattgtgttaccttttagcatgtgaatactatacttgaaaggtctttgtagtctatgtacataagttttgtcttatatgcagagagcatctcatgtctttctatcgagccactaaacggaagcccggaaggattatattttacaggtattaatctatgtctggcgaattgcctcatcttttcattcttttcattttttagataagggagctttattgatcacaaacgattacaccgaggtgatagaatcatacagagaacactcctggccggactcatctcttctatgtctacatatttgacattattccacgactgctctcttcagggatggtgtgagcaaaggacagctccctcaggctttgatgcacgaacttggtgccatcaaaatggtgaagtttttatcccacattttctttctgaacatttttgtgatgagcactgcattctatttctttgaaatgataaatttgtgccataaaaacaggcgtgtgcatctatgggacccgattataatccattagttacatacgtggtgctccagaagtgtcgccatacacgtctgtttgctgactactataatgcgaatactcatgattcaactgcaaacatacgggctggttagttgccaatttttgtttgctgtactgcctatcttgtcaaacctaaaaccttcttcctaacccctgtgaatttgtccaacttcaggtactgtggttgattcaaatatttgccaaccaaatcagtttgatttctacttgtgtagccaccgcagcacgcaggttgagcttagttcttctttacccaaataattctttttctttttttttcatttgtaacacgctcctagctgattcaaaattttcccattagggaactaagcggcccaggtattatcatgttctgtgggacgagaacgacttcttggctggttctttccaagagctcacaaactacctctgctacacgtaagaatgccacttgttatgtgtttttacatttttgaaatcccttgaccggtttaacggacgagttgtcacctattattgcagctccgcaacttgcacccaatccatatcagttggtaagcacgagcccccacattctcctactatcatttactgtaggaaatgtgcttttcctctagcaaaagcatatatggttacgatatatattcacacctttttcttcttttgcactctgcagtggcccctgtgcactacgctcgtcttctgtcatcacgagctcgatgttacattaaaccacgctcgattggcgattcaacgagccacacctccttgccttctgaagaagatagcagcgcagcctcagagactggcagtcttcttcctataaaggataatttgaaaggggccatgtttttctgctagaactgctgccagcaagatctgctgtcattttgtacgtggtctgtacagtcccacagttcttggtagatttgactgagcagtcaaaactcattatcgttcagcgagattcaggtgtagcagctgtaggattactgataaacattgttcctgtaccgatactttagaagaaatgaattaattatatcttagaacagcatgagtatgttacagattagtggtttcacatttaacattttgtgagtctattgatttgttatcttttttatgtagatgcgtcctgttgattagttttccttttcatggactcaaacaagcaaaaataaaaaatgggtttgccaaagaaacacaaaagttttcctttttaatataatgatgatgtgcagtacgcaggatgcccgttcgagaaaaaaaaaagtttccctttttatttgagggagaatgctgattagttttcctctttcccttcttaatattaatatataatgatgtgcagttctcatacgagaaaaaaaaagttatcccttttatttgagagaatgctccttctccttgtactaacattggggaataagttcactttgtgaccctcaaaagcgatcgaaatctaatccgtgaccctaaactacaaaaccggttatctcgacccaaactcttaaaactggtgcaatttgactctctcggtggttttggagagtggtttcgttgacgtgacgcctacgtggtgatgttgactcagtcttgggtacacgtggagttgacgtggcgcttatgtatactaaattgaaaaaatatatgcgggacccatttgtcattcacaccaaaataataatgtataactattgacatgtggggcccatatgtagtcctctttctttcttcctcttcctcctcccttcctatcccttctctctctctttctctctcctatttctcttcttcttcgtctgcaggcggcggcgggcgctcgagggtccgagtggccgcggcggcgagcgggaggggaggggaggcggcggtaggaggagacgccgatcaccgggtgatgcgccatcccggagtacgacgcccttgatctcctagtcctcggtcaccacgacgcgctccacctgcgctcgtcgggcggattcataccgccgccgcacgccaggtcgccgccgcttatcctcaaaagaatcctaccgtcattaatggcattcccagccttcttctttttgctttgacccagcaagcaagaaactcctccagcgtctagtcacctctaagttgcatgcaccagtcagtcagtcagttgcacctaaaagcctgcctaagctgatagggaaaggtggacaattcactttatacacttcaacactccccctcacgcgagaccccctcaagtctcaagtgtggaatattggagtgggctgcaattattttatttnnnnnnnnnnnnnnnnnnnnnnnnnnnnnnnnnnnnnnnnnntgataccatattaagttgcatgcaccagccagttgcacctaaaagcctaagctgatagggaaaggtgggcaattcactttatacactccaacaacctcaaccacgaacttgaatccgctgctctgctgctgctgcaactgttgcgcttttaagtgtgactacagtgtctgctactactactctgctttgccactacttggttcgcaggagggtggtgagagggagagtgtgaggagctgagagagggagagggattgggatggagttcttggtggctcaagcgctcctccttctcgtcgccgtctccaactccctcctactcccttccttgggtcttgttggtaaaggtggcacgtccgattcataccgccgccacacgctgcctcctaccgccgcacgccgctgctgccgccgagccgccgccgggtcgcctcctcccctcccgctagccgccgcggccgctcgggcccaccaccgcctgcatacgaagacgaagagaaatgagagagagagaaaaagagagagaagggtggaggaagaggaagaaggcaagagggcccatggccccacatgtcagtgggtcccacattttgtgtgaatgacaaatggtcccacacatatttttttaattctagtacacataggcaccacgttaactccatgtggaccgaagactgagtcaacatcgccacgtaggtgccacgtcagcaccaaaaccgctaagggagtcaaattgcaccggttttaagagttgaggggtcgagatatccggttttgtagtttagggtcacagattagatttcgatcacatttgagggtcacaaagtgaacttattcctaacattggagctcctagctagtcccttcttttttaatgtcaagaaatcttggcccatcttgtacagagcgacccagccaagtccagtggcacagcatcagatcaggaaatcttggcccatcttgtacattgcagctcagctcaagtagaggaacaaaagttaagaggaaggaataagttcaccggagatccctcaacttaacaacaagattttttaaggtcccttaaccacaaaactagaaatatgtacccctaaacttgtaccccttaacagtatatatgggtggtttcgctgacgtgacatcctagtcaacaaaaaataaataaataagtatgtggggcccacatgtcagctgcgcatatttcttttcttttcttttcttctcctcttctcttctcttttctctgttctctcttctcttctttagtgaggaggccggcaggtaattgtctgagtcagccaagtcgtgcagcaacttgtggacgagctactcgaaaggagggatgtagtctcgagctgctcaaaaggaatgatgtagtgtcatggtagcgggtcgagaggtcagttagtgttccaagaggttgaggccctagtg

SEQ ID NO: 15993 - DNA, 8153 bp, Oryza sativa
ctccctttccaattgcatatttgctttccaattgcatcttataaaataaaaacaacataaaaatttgcaaaataaaaaatacccaaaaagaaaggatatgtttgagtcatgctaggtaagacaagctagttctctttgttgaaatgatgaatagttgctctgttttatatttcttatatatgggttcttggtaaatactctctcaaaggttaaatataagtagccaacaattatctgggaacctgaggtaaatgagctgcacttgctgatctgagtctaagttgttgtaagatatgagatggtaaataagagttgctatgatcctgatactagtttgacttgaattctggatgttttgtttttcaaaatgataaaactgagagttcctcatttaatgaaaattcctaccaaagcaaaaaatgtgctatcatgattaaaccatatacattttggttacttgccattccattaaactttgtcaaactcttgtgacttgtgtagatacatttcatgctctatgatcaagatcatacacccacatttatgcacatgctaaactcctacactgggagctaagcaatattccatttcatttccctattaccacaaaaataaattctccatgctttcatgtgctttcttctcctaaaaagaaaagtccttttgaaaaaaaaagagaggagggaaagggcatggttctgaaaaaaaataaagttatgctccttcaagcatgagcatgatgctaaaaaaaatgcaatcatgccctctcctaatcaataaaagaaggatttttgggagaagaaagtaagcacaaaggagaagcatttttctttatttttcctcatataccacttccatcatacaccacacacattgcacgatcttgatcttgagtatgtttagttatttgttttagtctaagtttttgacttagtaataaatgtgaatgcaagtatgccatgtttgatccctaccgagatccacatattaaaaccttagagtgaatcattcgaggaactaggttttctttttcaaaatcatttgaaaacttccggaataagagttaaataaaggttaggtgattggtgctctcattgctgttctgtctttcaactgcctaagtcaaggagaggtagtgtctcgtgggaatcatggggtaagggtaagccaccgtgccaaagattatttaatctgatagagagtacacaaaccttgcacctgtatttttgagatatgcagcatggtagcaactcttgatcaacaaccaagtcttggttcctttacgtccttcactggggacgagcaaaggttcaagattagggggttttgttgatgatcgttatcgattagttttgaccgtcaatcctaccaacataggagaaatctagtgatgcttccaatgcataaaaatgttagagtaataatattccactagtgttaggttaactatccttttgcagagaataccaataaattgaaggagaaccgacgtcaacactttctatatatcaatcgggcgatgtcgacaatcaaacttatgtatgaatgggccaagaactcaaaattgacgcgatgaattgggccgaaattcacaagtctgcggagtggagcaatagagtaggccaccagccaaaattgggctggattggccagccccaggttcggccaaacctggttgtttgtccgatccaatcctggcgccgctggatccaggttttcgtgtgaacgtacaggattgcatcccaatggcggttagagggcacttcggacaattccccttccacaaccatcataactacatctatataagaacttcactttctcacttcactcacacacctcaagcaataactctctcatttctctcaagtttagtttagtagtatctagctggtggaataggaatagagtagaaatcaggagtccggaagccttcggaagagttcgggtatggctctagcagcttttctcttctcttttgtaagcttttgtacttttattagaatactcttctaaatacatttatggtattgaaacactttccaagtatatgagtacctactttacattatgtccatgttatactaaatatacggctagcttatctgggagatgctttggtgcgggtataatgtttgcttatgcaattactctatgtcatgatgatgatattagagtagtatctagtagtttagacatggtgtctagattacgagatatcattatttggggttatatattgcggatgagaggtgggcccctgatggtgacagctcagtacgggtattcctcctcgccggtatataatccaaagttaatttcctgggaagggtattcctccgtatttagccccggttgtatagtcatgacaggctgtcgtaaggaactcggcagtcagaggtggcttctcgaagtaccaggagggcatcggatagagggtattaggtagaatattagttaactaggatgtatgtatactatgtatattataagtataggaatagattatcttcctcttttctttccacttagcttagataatatattatgagaatgagtagtttatgcttgtgtgtcactctatccttggattatcttaacccctatttagaatatgattaccacaagcaatatataaattattagtcacgttctctctacatgatcttcccacgggataaaataaatacgatacccttggaatactctcgggtgaaatgctacaatggtatatgtcacatcctgattttcgtttcaggatttataaattatttaataaattaataatagaatttatattaaatgttctttaattttcaagtgaagtaaaatgtgggaaataaaatttcttaaatctaaagcatggatggatttaatttttgttaaattctccatggttaagtcaactctctgaaattttctcggatttttcagagctcaactcttaataatacaaagaacagttcagtaattatttgatcattaatgatctaattataattgttaagagcttttcttgtttaaaaatccttaaattataaattgttgtttaaaaggaattattagaaatgattttaaaagcttataagagaagatctaattttaatttgttaaatctcaatataaaattgggctagataaaatttcattaaatactttgcttaattctataattcctagatttttctgggatttatttgagctaaggaagtatttttagtaaatggaattgcatttaagaaataatttaaattgaaaaaggttttaaaagtcttcttttggctttgggccgaaagtcggcccaaaacctctcttctctccctcctcggcccagccggcccagtccgcagccgcgcgcgcgcgttcggtcgctgacaggtggggcccgcttgtcggatccgtcttcctcgcgtcgccgccgccgcccgaaaccctagcgcaagccgccgccgtctccttccaaattcggccgcgtctttccttatccggccgaatcgtttgagggaaaatgatcctcgggatctcctctacctcttcttctttggaagcttcgcctaaatcggtttggaaatcgatggattcgagttcgaatcggatcggttttcctctctccaagccgagctttccttcgccgtctccgccgccgtgggccttcgccgccgcctccttgcacctatttaaggacccccgagctctcctctacccgtcgccaccctcgccttcgcctctcgtcgtcggaagagctctagcgccttgtgccctagcttcgccgtcgccgccgccgctccagccgtgcgccgccgtcgtttcagccgtcgccgtcgctcgggaagaccgccgtcgggttcgcaaggtcgtcgccgtcctcgtccgccccttcgccgtcgccggagaccgccggagcttcatcgccgtcgtcaacccgaaggtttccgccacttcctcctcgtcgccgtcgccgtccgttgcttctccgccgcttctttggtcaccggtgagttcaccgcgtcgcgctctacgtcctggtgctctccgttcgcgtcgccgcgccgtcgttcgccggcgagcatgcgagcccgagccgccgagccgccgccgccggtggtgacgtcatcgctgacgtcatcggagtcgtccgccgtgagccgccgtggacccgatcgatctcggccgtccgttttggattggttcgatctcggccgtccgttcccgtgaaccgtcacccgtgcgcccggtccaccgaaaccctagccgctgacgcaataatcttcttttccttttcaaaaataattcattattgcgtcataattcaattaaaatcagtttaaaggttttaatccgatttaatctttaaaaattcatatctaattcatcttaactcagtttaatgtggttcaagttgcaaaagttgtataaaataaagatctacatattaaaattgtccataaattgaattaaatttatttaattcttttttaaatgggctttaaatagatttaatcttgtaaaattcttaataaattcatttgaagtcagaatgaggccgttcaagtctcataattcatctaaaaatatgatctacatgtttgtttactttttatgtattgtttatttggtttttattagtctttttcctcgttttgcgtgatagcttgtcgtttccgtcgttgcgaaggttcgcgagtgcgccggaagtattcaagaagattaattgaagaccgattattgcaaggcaagtcacacagatcctaaacacaatcctttgagcatgttgatcctatatttaaattctctatttatttcaactgtgcatttattttcgaatgtcattgggtggaattaacctattctttgttatggcccttttgttcttgattactttattccttgataccttgggtgattataattggactagttgagctttatatatattggttcaactagatattagatatgattgcttagccatgcttagaaacattagcacacatttgggataactaatgtttcactatcacttatggttatatttaatggtagctcacgatggtcaatcgtgattggttaattaattacttgccaactaaaacttgataatggtgggtcgtgagcacatgattttgagagtcgtgctcatgacaattaaggaccggttcgcgagctactgttgtgaaacattaaccgtgccaaccacaagccagcgtgggcaacggctttatcttttgtatagcatggttcattgcggggcaccagactgagaagtggcggagataagcccacgggggtcgctggggagtccatgccttgttttataagggggtgattatgatccaggaatggtgcgctgcggtggattgtgttatgcaaggggtactgtcacagcccctttccgaggtaccgtggtggtactgaggcacatggtgacatgatgtggggctgtgtcttgtgggtacagtggtacacctctggccagagtaaaactattcgaatagccgtgcccgcggttatgggcgagttgagcaatgtttttcgtgattagtctcacacctctcacaatagttaaggatgttataactggtaataatttgcttagctcctggtttggagttagatctgttcagccgggtatggttgttcagaatggttgggcctgtgcagcatgggtgtgctgttcagtgttgattaaaatttctgattaattactccactgttttacttctcttaaatgttttgctaaatgctgcttttgcaaatgagccgatattatgccatcctttggtatccttgtgcacttgcatatttgctgtgtggcttgctgagtatgtcatatgctcaccttgcaataatcaatcaacctcagttgaagaaaaaggatccagaaggagaagacgtttggcttataccccagttgagctgcctgtgggagtggagccggagcttcgctagattttattttccgctgcagttttcttcatggtgaggactaagtgcctcttaagtaagtatttatcgttttagttaatttgatgaatctgtatattaaattgtcagtttgtgtacctcggctgattcctggacgaggattttatgcacaaataagttcggaaattactagtgaatttccgggcgtgacagtatatccgtgcgcttgcggatgaactctgtaaccacaatataccagaagtatttctgcgccattgctgggaattatatttctagtaatgtcgttaagaaataccaacacctgcctcgccaccgcctcgtctaccttctctaccgcctccgccgccacgctcctccgccgcctccactcctccgccgccacgcagctccgccggcacgctcctccgctgcctccgcctccgtgccgatgtcctgagcgctgccgtccgtgccgttcacgccgccgcgcttgcctcacctcgccgaccgcccacgcccaccgggcccaagggcggaaggaagagtgcgctgccgccgcgctcgcctcacctcgccgaccgcccacgccgactaccctccccacgatcgtcctcaccatgcgtgctgcgcgagagagaaaagagtgagagagagaatagagagagagtaagaagtgtatgacaagcgggtcctacaattttttaattaaaaaagtgttaactggactgccacatgtacgccacgtagaccaaaaccaccgtggattgggttgaggggggtaattcatccggtttgcatagttgggggtgaagaatgtccggttttgtggttcagggtggtaattcagacgaccgcgatagttcggggaggggggtaattcgtactttttccttttttatttcacatcatattttagggtgtcaaatatcggacttgacgaatatacaaccctaatttaaatttacatatgtaaaattcaaaacaacacaatttagttgttttattttacaccattatattagatttatgatttaaaataatacatttctcctatatacggatacatgagaaatataaattattgactagaaaaggtattttgtacgtacatgtgatttaaaaaaaataatgcttacgtatcgtttgaagaaagaatagaaaacgtagttatgataaagccaaaaaatatcgacagtccttaaaatagaattatctacaattcaaagataaaatataataatcttcaaatttacacaaatataattataaaatatccggtcaatgctttttaagcgttctatcttttaaattattttaaaattatatattcaatttgtgatcgtattgtattcctttaaataaataaactattaatgtgtctataggctaaatacatcacaacatatggagccaaaatgtaatactccctccgtttcactatgtaagttattctagcatttcccacatttatatggatgttagtgtatatgactagattcactagcatccatatgaatgtgggaaatgctagaatgacttacattatgaaacggagggagtaattaattttatggtaatcatttcacatcatattttcggtgtaaaaaacactcgacgaatatacaacgctaatgtacatatgtattctccaaattactaaaggtgtctcatgtgaaacagtaggtattgaaaacaagctagacactgaactaacatgcactacactattgatatctgtcaaaatataatatggtactttggagattatcgtggtagtatttaaaaaaatcactttgtcttgttacatataaattcttctattgttttggaataaaatccaatttctttgatttatgtgatggaaggaatataagtaatataatttatctttagttagatgaagtagtatcattagctatatttttaatagaaaatatctttcattaatatataataaaattaaaatgttacttaaagtcatctatagcatacaaaataaaaaaaatgttatataaagtttggaaactccaaaaattttaaagaaagaatcacacataatacaaatagatatgaaccaactccattattgtgacacattttttaaaataaatttgaggatatacagtatcaagtaatatgcccaaaccaattattaacgaacacatgattaaaatagagtcaaaaaatatttcaaaaatatcatccacgcataaaagtttgtaataaaa

SEQ ID NO: 15994 - DNA, 5798 bp, Oryza sativa
taccccgagagccatacctaatggacaaaacaatgtgaaaattatagattaaatctatgattttttttttttggggggggggggggcatgtactctgagtactctcaatgaagccagcagcttagattatacatttgtctacttcaattcttcaacatagcacatctacttgtacatctgtacatatattcaacatacctgccaatattattaacgtacaaaaagagagatttatttatatgaccttcaacatagcaaagcattcacaagaatgggcaacatttggacgggttactgcatctaacggatagtcaagaacaatatcatgaaagatctcagcaggattgaaaagctgatcaatagttcagaaatgtgtcaatattgctgaaacatatatggttactaccaagagaaattttgtagtacttaaggatcactctgttatattttgtagtactctgttcctaacttttaatttgatgttatcttcaaattgccacatgcaaggattgaagaatgttcttgagaatttaagagtacaaagttttgtcaactctgtgtataatgaatttgaatatacaatttttctcaataatttttggtgatatttattaatcggtgtgcacggtcaactcaagtcggtcgttatagatccatgcatttggttctcgaacttggtcatcttaacaatctaaacacgttaagagaaggaaagcatgtgtgatgtgatggtgtaatcctaggtattacgcacacatgactgcgctttcaatacaaattagtagggcagtgatatgttattggtctccgtcttttatgcatacattagagatccactcgtggttacgtgagtgtagtgttcgtgcgtgctggtgtgttttccctgtaatctgaaaaaaaatacactaggagcataaaatatggtgggctagtgtcaagctttatgcagtggtatattttttctttttcctggttatgaccttcacgggatgtaattttgttttttttttcttgctatatcaatagaacttcgcacctcgcaccgtctcgtgcgagtagttaaaaaaatgctttatgtagttgtggctcatgattagccattaagatccagacatatctccctttgcttagcataagggcacccgcaatggttatctatagactctctataagagatccatgtcagcatattttcctacttggaagagattaaatgaagagagagagagcaaagctatctactaacctggagacagtctatagagaaaaacgaggcaatatattagagagctatagatacccatgtagacaaaccattaaagtggtttactattaatatagtctattgctgagatgtacatgttttatagatagcacattactttaccattgcgggtgctctaaggaggtctagatctatagatttggttgaacttaggctgtttttgagaaaggggagattgagaagatacgcaaaacgaggtaggctattagtgcatgattaattgagtattaattatttcaaatttcaaaaatagactaatatgattttttaaaacaactttcttatagaattttttttgcaaaaaacgcatcgtttagttgtttggaaagcgtgcgcggggaaaacgatgtgcattctatctccaatctcccggaacgaacgctgccttaggctgcgttcgtttggagaataaagggagtgagtttgtttcgtattccgcgcgcacgcttcctgaactactaaacctttcgttttttgcaaaaattttctataggaaagttactttaaaaaatcatattaatccatttttgaagtttaaaatagttaatactcaattaatcacacgctaagggctcacctcgttttacgtatcttcccaatcttctctatctcattctcctcaaacatagccttagtcatcctaacaatcgaaatacactaaaagtaggtgaagcacatatagtatggtgataaaacgtgggtgcatgactctatccatcgagatttaaatccttatgtccacagttagtgtgtgcgctctcaatagaattttagtaagaacagggatatgctaccggtctctgtctttttagcgtgtattagacggctcactcatgagtgtgagtgtggcatgcgtgcatgtgtaatagtaaaaaagaaaataaaatacgctggggagtaggaaaaaaatgggccagtgtcaagcccagatgcggtggtggcccatcattagcccatccagcccaattactcttgctgtccccctggcccctccatctccatggcacaaaacctccgcctctccatggcttcccggatcaatcccctttttcctcccgaggcgagggttttggcgaggagatcgagcagaggatctctttagcctcccgttcggcccaatccaccgtagcccaggcccatttagttgtccgtccagccgcgcgccgccgtgcctttttattggttgctgcggttccaagaaacccccgccatggcctccgatggtagtttcttccgatacggtggttagtcagtgcccttcttgcgtgtgcggttcttggaatttcttgttttctttgtctctcctagcgattgtttgttggagggataattttttgcttcttgtcaatggcggtcgccggatggatcagtggctcgttcgctccgtgtttcttgtaggttcggtggttgcagatgtcttaaggtgcaattcttgttcggttttgttaatgatagttagttcttggtcggagaggcagcaatctgtagatgaataattaggttgccactcaatcgacacaggaaaatgttgcggaagttcatgaccatatatatatgcttcttgatgagtttctctactgtcgatggcggataattctgcagctccttgttaatggaggttgctggatcggtggatatgaccattttatgcttcttgaatgttcaggttgcagatatctaggtttaattcatgttcgatttagttgatactagttagtttttgctcggagaggcagcagtctgtagacaaatagtcaggtctccaccttaattaatatttcagttgacataaaaatattgggaagttcatgaccgtatatatgcttcttgaagaatgtcttgtctatactgtatttcgatcacctttgatatgcatccttctgatccgattaatttcggtccagagcgccagatagcagctaaacctgaagattgcccagcaatgtcatcaatgttgtcattggaggatctcccggatgcattgctcgcagagattgtaaagaggattaccaacacaagtgacctgaagtccatttcccttgtgtcaaagcgtctgtacactatcgaggcggagcaaagaagttctatccgtgttggctctgacctttgtccagcgatagatgccttgtcagcactctgttcccgattccccaatttgttggaagtagagatggactactctggttggaaatttcactggaatctgctagaaaaacatattttctcattgcacttccctgtcctgcgtgatctcaccttatacattgatgatattcgtatgggttgtctagcttcttgcaaaaatttgatgtccctcaggttgaactctgtatcagcgataggctcatgtggacttctctcggtggctgttggttgcaagaatttaacttctctccacattattaagtgcaaccatattgttggcagtgataagtggctggagtacattggcagtgctgggtcactggaagaacttgtagtgaagaactgcaagagaatcagccagtatgatctcctaaaatttggccctggatggatgaagctcaagaagttcgagttcaagttcaagagaagtttcaacacatatgaacctcgtgacccctgttatgtggataactatcagtatggatatgatttctgctgtgaaagtttgagggatgtcactttggctacgattgtaactaaaccagagataggacttcgctgtctcctgacaaagtgcaaagcattagagagactctgccttcactatgtaattggcataagtgatcatgacatcattacaatctcccagaactgcagcaaccttagaagcatctcactttctcaagagatgctgctctgtgaaatacctggaggcacaggcgtaatggctaggacaccactgactgatgacagcctcaatgctctagccctgagatctcatatgcttgaagctgttgagcttatgttttatggttgtgctcctgattggccatctgagatagccttcacacaggatggccttgtgacactcctccagtcctgtccgattcgtcatctcgtgctacgtggtgctaacttctttgatgatgaagggatggaggctctctcatgtgcacaattcctggagacactggagcttatgcaatgtgttgcggtaactgatgtcgggatgcgctttcttgcacaaagcccatgtttgaagaatctcacgctgcagatgtgttacgaggttactgatgatggagtgtgtgaggtggctcatgcacgggatttggagtctctcactgttgaaagctgtaatcagatttctgtagaagctttgcatggggccgccaaatccgttcactacaaagttgattgcccaagctactacgatcgatataaagattaggtcattgctgactgtacatcatttgtagttgctttttcagttttacctttccaccatctttctgtacttgctgttgccacgtccttataccgcttattgttctcaattaaaccagtgtttaatggttatcttttgatttatgcaggtactacgtgtgatgagtgaaaactgggatcatttactgcaactgtgctgtataccatattatatgatcttgccaataacaatctcaatttggcctgtaagcagtactactgtttagctttgggagtgtctgcaactatcaactcttttgtcgacgaagcgctacagaaaggtggaagtggaactactgccaatcgtctcagactttcaacattttccttttgtgtatgccaccttcattgttatggcttacaagaaacgtttcaggatataattgtgcctacatctttaacagacgattatatgtttctatcacgttttgtttctgtgcctactctaacctctgtgaactgatcttttcgcttcctacaaaactggtccgaaaggcattggatcattgggtgtagtcaacaatgtacactgcattacctgcttatagtacaatataagatgtttattcatatggtttcttcgtatgaaaagctggtctgttattgttaaattatgatttcatgaaatatgtagtcttgagatttacaggcagtgtttcaatttcaggtcgaaatttctgaaattttgggtttacagtcgatcctggtttctctcgttgaatttttttttctgaattagctaaagtttgctaaaatttagccaaaatcctctatagtttcaattgaaacttctgaaatttcggtctcgcccggaataattatgcatcccagaacattgaatctttcaggtataactggagtaagttttcaggacatgcctgcgtaacttgctacctgtgaaattggagacaaaactccataactccgatgcataattcttatcagtatctgcaaattctttgcattttaacaggttattaggcgtggtctttttcttgcacgcgtatgtcagtggctaactccatactactattcattaaatcttgaaaaatttcaagttgtaatttgctttccacaggcatatgtaccattttagctggaa

SEQ ID NO: 15995 - DNA, 14005 bp, Oryza sativa
aatttttctacacacacaaacttccaaccttttgtcacatcattccaatttcaaccaaactttcaattttggcgtgaactaaacacactctgagattgaagaaaaaactgacgcatttgtgagcatttatttcagggcacttattttagctaggggaatttatttcagggcattgcttttgttcttgtcagttagatcctatgcacaaatcacaatatcttttgattttgatttatgatatggcttgaaaacttcatcatactttgccgtgaatgatgctagttgaaactcatgaattgcctgatggaatgcattgctttgtttgctgcatggccaaatcgaatacatgcattgctatgttcattgcaattgtaataaagttccaaatcccaggcagaaagcatgctgagttgttgctgattgttgcatccattatgcgaagcccaaggcggcagtaggaattaacccatggatggcagcgacgcgtaccggcgagaatttagcatggtgcctcaacatttttaccacctaatgcacatacctctatactactccctccgtgttttaacgtatgacgccgttgacttttcgacaaacgtttgactattcgtcttattcaaaaattttatgcaaatatgaaaatatttatgtcatgcttaaagaatatttgataatgaatcaagtcacgataaaataaatgataattacataaattttttgaataagatgaatggtcaaacattggacaaaaagtcaacagcgtcatacattaaaatacggagggagtaccatatattattaggacggttaattagtctatttagtactccctccatctatttttgatagtcatattttcaaatctgaaaaatttatttttgataggcatatttcaatctaacaacatatcctcttaatgactttctcggatttaatgcgtgactctccattcttccacacaagattggctacatgggcatcgagaaatgtaaatattaatgaatcgcttgtttataaggaatgactagtagtatgttttaatagatgataagtagaattacttatccttggtttatgtgccaagatgaaatatgacaatcaaaagtagatggagggagtatattagtagtcctaatgatatacttcgtattatagagtgcatgtagattgggtggtaaaaaagtcgagccacgtcaatttgatggtaaattcgctgcttcatcaaactttgcaggtacacgtgctgccagttgctgggctttcatgggctgtgatgggctggtttccgtgggctgttgagtgggtgtgcgcacgagccgttggatcggcttggacgatggatattacacttgactgcacgctggtatctgaggatcctactcccccagtcccccgcgagcgagcagaggcggcgccgtcgctcgtcctccgccaccgccgccggcgccgatacccatccatcccgcgccgcgagcgagtgcttccgccgcatccatcctggttagcacaccctctttcccatctctctctctctactcacgcacctaccgaattcgcgttaaccctagcttctgttctagaaattttgccttaaccttagtactaatttcttcccaaaaaggtttggggtgtcccatgttagatccgtccatgaattaagctgcctgtcgaaccggttattctctggtataactcctgtcaatgtactctgcctcagttcttgattgggaaacctttccttgctagttgctacctaattttcagtttttcatcattgtacttcagcttgtgacttactggattaatcagttgggatggagtatatgttggatgaactcgtataaattggtagtatgcaaattttggagactcataattgtgagagttatctagctttatttgttgccgttcacttgtttctctagtcaaagatgcttgtcttgaagttgatgatgttagcctttttaagattcaatcaatgatgctaaagtatttattcaatatactaattgcaattagggttgttcgcccatttacaactggtgtaaacgagcttagcttagctgtcgcgtgcttgctgaaaatgaatacagccagttgttcggtcaaaacctccgatgaacagcccttattgcaacatagttgtatctgtcataagattatcttctctatttttgttatgccgtgggcttattgactgaggttgtaatcgtgcaaaacaggaggacagggtactgggtgtgggcaggcaggcactgaaactggactacactctagcttcttagtgattacctctagatcagctcagcaaatagatgctattaaccactttgtttacaactttacatgcatgataatcgtttttgtatcctgaacatgagaatttgaaatttgtagtaggtgtcaattacttcaccaagtaaagtagctggaaacatatactagtagccatgcgggagtctggtcttccaaatcaatcaaacaatctgtgactgggtatcatattgcacattaatatgtatgctaaaggtcctatgtttaaactgttactagaagtgcttatatttgtttgccttcctgctgctcttgtactatattctagattcaaatgtacaacatcttattgctcatgtaaacattaaatactaattgtaactgtctaaatttcttcagagtttttagtgcttactaaatttcttcagattttccgtttgctgtctaaaactcttaaaagcatcatgttttcatgagaaagctaacgtttacagtctcctggtgtgaagggcatttgcaatcagtgacaaaagttcctcagctgtggagccatggccgccaagatacgcatagtgatgaaatcttttatgagccaagctaacaaagttgaaggggttattccatacgcgcagaaggttggattgcctgaatcacgatccttgtataccgtgctacgatcgcctcacatagacaagaagtcgagggagcagttctcgatgcatgtcaagaaacaatttctggtacagaaggcggagacgcacgagctgcagaagaagctgttctggttgaagcgcctgcgcctgcttggtgctcagtatgaactccagatcagtttcaagacccgtttggacaagaagctgctccaagctgctttgtcgtcaggttgctagagcacttcacttaccaccattcacccttgaacaagactgcttttgcttctatgatgtcttcatgatgagattgtcaaacagtacttgcatccattaagcatttcatatgatgaaactacaccatttggaagagtttgaaggaatgtagtagtaatccatccaaaacgttcagatgctctgaattatgaagatgtggcatgatatgaaacagatatccttccgtttccgggcttctctttggttttgttccgaatgccgtttaacaagtcatgacattcctatactttgctccctgtgttaagatgttttagggttgtctgtaagtcaaactttttcaagtttgcttaaatttatagaaaaaagatttttacacaaaataattataccaggaaaatatattccatggtagatctaatgtaaccaatttggtgttatagatgttactacatttttctataaatttgattaaatttaaagaagtttgatttagagcaaaacctaaatatcttgcaaagtatctttcttcgtttgttcttgattctaataatgcacatgaatctatgagaaaaaccgggtacagtggatggaaatggagatgagctgtcaatttgtattttatatggaaataagccgctttagaccccctttgattcaaaggaaattcataggaattttaaaggatttcattcctataggaatttttcctatatagccctttgaatcaaaggaatgaatactatggaaatttagcatgaggtggaatctcatgttaagaatcctttgagtcttttatctctcctcaaattcctgtgtttttcctacggctcaatcaaacggtcatttctatgtttttcctgtgttttgtaatcctctgttttacacttgtattcctgtgagaatcctatgtttttcctattcctccgttttttcattcttgtgattcaaagggagccttagcttgagttgggcactccactttctcgacatacacttccttatttttcgcatgcatatgcctcctaaattgttcaatgaaacttttttttttcacaaaaagaattatatatcaaagttactttgaaaatattaatctatttttcaaaatattttaactaatacttaatttatcatgtgctaattttaatcatgcgctagtgagtaacttttttttgtcatagagagagagatggttctgaatcatcactgtagaacaaagcctaaagtagtctatcacattgttggtcaagagttattattattttctaaatcatttgaatttgaattttttaaaaaataaactcttccaaaacttgttttcatatatgatgtttgggataattgcatctatatccccgcttttaatcccaactgttgttttacccttactttttatggtttgaaattttaccctcactacgaaccaaccgtttgcccccacttgtaacgcccacttggtgggtcccacatttatgtgttaaagaaacacaaatggaaattaaaaagagtattatggaatataatttaccattctacccctgaatgaatggatagggatgaaatccctctcttccccactgagtgtggctgtgcctgtggacacccgaaaccctagacctatagacggcggcagcagttcgggcatgtgcgcggcggcagcgagcgtgggacggcgctccggcgagtctccggtggggcggcggttgtggggcttcccacggtggccgctcctaggcgcggcgagtggtggccaagcgcaatgaggtagggcgcgatgaaggcaggcgtcaggcgacgaccatggggcgtgacgaggcaagcgatggctgcaggcaggcggaatggaggaaggtgaggggcgggaggaaatgcttaagtggaggaaatcctatcaatggagcaaattttcatggaagaggttaacaagtgaattgattcttgtcattgtgggaggcctcagtctaccggacgaggggggccagcacggatgcggggcagcttgcaccggacaaggagcgacatgggctgggccaaagaaaaggaagggagagtggagtgggtggagaaaagaacttatttttgcaacaaaaaacccacatattttggaaactctctattaagggaatttggtttattttttgttccataaaaaatgtttcacctaatgaaacattccattacaataaaaaaaaaaccactgtaacatacccgaattctaggattaaggaatttccatcaaaactagttgaagggaaagttcttcaattttgtaaaccaaaaagtttcatatttaaacctaggtgaagttgatttaactcttgcatgaataaaatttgagaacaaattaaaactttttcatctttaacctaggacaaaaatataaacccaagtgaaagcatgcattactcgcataaatcatattttgacttgagtccttcatgtgcatttgaatctttgatttgcatttcataataggtctcatgaatattaactaagatctaaataaacaactaaaccattagggcgtagtgatagctagaggaagttaaaatagaaaccatacaccttaaaatatatcaacatggctaatgtcaaacctcacaaaactaatttggacatccatctgaagacttgtcatgaacatgaaagtgaacaaataaattatatcatatagggtatattctatcttaatcatctctataagcattctcttaatttaatactaaagtaaacttatgcattaaataggtaaggagcttatgacatgtgtaaggtaaactgtaattctaacatatcaatatcacctcaggttaatgagagtccaaatataacttttataaacatttagatgcatttaggaaagggaagcacatataagacataagtcttgctaattatctaaaataattcgtgcaagataaaatcatgggaaaattcatgtaggctctactcgacacatacaactcactgtaattttggtataatttaataactaaatttggtacctcaaataaatcagtcaaactaataaaaactagattaactgtagttcttaatcggctaaaatcatactttgtctaaaagtgcatttaactgcataaaagtgtataagtaaaataatttattcaaatactaggtcatttatcatgaataaaaataatttttccagaatttatcttctctgtttaggtctcctaaaaattcgaactaatttccaaagaacctatattcctctaatttctgtgagtaatctatccataaattttaagtgcaaccaaagaaaatggaatctaggtatcttcatctactttcaaaaaaatccacaccaaattattctacccacaaattaaataattgaattactaaagtgggagagagaaataatcctgaaaatcattcaaaccttttgttcacccacgtttctgcccaaccctctcaccctagcttagtttgccatgacctggacccacttggcagccactctggctcatcctcaccctgtgcaaatcttccagccaaccagagacagccgagagagagagattggcgccggctgtgtacgacgcgtgggctcgcgtggcagcgccgaaccgaggcttcacctccacccagctgcgtcgccactcttcacccaccatcccagtgccgatccaaccgagggaggaagctccagctctccctctccacctctcttttgtcgccggccgccaagaagagggacatcgccaaccatcgtcgagctctctccatctctaactcatactcgttccattctcatctcaccatgccgaacaactttagttttgatcccattccatttcatcttctacagcaacgggaacgccgccatgtcatggtcgctctagagcgtgctctgtgcaccgccgcagcgacatcatcgccgttcccgcttatctggaccaagccgggccaagctgtcgcgccagcgttttcgccttgacctcctctccatttcccgtcaagaatctcgaaggatggtgctacgagtgcggagatcggctaccgtcttcttcacctccggttgccgtcgccattgtcgattccgcctcctccggtgagccattgtccgattcttcgcgtatacaccatccctgggacctcactaacccaatgaaaacacatgcatgtcaattcgatgattggatcgagccgttgccgtcttcccggagctctacaccgtcgccggaccatcttcttcaccgctgccgctgtccagactttcccgcgcctcattcaaggttcggtgagcacccttgagccataggattgcattcatgcatttcattcacttagaatcgagcacgaactcaacatgcagtagcagcctaagcacagccgccgctcggactcgccgccggcgttactccgatgtccactgaccgagaaaagtagaggaatggaatcgaaatagcaagatcttcattttgtcttttggtcgcaccctcaaacgagccaccgtttgccgctggcaagcttgagatcgagctcagccatggcttgatctgcttcagctcgaaccagggacctcctcacaagaatttaggttaatatagggtcctttctgcaaaagatcaagacacacagaacagtcataggactgcgggttgatttcctgaaactctaggggccttcttgcatattggcctgggactgacaatccacccctaggaacaaaatctgaaattataaaagaacagtaactaaaacttgtaaaatcatataaaattaaatctagctcattttaagatgattcaaatttctgtgaactcatcaaattgggaaatttgatgctatggaataaaaacttgaattcacagtacaaatttagcctctaaaatttatccaaattaaatcacacattaagcatgcacaaacttataaaatgcatacaaaattcatttcaaataatttcagagcaaacttagtttctacagatccaccaacatgttctctaaaaaaaagtaaaataaaacatctacacattttgcatcaaatgcctctaaaactattatctttaaaaataactagttttatataagctgaactttagaagttcatataaaattcatcttagatccttttttagtaaacccaagttctgtagaatcaccaaaacatatacttccaaattataaaataaaattatatacttactgtatgataaaagcctctaaatgcttatgtaagtaataaccaacatagagcaaccttaaattgtaaaatttgtagaaatttcatctttagtctaaatgaagtgaaccaaatatctatagaaccagcaaacagtggacttcaacatagtagaataaaatatggaaccttctgtacaggttatagctctaaactttaaatttataggaggtactaatcacatagtatcgattgagcaatatgtatatatataaatgtatatagaaatacactctagctataatgaaacccaaataaaacttgttagaccagtgaatgcatagttccatccccttccaccaaaacttagcaaacttaactcatataacaatttctaggttgatgtgttaagtaactaacatagaacatccctaattataaaatgtgtagtaaaataatataaactctaaaattatgaactaagattagattagttaactaaaatactcattttatacatcactagctagatgaggcaagttctggacctaaacctctaaagccatgaacctatataacactatacacctgtaacacgttataacttgtaaaatacataaagaattcatattaactccaaaaattatgaaaccaaatgtgttagtcttagaaaacacatatgttcactcagcaaacataaacttaataaaaatcaccttacaacagcatttcacaatagtacctaaataaatcctatactataacaatgaaacttgtaaaattcataactcctaaataaaaagagataaaatagaaattcttccacctaaattcattttagaccagtacctattcactgtgcacaaataatccattttagagcattttggattttacgcatatttcggtgtttaattgcataacgtgtactttgtagagacgattgcttaaacggtgaagaagtgatttaggtgctgacattttcctgattcaaggcaagtcccacctccctctctttgatcactttgaaccgttttggaggttattgaaaatatttgcaaatcttgcatgtcgattgcacactaataaattaaaattttgttaaacttgttagataaactcctattatttgcattatcaccttaactccacatatatccatattcctcattcctaaccttaggaacaatatgactataccactttatatatgagttttggtgacactaggttactataaagcttagccatgcttagaatggtcttcctagtcattatgggctcattacaaacatgaagattgatttttaaataatctggacagaactttaatacttgtgattttaataaataaaatgatggaaaacatggattttaggtttgggcctcaagtggtgcacatatggtgattagttgtgtaccgattgggggagagtgtgcccaaaccgacctaaggacttcactcaatgccagttcatttcgtatacagtacaaccacatgtgctagtatgggatagcccaagcttagtaaattatttatggtttagccttacattctggtaggccggtgtgtatgagttcggataactcagaggaacttcctatttaccccgacgtggtagtttaggtgactaagtctgtccaatataacggtattgtgccacgtgggtgggttcccgttgtgtccgccaccacggcgttaagtttaaggtgtgggcccaccacttaacggttataggttatataacgtgtatggcttaggatggagtaacatgtatcgtgctggtgtaaggctaaatcatgaattttggtaaagctttgttgcgggtaataaatcgggtacttatgtatcgcgtgccatgcttttgcatgattattatttcgcatcagggtaaagtgtacaaactctgcagagtaaaaactaatcgattagccgtgctcgcggtcatgagcggcgtgtggatatctattgagtatagacttatgtttattcttctaagtgctgaaatttaccttcaaattgtgttgagatttgagaatgatctccttgctgccacggaaggcaatgaggtgcatatttatacatgattaatgcctaccttgatgcccaatatgtcaagtactagcttgctgaaatttatttgaaagtaaacctgatttagaaatgttttatgcaaataaaacttgctttatgctaaaaagaaccatattatgccttccttgattatatgccttgcaagtagggtgttaggcttgtcttggtgcttgccagtacattatttaataatgtactgactcttgctattgaattaatcttttgcttgcaggttttagtcttagtctttgagtgatgtgggtaatcgactgcttcttctaggatttgaatttaatggggtaaacccctagtcggtgtgcttgtggattgggtagacaagcttccgctattctattatttatttggccggtcggccggtgtatctaaagtagatgtagtttataatcgctttcatcttatttgtgtttgctatgtataaccatgcttgagatgaaagtgtgaatctagtgcacatcctgggaactagattcacatgagtataagttaagaatattttagatgttgtagatctttagccattttgtcaagtctcctaattgtgtaacacatctggtcgctgccttcgagtggtttggcgggcacatctcaggctgaagttgactagcaggctaaaggctcagcaatgtctccaatattcctctctcgaggcgtcggatatttcattttgcttgttgaatgacttgaattatttatttcatctctcaattataatggaaggtctggagagcctacgacacccacatattttggaaaccccctattaagggaatttggtttattttttgttccaccgaaaaatatttcgcctagcgtactcagaatgtttcactatgtatagatctaatgttgcagtgaactgaaatattcttttgctatttgctgaaacattgtttttatataaggtgaaacaacacccgatttaaacgagtgaaacatttttaatctacttagtgaaacataaggctggtcctagggttttggggcccagggcaaaaacttatatggagacccctatatatatacataaactaatatacatatttatatagtcttataaagaggaaaaaaagatagagaaatttaccagatgagatgaattggatttggaggagtgtatgaccttgaaatcagatgaatgaatgaattggaggagtgcagtacaggtggcaggggcggcgagcagagaaggcgaccagcggacgatcgacacacacgagcatggctactggcgagccgcgatgtgctgacttgccatttccgtttgcgagacgccgagaagtcatcgagagcgcaggagcagcgagcggcgtgacgtgatcgaggtggcgcgatgcgagtggtgtgcgtgatgtgatcgaggtacatcgatgggagttagataaagatcgcttcggcttcgctgcaacaggcctgacgatggactaaaatctgttttatgtattgggctattcacttgtctaatttaatataggcccatggcctatggacttaaaattatacagtatatgtactatatgtgtatagggcccctagattttggggtcctcgggcggccgcacggcctgaccccctagggccggccctggtgaaacaattccaatatacctggtggaacatcgtgcgatatttaaaaataattcaataataagctattttgttttgtcggaatatatccatgtgtggtcttgttttgaagatttaattgcaacaaatttaatggtgtaattggatcatgatttggataagtaatttaagagaaaaatcagtttaaattagttttgcatgtattttaacctgcttgcatcgggcgcccgagcaggagtcgtctccgaatttattggggtatttggtttgtttgcaaatataaatttactagcaaaatgcttgtgcttcgctacgggtaaaggaacggttaaattctatgaagtacatcgttaacatgtatataataatgttccaatataggtaaattgtttattgcgctaatgataatcaagatggataaaaatattcctgtttagctcgcatcacgaaagaaaaaattaaattaaaacatattaaattctaatttaatgaaatatatatattttttgaaatattaattacactctttgaaattatagcaaaagtgctcgttgcaactgcaacgggaagtgtatagaccagaaaattgagaaaaagttaagaaaaatctacactaagtaatttattaaaatacaaattttctgaaatatttaatattttaagtaggtaggtgtaaaactaaattaatttacaagtaaagtaagtgtgagaaataaaatgacatggttaagtaagtgtgagaaataaaatgacatggttaaatttaattttattaaattctccatgattagttatgctctttggaattttatttaaattttcagagcttaattgctaattttaataatacaaacatcatttaacatttatttaagtggaaaaagaataaaaatcctcccttttaggtttgggccgaatatggaaaagtttatattaccgcccttttgcctatcctatgtatctggactattctttctccgttgaagttcattttacgtcctcatgcaatcacgcggtccattcggcagcccagtaatgtgggggcccaataggccgacagcccgatgcgggaacagctggagccgtctgatcaaatgaacggtctagattgatcctaacctaaataaatacccaaaacatatccctagaatacattcccccctccctcccgaaactcaaccgagcggcagcggcaccaccctccccctgcgagcggcggcgtcggcggcggtggcgccctcccccacgagcggtggcggcgccgcgccctccccccgcgagcggcggtgtcgtcggcggctcccccaccgagcatcggcggcggtggcgccctccccccgcgagcggcggcggcgcggcctccccccagcgagcggcggcggcggcggcgccctcccacccccctcactctctccacttctgtaacatcctaaaaatttgaccaacaaaaatcaaagttccaaaaatatggaccttcaaaaattttttaaataaattgtatcatgccgattttgttcacctatttcattggattttaatttcggagttcatagatcacgaataaagaatagttaattaggaataaaccctaaaattagattggcaagagaaataattaagatataatttaaaataaagattatgtgaggatagaaataaataaaacattatcgcgaccatatttatatcaattaaatttaaatgtgatggaataagaataaactctaattaaatttgaataaattatatataaaaataaaatatgggtaatgttaatctaggttagagcaacacaaatattgtgtaaacttgatttgtgcaaaaattagaaatattgggacaagatttgaataggaaaaacaaccaaatagaaaaaatagaaaaagttaactgttcattgcgctgtaagtgttcgatcgcgttccctagccctaacccctcctctgccgcacgcgcctggccgccgtcacgtcgccgctgccgcccgccctct

SEQ ID NO: 15996 - DNA, 14990 bp, Oryza sativa
tgccgcgccgcgtcgtcatcgcatcgccgtcagccgtcgcgccgagccccgtgccgcgccgcgccaagccccatgccgcaccgcccgcccgtcgccatcgccgcctgccgcgccacacgccgcccgtcgcgtcgccataaggccactcgccccgctccacgccctataaagcccgacccctcctcttctccaccccacacacatcctctccatctttccccctctccctctccctcttccccacgcgccgccgtcgtcgtgccgccgcgccaccgccacgaagccgccgcgccgtgccgcgacttgcgccgccgtcgccatcgtcgccaccgccgccgctgtcggtaagccgccccctccctcgcgtccaccgccgcctccgcccggggtgggcaaggagccgagagagagagagggagaaaggagccgggagggagagaagagagaaaaaaaagaaagaaaagaaaagagaaaagaaagaaaaggaaaaaggggaaaagaaaaagaaagaaagaggaagaaaataaataggcatttgagtaaaatttagaggtttagaaaatttaaaataattagaatttaatcgtagattaattatagtcgtaaaactgcgaaatttaattatattttggtagcctctatgagtaatcaatttgcggtaggaatttagatttatttaagaactaaaataaatgtgttgaattcttaggaaaattacttaggagacacaaaatgtcttaggttgaggaatagttctatttcgcaaataatatagtggatataacaatcgtctctcgtgctcgcttttcgatttggtctttattggattttatttgaattctaatggaattcaaatcaattcttcgcacgtacttgtagagcccgagggagttgcggatccgagcgaaggtcaagacccgcaagattttgagcaaggcaagtcatcactattccttgaacatgttgatcccaattgcgaaattatttcgtttacaaataaaattgcatgcaatgatgaacatcctacttgtgattatgccatgccttgattattgtttacccttatacgttcgtaaccatatttacgtccatatttacgtatgagaccctagtcaattatgacaattgcttagaaatgctattctagaatcatgcatactcatatttatcaaatgctatatgcttgggcaattacatttgggaaggtaattgagatgtggcatgtggagacatgagcgccacattgccatgatattgatgacatgatctgtgaaaggaaactaaaatgaaacaactgttttcgactggggcggctggaggatttgggtggtgtccggaaaaggctagtgccgtccctggtcaattaaggaccgagtcatgaagttaagcatgaaacgacccccgtacaaccgcacttctcgtatgggtatagacctagcggagtagatagctgagcggaggcagtatccatgcatagtggtttcttgacgtgtgaggcaggggctctacggtagggcagccattggtaggaccgcaaggcgggtgtctaccattgtgtcgccatcggtaggactgccatgtgagaatctaaacataattataacttaatgcatgtgtgagtcttcccttcccgggtgcgccagaactcttctcactgctagaaaccgtgtacgcctagagtgcatgaggatgtaaagttcatggagcgggtactgccaatgcgaggttatcgaaaagctttgccgtgacgcgtctcatgtgttgggacgaggctcatgtgttgggcagtcgtggagcgcgggtaaagtgtacacccactgcagtgtgagtaaaacaaatctattcgaatagccgtgctcgcggttattgagcaccgggacatgtattacacttggctagactctaaattcttaacttgtgtgggatgggatattgcatgatgatttttatgctgttggagccacttcctgagaggagggaaggtggacgtcctcagaaaaccatgacgactcaatggtgggaagctatccttgagatcacaatggatggtgacataaccgtcgttgtttaaatgtgaacactggtactaaaatttgatcagtcaatgctaggtcttaggcttgtgaaaagaattacaaaactggctttgcgcaaggaaccatagccatcctttgaatacccctatcatgtgcattgttgctataatggcttgctgagtacggttggtactcacccttgcaatatataaacttaatcagaggccggagacgaagcttcggaggatccctacgcgtactacgaggagggtgatgaagacgatggcgctcagtaggtcttagttacggtcgttgcctgtggcaatggcgtgccgctgccttaactccgctgccttatctacttctacttttggaatgtattccggaccgctcggtccgatgatctaagactatgcctgtgggcttatgatgtaataattcacactagactttcgtgtatgtgcatttggtatttcagctacaaattcgtgtgtaccagactacttgatccaaggaaatggtactgtttacacgattgattcctgttataaaaacgggggtccacagagctggtatcagagccatacgactgtaggaaaagaccaaaaggcgcccacccccttttctagttggtcaaaggagaaattcccatttagtaatactttcaaaaataaaaacgctatgtttacaaaactctatacgattttcatcttactcttaactattttcttcacaaaacaagttttactcttagctgactttgggtttttcttaaaattagatggcagatcaggattcacccactacctgggagatgggcgtaccccgctcagagggatacgtcattgagctacatcggttgatgaggcgcctacggtaccccagatttccgatctaccgagtgagacagtgtggacccgtttgggaggctcgggttgaggttcatacacgagttccttcagagtcagactacaactttccgacacgccaccgtcgcgacttaccggagaggcctttctccgaattagctctattcaccgagctgagttagcgagtaccgagtttgctcaccacccatttcgagaggagagcaactccgtctgcacagtccaggacacaccttgctgctacaacccgacagtgactcgactgtcccgatgggctgaggcagtagacgacttctacgaggaggctctgttagagatcgacgaccagtagaggcgtgtgggagagttagagagactgaggtgactgacctcacagtgcagcagcttcagctagaggaggagcacctggcttggggcagtgagatagactcactaaaggtacagcttcaggtccacggtgaccagtttcagcagctatccgatcatcacaatgattgccgcgggatgatggatacactcgaggagcagctgagagagagtcaggagcatgtcagccagcttgaggagcagcttcgagcagctacagccagcaccacaggagcttctacttccacagcagtagggcgtgaccgctacttcttcctcaccccgccgtacccaccagcgttccacgctcttttgggagaggttggtatgctggctactgagtcagcaccttacttggtggacccgacagtgacacagccacctgtctcggagattgtgcacactccactgatccctacaccttcgccacagctgggttccagtttggagactccaatccaggtcgactccgagacagaggggaccgacactaagccagagatagagccggacatcactgatctttcagaggatgagactcctgcccaccgcatcacctttgtcggaggccctcgtaccctcagcactgctcgcaagagcacacgacctccgggcaagaagcccaagccagatccagaggccactacttccgagccgtggggactcaggtttgcccgtgccagcgaccaccctctacctgcccaggatcctgcggatggttggatgattagaccggaggactgttgcagcttcgatctcgcttcagatggtttttggatagcatgcgagacacacacacccctacctaaattgacgagtagcttgatgattagttcgatgtatcttttggatgaactttatttggactgcgtatatgtgcagtcggttgcatcatgatttatgtactatctatggaactctgtgatgttatttatcatattattactgttgtgttatgaatgagtttattccaccatgcttgcaaaacaaagttcacaatcaaaacaactcccttaacgggataaaaccaaaagggctagttaggaaaataggatacatacctcatcggcctacacagatggcaagccgacgtagggcgtcaaccagcaatgaagaaactcaagtacccgacctaaccaccctggccagagttatggccactcaaacccaacttctgcaagccattgcaaacaatcaagacaactgcggaggatcgagctttggagagtttatgaggactaagccacccactttcgctacggcagatgagcctatggaggcagaagattggctacgcatcatagagaagaaactgacccttgtccgggtgcgcgaagctgacaaagtgatcttcgcagtaaaccaactggagggaccaactggcgattggtgggatacttacaaggaagctcgggaagaagatgctggagaacccacttggggagaattcactacagcttttcgtgagaacttcgtgcctgctgcggtgatgcgcatgaagaagaataagttcagaaggctgcgacaaggaaacacaatggtgcaagaatatctgaaccggttcactcagttggcctgctacgcaatcggagatctcgcagatgaagaggaaaagatcgacaagttcatagaagggctgaatgatgaattgcgtggacctatgattgggcaagaccatgagagcttccagagcctgatcaacaaagtcattaggctggagaacgatcaaaggactgtagagcacaaccgcaagaggaggcttgctatgaatcgcccacctcagggacctcagcgactcaagggagccacttcgtctgggtggaagccccctattgtggcaaccaaccgtcccgccgcgcctagcaatttcaacaggctggttgcgattcagaaccacacccctacaccaactctggctacccctggagccaagaagaatgtggactgcttcaactgcggggagtatgggcactacgccaacaactgccctcatccacgcaaaactcctgtccgtactggtgctaatgcaatgactattcgtggaactactacccctgctgccggacgaggtctattcaagactccgcaaactaacaggaccgctaccggatttggacgcggacaagtgaaccatgtccaagcggaagaggcccaggaaaatcagggcgtactaatgggtatgttctctatcaattctaccccggtttcataatgtaagtctatattcattaacatctatatgattgtaggcaatgctagaatgacttacattatgaaacagaggaagtacttctattgcataactaagttacttctgttgcatgtaattacttctactacagaaagttacttctattgcatagctaagttacttctattgtatagctaagttacttctacaatttaaatacattacttttaaattaataaaatatttgaatatatccaatatggatcttgcattatcacatattttatgtagagtataatgatgcaaatatatcttgaaaataatacgtgatttaaaatatataagttattaaagagcttaaatctaaatgtaatttatgcatatgataaaagtaacttacatatataataaaagtaatttataacatatatatatatatatatatatatatatatatatatcagaatataatcatgtaagatcttgttgtaaagatttaattgcaacgaacacaacagtataatcggattataaatcagataagtaatttaagagaaacttctctaagaagaaaaaaatacatagatattaagtgtagtagtagcttttttttttgaaagaagagtgtctctttttagtactatccagctagcattctcagtctagctatgtccatcttctctttgtccctttccagtggtccccatttatgcatgtacaacacaatttagaaaggtaacatcggtatcacaggtgtgggatagtgatacacatataatagtgtttatataataatagcgttatgcttggttcatatctcgtatattttcacagcacgaatcttggaggggatcaagtgagatacagaaattgattgtaaccaagcgaaaaatttggcgacagtattttagcagtcggaaatgcgagcatccatgtaaattaatacggatgaacaaatttcattataaataacctaaccagttgaactatgctcgattcgtatgattgcataccaattaactataatatgcaaagtgaaatttataccagtgattagaaaaaggccaggtaacagttggacggggatggtgcgaaagacttctacagaagggagctcgaggcgattatcttctccccggcgatcagccggtggccaaagctcacactgactgacataataatacacacactctcactcatcttaaactaatagagcaaatgacaattgtctatcaaactctaaagcatattgaaacaatgaataactaacccaattatttttgttagagaaaaagttagcattcccctgcttttgatcgactaacaaaattaatcctttctacatggaaataatatatatgttgtgcccagctttttatcgtcaaggattaaaattgccttcgatgcacttcttattccttggtatgcctttcccgtgtccacttaaacttcgtaccaccattgaacctatgaacaccaaattcccaagcacaaggttccccaatacccttggtaacaaggcatgtcaaattgataatctttgccttccacccgacgacgatgaaataaatattcgtagtcaagctccacggtcatcgtatcaagagacggtgaactcgcgaacaatagttgtatgaggcttatttgatcatccaatgatgcaaacttacggatatctaccactcttagattcttcaatgatatcatttggtcttcccaatcctctggctggtgacaaggcagcctgattttaaacaatacaagtcatactgcaataacaccagtacagaaaacaatatatatgttagtcatttcaagtttgattagacggtagaaatcctcttttatagaagattcatataagagctaaatcttacatacccatagtgaataatcaatgtgaaggtattgaatattgttgcacttaacgatgaacttggctagactagctcggtagctcctacggcatgcccgtcgaaaatcgaactcacttttattgtcaaacttgtgacactgggaagttgtggtacatcctttatggtgtcctcgtgacctgcatgccacaatcatattttaatcaaaactatagtgttattgcaaacgagaaaattataggatatctatactttctatatatttggtacccactaaaactaaagctcaacatgcaagcatgccacatcttcactcactagcaattactattctagcctattttaaatctcatacaagcatgacatatcatctacaatattgtattatagagatcaacaagtatgtgtcaaatcatcttcctcacattattttctcaacatttaaactttcatcatttcatcaatattttaacatatactcattcgttaatctcacagcaaagcgcggggtatcacctagttagtactaatatatactaccatgtcgagctacaaatttaacccgtcaaattaatagagaggccattaatgacggttttggtcatgagggccaatcttcaatggggaattttttcagaccgtcatgtgtatatatgatgggtcattggcctccgtcaaagatgcctggttgtgtacttgtgtactagtgatatatatatatgtatagaagcaatgcacataatgaaaacgacgatagttttcttttataagtgggacacggatattacttcatctttttataagagatgcggcgctgattcatggttcatgctgcatatggaagataaattaagagatactatagtgtgtattatgttaccttaatttatctagtatgccgtccgttttacaatataagactttctatcattgtctatatttatatagatgttaatgaatctaaacacatatatgtatagattcattaataactatataaatgtgtgcaatgctagacagttttacattgtgaaacggatggagtagaatataacgttatacaaagaagcatagcaatgtgcgtaccttcgtccacataaatatctagtttcacccctaggtgaaccacggcgttgcagttcttgaggagccagacggcggcggcattagcatcgtactgatcgtcgcctccgccgccgccgaacgacatgagccggagcttcttgatgcgccggacggccgccgcgccgtcgaactccagccgctccgggtccacgaggctctcgcacgagaacacctccagcctcgccgccgagatggccatggcggaggaatcggaatagggcaggcggctgcagtcgccgacgcggctgcagccggagccccggcgcgtccacgtcgagccatcgcaggtcgggcagatgcaccagccggagctcctcgagcgcggcggccgcgtcgaggcgcagtgtggcgacgccgcctacgtgcctgaggctcagcctccgcagccgcgggcagcagggtgacgagagcaagtggccgagccggaggtcgccgccgtcgtcgtcgatgatggcgtgctggagcgtcagctcggtgagggcgcggaacgcgccggcgactgcggcggccgggacactggcggtggcgtatccgagggtcaggctcatcgtctccgctctcgtcgagcgtggcaactcgacgacgacgacctcctcatctgccggcgccgccgcctcgccgtcgtcggtcaccgacgtcgctgctgtgtcggcggcttgcgacctcgcctctcctcttctcggcgttctcgccgccactggcgccaccagcggcaactcgaggatgaagctccccttcacatggcgctcggcgaagcggagccacccgtcgacgcgcgacagcgtgatgtcggcttcatggcgatggtcgtggaagtagtacctcctcaccacgccgtaaatacacaaacagttgtgttcggagctgtacaccagggagatctccatgacatcgacttcgtcgctgccctcgccggcggcggcgcgccgcgcgaggagtgtggcgtccacggcggcgatgagccgccgggcagcgtcacgacgagagacggcgaacttctcctggtcgagctcgccgtgctcatccgcgaaggagcccggcccgacggcgaagaggccagaggcggctgtcaccggtactgtaccaggtccgacaatgcctacggcaagtaatccagtgaagacgcaaccagcaagagaacgcatgcctaatgtaagagtaactgggccggaatgggcttaggtccagaatgtaaacgtgcgagtatataagcacgagtgagcagaggggaaaaggcatcgaacaagtgaacagaaaaactattcctccctaactactgcatcttcccctgctccaagttctctctgttcctccccttcttcctaccccttctctctgttcgaatctgctcctctaatcccaaaactcccaaattcgcaagcagattcgtaacaataggtatcagagccatccatcctggagtacctcgacaaacctagataccattcccgtgcgcaactcaagtcccaagagatggagcagcaattggcggaactcgcggcggccatggcgacaatccagaagcagaataccgccatccaagcttcgatgggatccttggaggaaatcaagcctatggtggtggaactcgcgagctggaagccagcggtggacaaggccatgacggagatgcgggacgacctcggcgacctgcgtcagcaagtggagcggatatcccgcaatccgattctcgccgtcaagccagcggatctgccccctcttctacccacgccgacggtgcctcaaatctcggtgccgaaggaggaggagacggcttccaaaggggcggacgcgagtccagggccgttaggccatggcgttgcaacgatgaatcgggggaaggcgtctggagatgatttctctccaacgtctctcccggccaagggtacgtgtcaatttcagtctccatctcgtgttcctttcgaattcggggagagttcgaattgagtttttgcttcggggttccatgggggtaatgctagagtagattgcccacagtttgaaggagagaaccctagagcctggaaaatgaaatgcgaaacctatttccgagtgagtgggattagcccggatgtgtgggttggggttgctgctttgcaattttcgggaagtgctcttgtgtggttgcaatccaccaatactcatgtggaattgatggggtggaatgatttctctgaggctgtttgtgctaagttcgggagggaggaatttcagagtctcattagacagttcaagaggcttaggcaggagggaaccattcttagttatgtagaaaaattcaatgagcttatgcatcaactctatgctcatcacccgtcctggaattcagtattcttcattactgaattccttgatggactgaaacctgaagttagctcagcagtaattttacatcgtccaaacgatttggatactgctgtggaccttgcttgtttacaggaagaggtgttggaagcgggacgacgggattcgcatcggattgatggaggtttttctcatcggaccggacaacgccctgtggggaatgttgcttttactcctgggcgagctggtgggcgagttgatgacagaactcagcctctggaggatcgagtggcagcactacgtgcttatcgcaaggctaagggattgtgtcacacttgtggggaaaaatggagtagggaacataagtgtgggccaactgtgcagttacatgttgtggaggagttactcgacctgcttgaggaaccggatggggaagccaaatccgctggaactgatgagctaacagaaaaggcttctgaaactgttagcgaagtctgtcagatatctaaagaagctatgctagggactgaatcttctggaactttgaggctgcaaggattaatacaacagtatgagataatgatgcttgtagactctggcagcactcatagctttatatctgaagaaatggcaagcaagataagaggcaatcagaaaactgtgcaagcttttcgagttcgggttgctgatgggggaatactccaatgtaacaaagaaatgcagaattgtctttggctggttcagggtgtttcttttcagaacaacctgaaggtgttacctctcggaagttatgatgtgatacttggaatggattggcttgagcaacacagtcctatgcaaattgattgaagggctaagactctgagattcaaacatgcacaaaaggatgtttgtttgcgaggtgttcgagctgataccagcagctgtacatctctatctgtcaatcaagttcaaggactgattcatcgggaagctgtgatgcaagtggttgagttgtgttctctgatcaatgaaacagataatacagaagtacctcaggctgtcgattagttgttgaaagaatttgtccatgtctttgatgagccaaaaggtttaccaccggccagagtatttgaccattcaattcctttactgccaggagcaaaacctgttaacttgcgaccttattgatataatccagctcaaaaagatgagattgaacggcaagttgcggatatgctccaacagggaatcatacaacccagctctagtcctttttcatcacctgttctgctggtgcttaagaaggaccttacttggcgattctgtattgactaccgccatctcaatgcaattacagtcaagaatcgatatcctttgccaattatcgatgagttgcttgatgaattagcgggatcctgtttattcacgagtttcgatttaagagctggctatcatcagatccggatgcgcccagaagatgagcacaaaacagcgtttaagacgcacaatggacactacgaattcagggttatgtcctacggccttaccagtgccccggctaccttccaagtactgatgaatcagatcttagctccattgcttcgcaaaggagtgctggtgttcacagatgacatcttaatctatagtcaaaatttggatgaccatgtagctttgttgcgacgggtgtttcaattgctaactgatcatcaacttaaggtcaagagaagcaaatgctcgttcgcccgtgcaagtttaccatatcttgggcatgttattagtgcagaaggtgtggccactgactcgaagaatattcaagcggtgcacaactgggcagtaccctgtaatgtgaaggaagtgcgaggatttttgggtcttgcagggtactaccggaagtttgtacactcttttggtattatcagcaggccccttactgatctgctaaagaagaatgtggtgtttgtttggacgtcggagcatcaagcgtcttttgatgccttgaaggaagctctagtttctgctcctgtcctagcactaccggatttctccaaagtttttgaaattgagaccgatgcgtctgataagggtgttggcgctgtgttgatgcaagctggccatccgttagcctttctcagtaaatctttggggcctcgaaatcaagggctgtccacttacgagaaggagtgcttggcgattctcctcgctgtggaacaatagcgctcttacttgcagtttggagagtttataatccgtactgaccagcgcagtttgattcatttggatgatcagagattagtaacaccttggcaacagcgtgctctgaccaaactgcttggtttacaatacagaattgtctataagaagggactggaaaataaagctgccgatgctttgtcacgcaatcagtcaaccgatgtgtttcagctcagtgcggtgtcttcctgcattccagtttggttggcagatgtgcagctgggatatgctcaggatcaagtatcctctcaactgttgactaaactctcgtttaagtcctgaggcgctccctgagtacagattacagaatggcattatctaccataagggaaggatttggttgggtaacaatgtggagttacagactaaagttctgactgcactgcacaacgcagcaattgggggtcattctggtactcaggcaactttcagtcgagtgaataagttatttgcttggcctggactcagaaaagctgtgcgccagtttgtgtcggcttgttccatctgtaaacaggccaaagcagaacgggttcggtacccaggtttcttacagcctcttccagtgcccgagcatgcttggcaaacagtctcgttggatttcattgaaggcttacccagctcatcgggttttgattgtatacttgtggtggtcgacaaattcagtaagtatgctcactttgttgctcttgctcatcccttcacagccttcgacgtggctctggcctacctcaacaatgtctacaagatgcacggattgcctcagcatctgatctctgatcgagatcgtatctttaccagtgcattgtggaaggaactctttcagttggccgacactcaattgcaaatgagctctgcttatcatcctcaaacggacggacagaccgaacgggttaatcagtgcttggaaacctttttgagatgttttgtgcacgcttgcccaaagaggtggtatcgttggcttgctttggcggaattctggtacaatactgcctttcattcggctctggacaaatcaccatttgaggtattatatggtcattctcctcggcattttggtgtgttcgatcgctttgagtgtgctgttccagatttgcaagactggttgaaggaacggaaagtgattaccagtttgccgcgacaacatctgttacgagctcagcaaagtatgaagttacaggctgacaagaaacgttctgatcgtgagtttgcagttggtgactgggtgttcctgaaggcacagccgcatgctcagttctctatgacaggacgttctaatcacaaattggctttccgttattttggcccctttcagatcttggcgcgcattggaagtgtggcttatcgccttcaactaccgacaacttgtgctattcacccagtagtacatgtctcacagctccgtcaggcttcttcaccagctcctgactcgtcgattcaagacctgccagcgttaactgaagatgaagcgctaccagtccaaattcttgctcgtcgtgcagtcaagaaaggcgctggagctgtggaacaactcaagattcgctggtctggtcagacgtccgctgaagcaacctgggaggatggtgctgcactgcgtgcgcgtttccctgaagcaccggcttggggacaagccgtttctgaagaagaggggaatgtcaccggtactgtaccaggtccgacaatgcctacggcaagtaatccagtgaagacgcgaccagcaagagaacgcatgcctaatgtaagagtaactgggccggaatggacttaggtccagaatgtaaacgtgcgagtatataagcacgagtgagcagaggggaaaaggcatcgaacaagtgaacagaaaaactattcctccctaactactgcatcttcccctgctccaagttctctcctctgttcttccccttcttcctaccccttctctctgttcgaatctgctcctctaatcccaaaactcccaaactcgcaagcagattcg

SEQ ID NO: 15997 - DNA, 19621 bp, Oryza sativa
aagccatggatgatggtgattgaaacgaaagcttgcatgaagccatgaaatttgttggtgtgaaatacatagagggtcgaatcaagctcgggatacatggtcgaatcggagtctcgatcgatcgatgctaattgcactcccagtagggattcgttctgttattgatagtactagaaagaaacacgcgctacgccgcgtgtgatatgaattgatcaaaatgcacaaagagtctgcttgtccttcatatatagagttgtgcatatatggagtgaaataacctttgaccatcatcacagtgtgcatttatgataatcaggtttttctacataagcactattactctataatgttgaccaaatttgcaaacaaactatactgtagacgaaccatttagagaatacatatacataattttatataggcaacatttatcgaatttaatctaaaatcacaaagaaatcttattattaaaaaaggaatgacataagtattacaaaatactgaagaaccacagtgttagacgtctactggcgcggtgagagaggagcggtggcattttgactggttagcacagaacttagaaccgcgaagattgaccacaatagaatcaatttgtaactattatccttgtgaatatttaattaagagcaaaacacaatgacattccatagcttgtgagtggctaacagtagtacggtccattgttaataaaattattggtaagctaatcatacaatccaaggaacttctcacagaaaaaccaataagtttgataacaatattggctgacgggaataagtagataattaaacagagctaggtagataatgaagcaaggggaaaaggatgtacagtgattgttacaataatatgatattattgcgtggcaaaatgtctctccattgtaagaaaaggtgtgaaaaatgtacatgcaaagaaatccatatgtaggagacctaaagctaccaaaattttggatcacgaaatctccatgtcatggtactaaataaataatccaccatggggcaactgcaaattataagtgccctatcaagcgatcaaaacatatgtggaacattgtgagaaataggcagtaatttgtatgttttatcagaggttgtatagacaaaaatgagagaacaaccacatgcagaattacatatagcattttgtttgggcaaaactggaagtctcaaacaaaacttacctatggatatgttgtaccaatgaatggataactcttgtttcatgttggaaacatgcaaattgggagctctagaattagtttagctattcatcattagctctgcaggcacaaactattgattcccagtaggctatactatcctacaggttcaggaacaccacaataaataaaggattgagcatattactgaaataaaacagaacattagcctaggttcatcactgaaactccaatgcaagcacaaatagtccttgaagggcatgccatgtcaattatgcaaaatgacagacattgctagaaattcatatagcataccttggcagtggattttctataaagcaagaactatttttttaaagaaggaaagcaaggcaatactatgcaaccattggagtaaggagatgatgacagcaaatttcatttacaaagaatgccaatatatatatggccatgtccacaggccaaccgatgctatccacctcctcaccaatgctagtgctattatacttgcagaacgaacacacagagagaaagcagcagtaataaagtgaattgctaattttgtgtaccaatcattcctccactgatctattttgctagtatgcgcattggtttgcgtgtacatcatgagagtagtattaccagcaatcaaccaagaaatataaaaccaataataatatcaaaatgtgcatgttacatcttgtgtgagagagttggcaaatatgacataccatggctaaagcatgccttctccagaccatacaaaaacacatgatacatgtctacctgcagctaatattaacaggttaattccagggataagtgaatttgtaaaaatcgaacaaaaaataatttatgactaacccatcatccgattgagggggatggtattgtggctctgtgagatataaacagctgttgttcataaaaaggagaataaatgtgagaaggagaaaggaggcatagctgctgacctggggaaggagtaatggaggagcacatttgaacagtgaccttggctgggagatagaaatgaccttgaagattttgaggtccgggaggcccaaatccatggcgcatcatcggcgaaacctgacctcctgctgtgcaagcagcaccatcgtcaacaatctttagcctaattagcctaggaacagcggcacatttggcattgagcaacccgcagaatatcaactaattaggctcaattcataggataacaacccaaaagctagtaaatgcaaccagagcagtgaagggtctggggaagaaccaccaccacctcatcctgccactccgtaatcttctgcatgtgctagctgcatgacagaatacataaatcatttcattaggcaccatgtttgctccaagatagaacaaattttcagtgcaaagcgatcctctttggcacacacctatttgcaaaatatcaatcaaagagcactaattatttccccccccccaaaaaaaaagagcactaattatttgctccaaaaactcacctgcagacaatatgatagtattatggtgggctatacaggagaggcaacagagaggacagcttcttctcatcctaatcctcctctacgccatcgccgtacccagtacacagtccaaactcgaaacccacatttaaatcaatgtaattgctcgaaccacacgcccgttgatgaaaggtgaaaacacagggagctaatccacgcacggacgcacctagccgcaggctgcgccagtgacccgtagaactcgatgcgtcgtcaccaagccgaagacctccaagaaactgttgcggagccgcagcaacctcaaatcgctgggacctccagcagcagcagccacagccaaatccctcagctagaggctccaacgacgccgctaggtccccgacctcgaggcgatgttgaaaccgccgttgagcccctccatcaagcgcagccacgaccatacactcgaggggagcactcttagatgacgggtaaaacgacggcgctggaaaggccttggaggaggaggaggagtaggagcaggaggcggaggagcattggcgccgcgccgccgccggtcacagaagggagaaaggagatcccaactgctcctaccacattcttctactggagtggcccctgagcaagaacccgcatcaagtggggcgaagagggagagaagaagaaaagggctatgacgctggcttacctccgtcgtctttgggtagccggatacatcggcgagccagccgatggtcccgaggcggatttggcgccgcacagaccggggcagagatgcggctcgcagcgggcgacggatgcggggtcgcggccgcggccggggtgtgcctcgctccaggcggtggtgtccctcccgactccccttctcctccccagcctcctcttaacggatctggcggctcattgggagttagcggtggtggcagcacggtagaggagaagggagttgcggcggcgacggcgacggcgacggcgacgacgcttgcgagcggaggttggcgtcttggcgccggatccgccggtgaggagaccggggtcaccggatctgacggccccggcctccttactaggagatccgacggctcattgggagggagcggcggcggcagcacggtagagaagagggagctgcggcggcgacggcgcacgcgagcggaggaggcgggcgaaccgacgtgaattctttcgaaataggatcttttaatattttagtttgtaaatagagttttgatggcaaattctcactagtaaacaaatacaaaagattaattcttagaaatgattttcagatatcgattaatattagataaaataacttcctccgggaattatccctaaaggggtttcctttaaatatttagtgattataaatactcataaaacaaatacccaaaaaggggttccaatttatagagacagggtttttaggaaaatgatttattttcacaaatactttcttatttcataatcatggttccttaataaataatattttaattcaaaatagattttattcctagatttccgtccttgtgtcccaagcacaacaaaaacggatagtcagatccaataaacttcggcacgaaggaaattagaaaaagatttttggttattccgaattttgtttccgtatttcaaactcgaaatttttagggtgttacaatagattactctaacccgcccataacaactaaggtggaattaattccacgatctcataacacagtaacacatgagccaaattcaaataggccgatgtcacctaatttaaggtgactaaataaaagggctgccatgccaaaaaaaattatagttcttggacgtgcaaagctgccgaccctgtcaacgtcgattctttgtcctgatctgttgtagtatgttgttgctctctggggtagatatgtgtagatttctcaatatcgtcatcggtgacatcgtcagtctcattgccctctttgctcttaccccacagcatggtgtaaagacttccgaccagcaaaattccacccaagatgctgccaataaaggaagagcggaaaatgaaagtttgtttatttcagagtgtttttagaatattgcacctttgatcagttgacagcaagtacatatgatttaacttacctgccgaggtgaacaatctctccaagaaagaaggatgagcaaaatattgtgaacacgaaacagagtggcgtccaggaggcgaagaacatggggcctctcatctctaggcaccacgtttgcaggtagtaggacactcccgtcaccataacaccctgaagcaaaccaccagtcgtctaatagtcagatgcgtgtgcagaagaccatgccaatagtgaatacgctagtggaagaggatgactgaaaattttatgtacagaacttaccgagtataggatggcaagcaagctgatgtcgaatcttagcttccatttggagaagtcgcgctctgcgaccacggcgacgacaaacgactgcaccgtgctgaacaagcattgagtcaaagtcacaatcattttatctggatattccttttgcaccgctgcctgcacagtcaatagacaaggagtggagacctcgattcatcagcaattgcagatgtggatcgatgcagacaagcatgcaagaacagctcagattttttttaaataactaaatatgcatgcgaacctgaaaaatgatccacaaagaccagcacatgttggcgatcaccataaggaatgtccatttgatccacacacccctcggaactacatttttagagcctgcgtcagaggcgaaggcacggtgatggttgatagggcttatggatgggccggtgaagaaggcgatggtgaagactccagccaggcagagtgctacgctagtgaccttggctatgcctgaagagctcctcagcttcacatactccgtcctggcaagcaacatttcaatcctggtattatatactactccatccattcaaattatgtgtgtcgatatagtgtatatctaaatatgtatatcaaaatttatgattaatgtcaaaacatcttataattaatgttttcacaactaacttgaatctatttatggtacattctcaagttaggctttaatgatgtctcgtttagagcaaaaataatagtgagctataagcaagctatatgcttatgtggaagagaaggataaacaaaagtggggagtgttggctctcatgtaagagctaactgcacacaagctccaagaaacatgcattaaattcataggagagaaaaagaccggatgaaaaaaataaagataaccttatagttaacctattatacatgttagctttcacaatgactaatagtaagtagtgagctctactattaaacttgctcttaagaggtggtggactatgatatcgatgatgataaacctcaaaagcactgccaagaagaaggtgatggctgggagtgagctgtctactgcagatgccaccgttgcagaggtgaacttgaggcttacatggtacagatttaccccaagcgtaatcctgaaaagcaatttccgcaggtaaaccagcagagactaattaaactcttgacatatcatgagtatacaatcgatcgttttttttgttttgtttttgtatcaataaattagagattgcaaagatgagtgcatacccgattaaggcacaaaagaagagctttatgagcaccccaagtgtcatgacctgtcgtgcacttttcctacaaatataatcaaacggacttctatttctcagcaaatcaaacaatatagcaaactaaacgaagtggcgatatatatatatatatatatatatatatatatatatatatatatatatatatatatatatatatatatatatataatttattttgtgctccatggtgcccaattttggtcgttcgttttatttaaaaatttttataattagtatttttagtgttatgatatgataaaacatgaatagtactttatacatgacttatgtttttagttttttttaaaaaaaaataaataagacggacgatcaaagttgtgcacagaaaatcatggttgcacttaagggcctgtttagatcacctggcaaaatttttcaccctgtcacattgaatgtttggacacatgcatggagtattaaatataaatgaataaaataactaattatatagattgcgtgtaaattgcgagacgaatcttttaagcctaattgctctataatttgacaatgtggtgctaagtaaatatttgtaatgacggattaattaggcttacacagtttacaagcgaaatctgtaatttgttttgttattagtctacgtttaatacttcaaatatgtgtccgtatatccgatgtgacacgtcaaaacttttcaccttgaatataaacatagcctaaattggacggagggaatacctttgtagaagagctgcaggcagcaagatgagggagccaactgcttggcgatagaagatgaagatgtaggtgttcattccgtggttgaaagcagccttggatatcacaaacatgccagtgtagatcagttgaacgatgatggcgacaaaataaggcttcatacttgctttcaccatctcgatacaggaatagcaaggcgtgcgtagtgtttgtgggagtgtattatcttcagtgtgcgagagcccccgtttagttcatggcactactcctatgtatttatattaaaaagaagaagcaagcagtatgccgctcagtcatgtgctcaggagatgtaaaacagcagcggtggtcggtagtgtgtgcttggacggttggacccagtaacggcacgccaagtgtaaacgcaagagcacggtaggtgtggacttggactgagtgacggcacgtcgtatggctttgacttggactttaacttttaagcacgccagatccacagataggagacccacttcgagtctgtctaccaacgttcagctcgagaggaccgacgttccgtggccgagcgtgccgcgcagatgcctgtccagggaccaactttgaccttactgtgccggacacgagaacgcacgcaccggagtaggactggagtatggtcaattaagtagaaaacaaatgtatggtcaaagtcgctgggattcgctaattgctacgcgcaagcaaacgaaggctgtgttcgtttggacgttttccccagcgcgctacagtaacacggaaaacggaacggttcattaacacgtgattaattaagtattagctaattttttttcaaaaatggattaatttgatttttttaagcaacttttgtatagaaactttttgcaaaaaaatacaccgtgtagtagtttaaaaagcgtgcgcgggggcaaaacactgtagcgcgacgggaaaacgtccaaacgaacacagccgaaatcacgcgcgttttggatccacgcgttttcacttttcctctttttttttggcctggtttagttgctactaaattttttttctaaaaacattacattaaatcttttgacacatacatagagcattaaatatattaaatatagattaaaaaaactaattgcacaattagaaagaaaaatcgtgagataaatcttttgagcctaaatagtccatggttagccataagtgctacagtaacccacatgtgctaataacggcttaattaggctcaagattcgtctcgttgtttcaaggcgagttataaaattagttgtttcattcgtatccgagaaccccttctgacatccagacaaacatcgatgtgatacccaaaaattttcttttcgtgaactaaacaggccctttgttttcttttccccaccggatccccgcacgcgcacacgccgacgcgcattttctcctctcccgtaactaaccaagtggcggcgcgcattttttcttctcctgtaaggccctatttagtttccaaaacaaaaaaatttccacactgtcacatcgaatgtttggacacatgcatagagtattaaatgtgaaaaaaaccaattacacagattacatgtaaattgcgagacaaatcttttaagcttaattgcgccatgatttgacaatatggttctacagtaaacatttgctaatgacgtattaattaggcttaataaatgttattagattacgtttaatactttatgtgtgtccgtatatccgatgtgacaaccaaacctaaaaattttcctcaactaaacaaggcctatctaaccgagttagtttagaataatgacaataattaaaaaaatattcggtagcgctaatacgcgcgcagcgctagaaatagtacgtttgtccgcttttctcgttttatttctacacacggacctgtcacgcctccttctatttgtcccaagtaaaatattactaccggcttggttggaaatacctaactaaaaaatacgcaagggcttccataaaaaatttcgtctgtcgtccgctttatccacacgagcaattggttccattaattttcgtccgtacgtgtaacgactccgatttgttaccatagacgtggcctgactgaccgttgaatagtcatattgaccctgtttagatcctaccttaaaatttttcaccctgccacatcgaacatttaaacacttgtatgaagtattaaatgtagactaaaaaataactaattgcacagattgcaactaatttgcgagatgaatcttttatgcctaattcctccataatttaataatgtggtgctacagtaaatatttgctaatgatggattaatttggcttaataaattcgtctcgcgatttactgacggattttgtaattagttttttattagtgcccgaacacccaatataacatcctatataaaactcgatgtgacatggcaaaactttactactattgacctaaacatccctattgtgtagcaacacattatggcataaccattgacattctcagttggttagccaatgaaacttgtggccgctatgatgggagttcgattcctatcacccatctgttttgtgctccttatcctctccaaatttttcttttcctctcctaagctgattatattatattttttataaaagtacatccatgtgtttgaaattcatattaaaccagcaatatatgtaattttctaccgtgtttttctacactttgtcacctcctcttattaatattttcgaaaagtatgtccatatgtttgaaactagtattaaaccagtaatacatgtaattccctactgtgattttctatactctatcaccaatgctgcttatcctctcattttttttccttttctctcctaagctgattatattttttaaaagtacattcacatgtttgaaaatttatattaaaccagcaatatatgtaatttcttacagtgtttttctacggtttatcactgtttgagatcgcgactacggtatttgcatggtatagagataatggtaccagggcatatgcaagattgaaataaaagagacagaaacaagaatttttagggtgcgttcgtaagaggcggttgggaactcatttccttcgcacgtcaaacggagcggttcattatcacgtgattaattaagtattagctatttttttttcaaaaatggatcaatatgtttttttaagcaactttcgtatataaactttttgcaaaaaacataccatttagcagtttaaaaagcgtacgcgcggaaaatgagagtggggagctaggaactgggagatctgaacacacccttatataggttcgggccccttatctagcaggtaataggcctactcctgttagtcgaaaccggtgttgctcctttattcatgtaaatcacgcaaatataataattgggataacacatctagctgtcgtcaacttggcggcatgaataaccaacacgtagtcgacgatagggtagataaaattttgtgtgttgaaagaaaatatcgatatatttttttaagtagataagtctaacggaaatgagtgaaatgtgggaatatagtcgtgtgctgatatggaaggaaaatgcgtggagttgaaaaatattgctcccttcataaaaaattaatgtaagatatatttcttttatcatcacaagtctggctctaatgggccgcctggggttgaggctcgtcgcggccttggttacgttcggaggagaacagagcagcagatcgggctcgggcggcgaacgagctctcagtgactcggccagccgtggcttcgtgctgtgcatcgtcgcagcccatcggagatgtgcgtggccttagcttgctgttaacgggtgcctcggcgtcctcgctccaccgaaatcgctgccgccaccatcgtttttcacaagagtgaggaaggagatgggcaaaatgattttctttttagattttttgttgtcggatttttgtctaagtcgggatcaatcgggaacatcttatcagattggctggtcctagcttctcccccgtcggcccagcgctattcccagggcgccgcgctgctgggccgcctcatgtgcggcgcgcgcgctccacttagaagcaggccgcaagtttttggctatactaaaatcagttattattatttttctcttcctgtcattttaagtagtagtattttctatttttaaaaatagcattagtagtcacccctatttaacaaaaccaaataattataggtatacatacaattaatgagtatcaagttgttagtgttttgatcaacaattattttagtacatggagactatatatgatccctctaaaaatatataaaaagagagagaaaaattataaagccgagtgaacagggaaggaaaaaaaaagacagaaacagagcggataaaccaaagcagagcgaattcgcgaactcacattcttcctccctctctcagtcaccggatagaaaaatcagagcagacagaggtggtttttgaatattctgaagatgaagatgaagataaaaattaaatgtttcacacaaaatgaggttgtaattgtttacacccaaatttggcatataaaattaaattaaggaaaattgtcaaaatttggaagtctgccggtttttctctaagaggaccagtctgaccgccgtgtgtcagccgatcagaccacctctagtgggccggttagactggtggtgtgtggccggtctgaccggcagagtccgagccctagtatgtttcatcgggtctcgagttttccttacttgggaaggcatgtttcgggtttcctttggtttctatcccgagttgaacgtggaggagggcctgtagagggcaagaccaatccctatataagagacaaggccggttcattgtaaaaacacaatcaacaatcaatcaataatagaatcgttttttcatattgcttttagttttcttttattttgtccatctttgtcgattttcgctgtaaatcgttcgccgccgctgcgagagtgtgatacctctttgtatgtttgtcctgaaaaccttccataaattagtcatgaaagcgagaaggttatccttttatagtttgctcggaaactagtcgttcgtcgtcatgtaagtaagatattatcttctttactaattagtcatgtaattccacaaaagtgaattaatctcgaaatcagtttcactagccggttttgatttatcgattttgacgactctgttgattacaccctaaattattaggtgatcttatgttgacctaaaaagcgttaacatattttagcaactccgctagggagagaatttcggtcacgcgattagaccgaaatcaatctaatccgctctttgttggctgccgaattaatctattcggcggcgtcggccagccatcagtccgattatctatttatttttatttttgtactccctccgttacagagtataataagttttagagctggacacagttattaagaaaatagataaaaataaatagtggtgggttgtgattagatgagtagtggagataggtgagataagtgaatggtggaggcctagaggattgtgattagttgggaagagaatgttgacgaaaaatttgttatattttaggataaatcttgaggattaaaagttgttatattttgggatgttgggagtatttgtttggtggtgaaatcgtttggcagtactgggaaagcacttctacgcatgctaaccgaggtataaagaagccacgctcaatctgtatgtgcttgtttatctatttggttttttaggtatacacgcaaatcttaccaggaagagtcaagcttccgtgctgaaaatacatcgacgtgtaccggagcgcgacaccactgtatgttaattgcgaggtacaatctacaatcactttgccagtgtcttcaaattatttttcgagtattgtgaattctcatatagatgttgatagacctaatttcaatggatatctgcatcggttaatgattgctcaaataattatttgagatctttgaattatgatgaaaataacatgtcgcagctttaaattttaataattcaagatatccaatatgttcacacaccttttaattgatcggtaattattttggaacctattactacacaataaattttgccgatgaaagacatgcatgggcatatggccatggcagtatgtattatctagttgattctattaattcattacatgccatgccaaataatgggactcacctatggatcgggtggccgattttttctgagaaaaatcgggtgcccacatcatcatgcatgcatacaaaattttctaagcgaactttaaactattttttctcttaagttatttatccaaatcatgatccgattgcactattaaatccattgcaattaaatctttacaacaagaccacacatggatataatccgatgaaaaaatattttgctagaacctatgaaacaacggtttgccaaaaaatcggcgctatttcaccttatataagaaaaataatgtttcagtaaatagcgaaagaatgtttcaattcattgcaatatatacatagtgaaatattatgtgtacactagataaaacatttttgatggaaaaaaaagagacaaattcccttaatggagggttttcataatatatgtgggtgatttgttgcaaaagaatgtttcaattcactgcaacatttgatctatacatagtaaaacatcatgagtacactaggtgaaatatttttgatgaaataaaaaatgagacagattcctttaaaagagggtttccataatatgtgggagattcgttgcaacgaagtgtgtggtggggacacgtggcgtgttgttgtagggacgcgtggcggggcgtgtgggaccgctacgcgaggcgcccgatccgcacgcgcgcgcgttgggcaccgaagcgtcggcattttctcaatcggagttttcttttcatgctaatcgttcatcttgtatagtgtaaaacgcttataattcggcttcatgcgctatgaattatggctagattaatgaaaattcaacaagtatacatacaactccgtctgattttgttgcatatagtacatcacatgaatctccccagactttcggcaattctcatagttcattgccgaaagcacgtgttgagatccccgcattgcatatgtcgtatggagagccctccatatcataaagatagatagaaaaaactgtagagatgtgaaggagaaatcaatgcatatattttaagcaagggtcaaaactaacttttgctcaacaacaaaagccgataaatttagaattatcggctaatgaaatagaggtagctatgtttgatttctctggagacataggagcttttgttttgccagctgaatttcatgtcaaggaagttgacaaggatcaagacgatgtagcacaaaacaacgcagacaaggaggagacgttggatggccataagatggctaagcaagacatcgttcaggtgaagaaatcgtcctccatctccaacacatctgataagtaatattaactggtaatttacttttttttaatcacacagtacaacgcagatactcacaaccacaggcacctcgctgtcgatggttacgtcgcctaccacttaaagcacatcgccgttaaatcctagaaaattcgctcccatggggagtcgaacccaggatcttaggtactactgaggctcttataaccactaggttacatgcccttttgcaactagtaatttacttatttcccaatttgatcataaatttgcaaataattcatgcgttagaaatgtcatcatgaataattctaagggatcaattggcgagattaatatttttgttggaaataataaagtgtttaaattttctatatcatcgttgccaaagtttatgtctacatggtttgcttataatcaatctagagctagagacacaaaactaaaattagaatatattaatgaggttgatgctaataaagtggatagttctaaatcattgaataagggaaatataagcaactgtgtagccgaatgggtagacattaaatctgaatcattcgcttgcttagctttaaaaccgtctccacaaaagtgtcggttaaagaaaaagaagtataattttgattggactatgtgcgatcatatttttgatgatttgctaaaaaaagatttgatcaaattaattgatcactatgtcatgccatcgcttccagatttaaaagaacaaatttattgtaagtggcacaattcgttcaatcattgtactagtgattataatatttttcgtcagaaaatacaatcggctattaatgaaggccgattgcattttgcaacttcaagaaagtcacatgccaaggatgatcgtttggataaaataaattagtctaggtggtctctaataagaagaagtcttcggcacaggtgggaggtagttcaatgaggaagcaaatctaggtaccgaagtctaaaggtcaagaaaagggcttagctgctagcgcacgtctgagtgtagaaacaaccttggttcaaaaggagataattgaacctcgggggcatacacgtgtgcaacaactagaaaatttacatcatgtgagtatgaagcgagaggcatctccgacagagttagtaacaaatcagaattcgccgaagaactctgtgggcaatggtagccaaccgagacactcacatagcttatcaaattagtagaagaaacagttggacaaagtgtagaaaagttgagggagagagtatagcatgggttcctaaaggatgtgttcaagtgcagaatgaaagagatacaaggagaagggagttaagaggtgtgtgccaaatcaaaggttcgcatccaaatatccaatcatcacgaaattttgtcaccatattatttatattcttcaccaatgtcatattaatgccgatgtcatggaatccattcccaggtatgcctttgcgcgccgcctgaaagacatcaacaaaatcaaaaggagacgctaattatatgagaacattcatgttaccgatcacacaaagttgaagcctacacacctttcgccgcgcatacatgagcccaaattaaaaatagaattaggctgcaagctgcatttgtgtacaatctaatgtaagttgcttctcaacatctacatttctgagacctgaccatcctctcctactgaaagccctttggatatatgaacgtcgagtcgacacaaataccacctgttgtgtgtgtgcaatcaatctacaccatcgagaacatcagcttgattgtttggtcaggctttgagaccacaaaatcgccagcatggtaaagtacccagctcccgggctcacccagggagcagagcactgagataatgagtgctgcccaccagaggtggagagctggaagcgaacaggcttcttgtcccaaccatggacatgctcagtgcttcaaactcggcgtccaaatcgcttgtagaactttccgagatgaatcctgaagtataagctgtaggttcccacagggaagctgaaatcgatctttccaaccacttcaaaccaccagatttgctgaaggtatgccacagatgaaatctgcatgaacaaaacaagaaagcgtaggtaaggttggatccagaacatatgacattctcaaccgtaattgagtttgaatagagtagatacattttcagaacgtcattatgagaaccaattacggttcaaactcaattacggttgagaacataactagttaatattaatatgttaactcaattacggttcaaactcaattacgtcatacagccaaacatatcattatgtttcagaactaagagtacattttaatttataactttggctttacaatgttagttaatactcggtggaataaaccacggagaaatatgtactttgtcatgagggaaactggaaagacctttggttcaacactcttataaactttataatactatcttatgttgaatagtttcacattggttgtggaagggcaaatgtcctaagatataattgggggagccccttacctcaatggctagcttttgaggtgggaaagaccctttacgatcctataattggtataagagcctggctagtttaacatctctggcccgatggacacagtgtgtgaagacctgatggaccgtgggtgcttgcggggctcgtatacctgatggaccgtgggcagggcccgtatacagttaagggttgagggacaccaatgtgtgaagggggagattgttgaatagtctcacattggttgtggaagggggagattgttgaatagtcctacattggttgtggaagggtaaaggacctaagatattagtgggggagccccttacctcaatggctagcttttggggtggaaaatgccctttacaatctacatcttatggagctttagaagacaacaaggagcaaggtagattactaaaacaactaccaaaatatcagcattcagatcaaacttttaatttcaaaaccaagttagaggtatgcgtgaacagacacttaactcggtctcggctccaacctccctaaccatcagccctaccttgaccagcaatatccatcccgtaccagagacggacaacagcttgagctcatggagcatgcagatggcctcagccatgcgcttgcggggcatgtcgacagtgacgatggtcgcactgcgaggacaaaaaaactcagtaaaaggcaaacattttcttgagtgaagttactgctgtaaaagaaagtgatggctcaatgatctacagggattagcaagcataaatctctgtttcttgcagagtaaattgtactcctaccaaattcccttatctgattatggattgtctaacatcagaatctaggcctttttttcaccatcctacaatgaactgaaggatggcgcgtcatactacccccaatgaactgaaggaaaaactaagttgtaaaaaaaaaatcaaccacaataatagtctctcaatggtgaatttcaactacaaattttgcatataattataaagctaaaggttgaaagttgcaaactcagggtgatctctatagattatagaacaagacataatgtgtcaccaccatatataagcaaaattgtaagctatgcaaacatgtcactgacctatgtgccaggaatacaagaataacgacaggtcaacagtaaagcaaaaaacagaatctcggttgttagtttcaatgggctttctaccaagtttgtttaagcattacaagaagcaatcaagctgtattaaaaatagtataaatcagtagtgcttcatttggaattcctttgtggtggtgatagtccagaaaagatcatattaagagatattaaaagaaactgatgacaaggttagtttcctttgtattggtaagaacattagtttcctttgtattggtaagcaatgacaatgatggtctgttagcaactactttggaatattggatcatgcatttatgaaaaaggggaaaaaagagaagcatggaaggacaagcaaattgcaaaataaccatctgttcgaagcaccagttattcttgtacatgaatagttacattatgctagatgaattgtattaatatccaactcttacaatagaagtaatatgcatcaaaatttctgtacacacattatttttgaaatttgtgtggaataacgctttcaacacaaatcttccccaaaattaatggctaaatatctactatgtaaaaacataaataaataagtaaaatggaatcctgtaaaaacacacactcatgccatgtccggagtatattctacggaaccctatgaaaacatgaaaggatccattgaatctaaaacaataggaaattattacaacaagtgtacagtgtatcttgcagcttgcctatactgtgcaataccctaattttcgccaagagtaaattatacctacggtgcaacaacttggcaggtggatgcgatatagtgcaagaacttaagaattgaacgtccgagtgtgataacttgacaagtgggtgcgttctagtgcaagaacttgacaattagtattttggtgcatcaacttggctatgcatatgctaggtgagtttttttcacgatgtcaacatgccattacataataatcctacggatattactttataatattgaatataatctttaagaattttttgttatcttcaccttctcaaatatcaaccgaaatataataatttctacatccgatttatttaaaaataaataaatatgcttatacaaatccacgcaagtatattgtcaaaataagtacttaaaaattgaatttatataaaaaaaatgctccaaataattaaaatgtcgcgtaacttaatttattgtatcaaaatcgtaccaaccttgcaagttgttgcatttacacgatcacttataaagtttttatactattgcacttacatttaatgttgttactagaacgcttatttctcaaattaatgcaccaaattacacccatatgccaagttgatgcaccgtgtgtgc

SEQ ID NO: 15998 - DNA, 9243 bp, Oryza sativa
ggcagagagagcgaaccaagaaacagaagaagaacctctctccgcctttcttcagttactggtcatgtctgaaaatatttaatcagtttgagagcaatgttcttggcgagagagagttacatgagcacgtgcattttttttctgatatagcaatttcgaaaacaaaagaagaactggaaggagaagaactgaaccttttcttgagcttcttaactgcagcattttgctaatctgaaccaatgccaaaaggaaaagaacatctccacctttcttcagttaccggtcatgtctgaaaacatttaatcagtttgagagcagcgttcttggcgagactcgagagagagctacatgagcacttgcatatttttctgatagtaatttcgaaaacaaaagaagaactggaaggagaagaactgaaccttttcttgagcttcttaactgcagcactttgctaatctgaaccaatgccaaaaggaaaagaacaggaaggcaattacagatcgtagttccacacccttatgtaaaaatgaactgatgaaatgcagcatatcccgtaacaatgaaggcatgaaaaatagagagcgtaccaaattttggtgaggatgcaagctacgatagatatacaaaatgcaaaaatgaccggaattgctgaagcagcacatgaaggaagatatcaatgccccaacagtaacaaataagataatagtcataaaattgtggaagaattactttttcttgacttgaaacctggtgattagaaagatacatttcagctcaaagttttacttatataagatgtaatttcagactatcaaatcaatgtttgagtactgaaaatgcatgtgtttgtaatttggcagaagcgttctacctctctcgaggccgtgttacgtgttaatatagatgagaaaagccctcatcgtggcgtgtacaaactgggacaatcagagatagaatatatcttgtgaaataagaaagaaaatagaaaccgattctatctcctatcaatatatgctattattgcatgcacaaactcttctaacactcccccctcaatcataacttatctaagttaagattgtgcctaaaatttctaagctgctgaactgaaagcggcttagcgaaaccatcagccacttgatctcctgaagatataaacttgattaccagttgttttctagcaactctttctctgacaaaatgataatccacttctatatgtttagtcctggcatgaaaaacatgattaactgacaaatacgttgcaccaagattatcacaccatagacatgctgtcataggtgcattaatcccaatttccttaagtaaagtttgtatccacataacttctgcagttgcattagcaactgccttatattctgcttctgtacttgatctcgagactgttgcttgtttcctagcactccaagacactaaattggatcccagaaacacacctccagttgaccttctatcatccacagatcctgcccaatcagcaattaaaaataacttaccaacatagatgaagaccggtttattttcaaacctagatcaactgaaaattttatatatctcaatatcctctttactgccatccaatgttcaacagttggactatgcaaaaactgacagattttattcactgaaaaagaaatatcgggtctagtcaatgtgagatactggaaagctccaactatacttctatatttagttgcatcactttcaccaagaacagtaccactatgagctgacaatttttctgaggtagagataggagtattgactggcttacaattcaacatacctgccttttttaataaatccgtggcatacttttcttgctttaagagtataccatcatccactgtactcacctctatacccagaaaataatgaagatttcctagatccttgagtgcaaattcttgcctcaaatctgtcagcaatgcagttactgctccttctgtagaactagcaataattatatcatcaacatagataagcacaaagactgtaacatctcccttgctataaaagaataacaaagactgtaacatctcccttgctataaaagaataatgaagtatcagccttagatgccttaaaaccaagattacacaactttgtgcttaaccttgaataccaagcacgaggagcctgtttcaatccataaatagccttatctaacttgcaaacatagctaggcttactcttatcttcatatccagatggttgtctcatataaacttcctcttccaaataaccatgaagaaaagcattttgtacatcaagctgacgaagacaccaacctctagatacaacgatagataaaatagttctaatagttgctgctttaacaactggactaaacatatcctcataatcaattccatatcgttgtttaaatcctttagctactaagcgagccttatagcgatccaaacttccatcagacttccttttaattttataaacccatttgcagtctataatatttttgtcactactaggcggaacaagatgccaagttttattatctagaagagcagtaaactcagcatccatagcatgtttccaattattatcagctaaagcttcagctagattatttggctctccagtcatagctaaaaaagaatatcgaacagttccatcggtatataccttttctttccttgtacctcgttgcaaccgagtcattggacgctgtaccatctgctgctgctgctctgcgccatcattgccatcattgccgtgctgctgtacactatgctgtgcctgcgagtgctgctgcgcactatgctgtgccgacgatgtggcagtcggcgggccttcttgctccctgtgacgcagctgcagagctagcaccatcatgtgcagtagaactgtcctcatctgcatggtactgtacaagagagtcattattaaattttacatcattaggctgaataactgatgcatgatcaggatcttctgtgccgtctggatcttctgcattttcttcaaaaacctctgtattccctgaagcaatattctccatatttcctgaattatcattcaagtgctcatgctgatctgtaacatgctcagacacaccattagaacgttcaggagtattaagcatgtgatcattactatatccaaccccattaggaatcaaagaagaaggtaaaagtaagatttctgatctcaatctagctccagcattagaatgcaatttagagaaaggaaagacattctcatcaaagacaacatcccttgaaatataaactctgccagtagatacatcgaggcacttaaaacctttatgtatattgctataaccaagaaaaacgcattgttttgagcgaaactcaagcttgcgcttattgtaaggacgaagatttggccaacaagcacaaccaaacgttctcaaagcagagtaattaggtttttgatcaaggagccgttctaaaggggcggagtattgaataactttgctaggaaggcgatttatgagatatgttgctgctaggaaagcctcatcccagaactttagcggcactgaggcatgagctaggagagctaacccaacctctacaatgtgtctatgcttgcgttctgcggaaccattttgttggtgagcgtagggacaagagacatgatgtgaaataccaatcttggtaaagaaggagtgtaatttctcatactctcctccccagtcagtttgcatagaaataatctttcggttaaacagcctttcaacacgctgctgaaactcatgaaacttggaaaacacctcagacttgttctttaagagataaatccaagtaaatttactgaaatcatctatgaaactgacataatacttcctactctcaacagacacaggagcaggtccccacacatctgaaaacacaagctctaaaggatgacttgacacactagaggacttgggatagggaagctgatgacccttggcctgttgacaggcatcacacactcctaattcattaatctctcctaaacatgggagtttattattgctaataatcttttgaacaatagctagagatgggtgacccagacgactgtgctacctcgaataggtaggcttgacgactccgaggacttgcttggatgaggaaaacgaagatgttggcaaagggtacaatccattgcggcatggccatctaagaagaagattcctcgtgacctgatccttgatagcaaagaaacgtgagtgaacttcaacaaaagcgttattatcaacagctaggcgatgagcagatatgagattctttttaacttttcgaacatggaggatatttttgagatgaatattgcggacaggggtatgaataatagaatgaccaacatgcttaatatccatacctgcaccgctcgccgtatgaatttgttccttgccattgtacttttcatgagtcgtcaatttttccagcttgcctgtgatatgatctgtagctcccgtgtccatgtaccaatttgtatctacaccataggatgccacagcagctattctggagtctggaacaaaattttcaacgtacctgtgccaacaatcggccaccacatgaccggtttttccacagagttggcagatggggcgtggtctgttgctgaagccacgtgcgcctccgtttcctcggccccgaccgccgcgatcgccacggccgccgccaccgcgcccgcgagatacgttagcgatattgttgttgaagccggtgttgttgttgaagtttgtggagattatgggtatcccatatctacacggcgacggtattcgaactgggtacaagatacctaatgtagatagaatatcttatctgtatctcgggtttgtttcttaacttgtgtatcaaggaaacaccctgagacttagtcggttacgactgtattttacctctatcttcatattccgttaggaatatagattatcttttgtaatccggactccttcccgtatataaggggggtccggagcgcctctaggggcagatgttgatttttcccgaatcatacaattaataatacactcggcggattcatccccggacaggagtagggtattacttcttttataagaaggcctgaacctgtataaatcttttgtctccaaacccatacacttttccagcttgatagccacccccttttattattgccgaaatctagtttcgacagttggcgcgccaggtaggggtagcgtcaagcttttcgccgatcagtgcaatgggtcctttttccggcatcgacgacctcgtcttcccacccgggcagacgtttcggttcggcagcctcgacttcatcaccaacaacttcggcaagatttctctcctcgactcggaatcagaccagtcgggagagaaccggctttcggtcccgtttggattcccgaacgcggctgaaagctacttcaagaccatctcacccgagtcggcttcaaaccactcggccgagatcgcatcttctccaacgataccagatcaagatgatggggcttacccaccggtcctgatgaagctccccgacgatttagcggccgtcttcaccacgacagcgccttcatcccgtaggcctaggcggaagtcggcttcaacaccgatttcgcctagcttcagggaagtcggcgtcatcctccaaccactcggcacggtttcgacggaccagctggatgactacaacagctctcccaccgtcgactcacgtcctactgacatcgtggagtacgacgaatttagttctcgatacaacgacttcaacgacttcgacgacttcgacggaagcctagatgacaactacacccctctctactttggcgttttcatggccaataatgagacggaggagcaacgccaagcccgggagaccgaagaacgacgccgactggaggaggagcatcaagcacaagaacaagaacggctacggcgcgagcagcaggaccgtgagcggacagcgaaggaggctgaagatcgacgtcagcgagctttggaagcagggcgccgagcgcgtgatctcatcggccagcaagatgtcgaagggacaccggttttccgcacccctcaacagaatgcggttgccgcgatcacccttctcgacaccctcctcaaccaaaacgagctcaatcaatccgaccacgtcgtcaacatcttgaatcagacgaagaccatgattgcggcaacggtcccagttaactccgaaagcgtccacacgccgactggcagccgggtcccccacttccgatctcatgactaccgtcatccaagcctcagcatcactggagcaggatccaatcgcaggagcaggggccacgacgagcggtctgttcactcgcctcccgaacttcatagggagcgccgagtggaacggcctcgctcaccacctcgtcgccgccccatcgatcttcgcgacacaatcatacagcgccgagcagctcgaggctaccatcactcgccggatcgccgcgacgacgaccttgacggagttgcagccttcaccgacgacctgcgtcgagtggattggccagccggcttcaaaccgactggaatagagaagtacgacggtaccactaatccagaatcgtggcttaccgtctacggtctcgcaatccgcgcagcaggaggagataacaaggccatggcgaactatctaccggtggctttagcagattccgcccgatcttggctccatggactgccccgtggtacgatcggatcttgggccgaattacgcgaccacttcatcgccaacttccaaggcaccttcgagcgtcctggcacacaatatgatctttacaacgttatccagaaatccggagaatcccttcgagagtatatccgacgattttctgaacaacgtaacaagatctccgacatcactgacgacgtcatcatcgccgcattcaccaaagggattcgccacgaagaattggtcggcaaatttgggcgcaaacctcccagaacagtcaagctcatgtttgaaaaagccaacgagtacgccaaagctgaagacgccgtcaccgcatcaaagcagtcgggcccagttggaagccgaaaaatacgccggctacgggaggaggtggaagtaacaatcataaggaccgcaagcgtaagcctgaggaacttgttgcaaccgctactcactcttctcgacagcgttcgcgcgtcaacaccttcgacaagatcatgaactcccaatgcccgcatcatccaaattccaaccacgtggccaaagaatgcttcatctacaagcagttcgcggagcagtacaccaagtctacccggaagaactccgacaaggaacaaagcacgtcaaggaagaaggacgacggcgacaccccggctggatttcaagaccaccgcaaggagctcaaccatatctttggcggccccctggcttatgagtctaaaaggaagcaaaagctgaccgaacgggagatcaatgctgttcagcccgacacgccccaatatcttcgatggtcagagatcgcaatcaggtttgaccgctcggatcatcctgaccgagtggtccacccggggcggtaccccctggtactagacccagtggtccgtaacgtcaagcttcgcagaaccctcattgatggcggcagtgcactcaatatcctcttcgccaagactttggatgatatgcagatccctcgctccgagttaaaaccaagcaatgcgccttttcatggagtaattccaggattatccgcaactccactcggccagatcactctcccggtcacttttggtactcgggaaaacttccgcacagagaatatcagctttgaagttgccgatttcgagacagcataccatgccatactcggacgcccggcgttagccaagttcatggccgtcccgcactacacatacatgatgatgaagatgcctggtccccgaggagtcctaaccctacggagcgacatcaagcaagctgtcacatgcgacaaggagagttgcgacatggcccaaacccgcgagatggcgtctgcccgagaggaaatccgactggctgcaaccacggtgagcgaaggagaagtgcccgctgccaagatttcaaaaagtggggaaaccgaagcccagactaaaaagattcccttagatccttctgatcctaccaaaactgctgtaataggcgccgagttagattgtaaataggaaagcgcgctcatcacctttcttcaaaataataaagatatctttgcgtggaaaccttcggatatgcccggtattcccagagaggtgattgagcactccttacatgtcaaagaagacgccaagcctattaaacaacgactccgccgatttgcacaagacaggaaggacgcgatcaaggaggaattgaccaagctgttagcagcaggcttcatcaaagaagtccttcatcccgactggctggcaaacccggttctagttcggaagaaaacagggcaatggcgcatgtgtgttgattacactgacctcaacaagtctgccctaaagatcccttcgggttgcctcgcattgaccaggtagttgactcaaccgccggctgcgagcttctcagttttctggattgctactcggggtatcatcagatccgactgaaggaatccgactgcttgaagacttcattcatcacgccctttggggcatactgatacgtcaccatgccgttcggactaaaaaacgcaggggcaacttatcaacgcatgattcagagatgcttctcaacacagatcggccgcaacgttgaagcctatgtggatgatgtagtcgtcaagaccaagcaaaaggatgacctgatcttggatctagaagaaaccttcgcgagcatccgcgccttcaggatgaaattgaaccctgaaaagtgcaccttcggagtaccgtcagggaagctgcttggctttatggtgtctcataggggcatccaagccaacccggagaaagttactgctatcctcaacatgaaaccgccaagcacccagaaagatgttcagaagctgactggatgcatggcggcgctcagccgattcgtttcaagacttggcgagcgggggatgcccttcttcaagctactgaagaaaacagataatttccaatggggacccgaagcacagaaggccttcgaagatttcaaacaactcctcaccaagccaccggtcttagcttcaccacacccgcaggagccgttgttgctgtatgtatcagccacctcccaggtcgtgagcacagtcttggttgtcgagcgtga

SEQ ID NO: 15999 - DNA, 5904 bp, Oryza sativa
cctgcattgacgacaatatgatggcatatcgacaagaggtacgcaagttggaagacaagttcgatggactcgagcttagtcacgttcttcgacacaacaatgaagccgccgacaggcttgccaactttggatccaagcgtgaggcggcgccctctgatgttttcgtcgaacacctttatacgccgacggtacctcacaaagataccgctcaagttgcgggcactcatgatatcgctatggttgaagccgactggcgagagcccttcatacgatttttaacttctcaagagctccctcaagataaagatgaagccgagcggatttcaaggcggagcaaactttatgttatgcatgaagctgagttatacaagaaaagcccttcaggaattttgcaacgctgcgtatctttagaggaagggagacaattgctgaaagacatacattctgggatatgcggaaaccatgctgctgcgcgcaccattgtcggcaaagcttaccggcagggttttttctggcctactgcagtgtccgacgccgacaaaattgtgcgcacatgtgaaggttgccaattttttgccagacaaattcacttaccagctcaagagttgcaaactatcccgctgtcttggccgtttgcggtttgggggctcgacatggttggcccgtttaaaaaggcagtcggcggttatacgcacctcttcgtggccattgacaaattttccaagtggatcgaagctaagcctgttgtcacgattacagcagataatgctcgagatttcttcatcaacatcgtgcatagatttggagtgcccaatcggataatcactgataatggcacacaattcaccggcggagttttcaaagacttttgtgaagattttggaataaagatttgttatgcctcagtagcgcacccaatgagcaatggacaggtggagagggccaacggcatgatacttcaggggattaaagctcgagtttttgaccggcttaaaccctatgccggcaaatgggtgtcacagttaccatcagtactttggtctttgcgtactacccccagtcgggccacaggccagtcaccttttttccttgtctacggggcagaagcaatgttgccgagtgaagtcgagttcgaatctttgcgcttccgtaatttccgtgaagaacgctatgaagaagaccgagtggacgacttgcaccgactggaagaggcccgcgaagcagctttgattcagtcagctcggtatttacaagggttgcgacgttatcataatcgcaatgttcgatctcgtgcctttctagtcggcgacctggttttacggaaaattcaaaccacacgagatcggcacaagttatctcctctatgggaagggccatttattatctctgaagttacccggccaggttcatatcgactcaagcgcgaagacggcactctcgtcgacaactcttggaacattgaacatcttcgtcgtttctacgcttaactttatcactgtatttccctatttttgactgtcaaacatcaagttttttccttgaagttgtcagtcgggggctatcatcataataatggagtgtgattttttatcaattcagtttgcttacttggtttatcattgccttgtttggtttttctacttagtttgcgaggactgaaagtttttaatagcttctttgggttttaggctcaacaaagcttagcaaaaacttttaagaaatcaaaaacttcgcaagaatcatcaagcacagcataaatacaccagtattgtacaaattgagcctccatgtattacattcaaactcagtcagaatcagtcctttcatcatcagagtcttcattactcggctggaggtcgttgttgcgaaattgctccacaacatcactcgcaattttgtcagccgcattttgcgcactgctgataagatcaagggcagcttcttcacttgtcccgtctgcaaatccatcaatggtgtcgacttcaattctcgggtacaaggattttgtcatcgccaaggccatgccagctcccatacttccagctttcttgatattcttgaaatatacttccggagcaacactcagcttgtcaaatatttcggttgcgtcgagtgcactcggaccaccattattgaggaacatggcttggataattggtgcagcggcattggcgacgtcatcccttgctccttcaagcctcttgatcttaccaaccaggacgtcaaactgagcttgagatttgatcttgcgatctgcaaaacacatttatgatgagcatctgttgcattataaggagagaagctcagattgttagctggcgttaccttcgacttccttcaaggctgagtccctttgcgcagccagctctgtcttgtctctctccagggcttcaatttgctccgccatctgttccaccctggcggcttgcgctgtttgaaatccagatggttgaggatgcaattatgacagcataaatcaatggaatggatctggatgattaccttttgatgaaccacttagttcgaagtttgcatcctggagctgggcgattcggtcccttaactctttctctgtctttttggcgcactccttggcctcatgcagctggtccctaactgcttctagggttcccaaatgaggaaccagcttttccaaagttgtagtcttggcctcattgcgaagatggattctctgcatgatggatcgtggttcagttctgctaaaaagaaaataaagttaccgaaggccgtcactcggaagacttacatttacaatacgagtggcttctccgagcgctttcttcagctggcacacttcttcatcttctttttgacggtttatgactatgccggcggcttgtgagttctcgtcctaccatttgatcaagataggaggacgagagtcgtcggtcgcctttatgcgagggatttcttctccgtcatcacctgacggtcctgatgtgtttccaagtcattagacggatacactgaggttatttaaatcgccattgtttgagaagacaactaacctgaagatgtacctagctgagcgtgaggtgatctttgttctttacctgaagacccagctatcgagtcattaccagcctctggtccttgcgaagtcgtcgtctgcgcttctacttcggggatctcttgatcagggcctgcgtccgactggtttccagtcgggggctcttgagttgttgccgtttcagttgttgccgactggtttccagtcggcggcaggtcactcggatcggccctatcgcccgaagcatgggcaccagtcggctggctttcagtggtcggctggttttcaacagtcggctcggggtccttggatatattttgctctgtcatgccaggatcggggtcttttccagatggatctatatcagatggtttcctgcagagtgttctttcagtatttagcattatcttcatcggaaaacatgccgaagcggaaatcataccgagagatctaatacctggaagatgttctgatctttggcattgcacggccagctagttttttcctgggcatggtgcgctttgggggtttattaggcgagcccttatccccagatttatcatcgtcgccttcatcatcatcaagtaccagctttctcttgcgaggacctgtttgaccagtcaatttggaggtctgaggttgcggatctggtctgatcgttggccctccacctccctgagcggtgtgttggcgaggagaccggcgctgagtgactggtggatctgacttcatcaatgcatattcctgaacaagatgcttccatagttagtcaactcagcatgaagataaaattatgttctgatcacagtttgagggtttctgatacatacctgtggaggcggattgaatgcattatatggcacaactggcagttgatgagagtagctgactacaattgcatttgagaagattttatacatcctctccttcatgattttgaaatccagggaatctggttcttcacggttaggatcatgtttgccgtcgaactcgaatgctgtgcgggatctttccttgattggcgccagtcggcatttgatgaagtgccgagtgatctgctctccctgtaagccttgttctttaagatttaacatacgatccaacaactccaaggcttgtactgcttcatctccgattggaagagagttccaagtatcttggtacactggaggaagacaagagtacccggggagagcaggctcgggattctgaacatagaaccagtttgcatgccatcctttgttcgaagtcttgaagggcatcgagaaatatttttggctcagagttccccttagttggaatcctgcccccccgactacacacggtttgttcttgtttggttggggcttgaggaagaagatccggcggaatagggcaaagtgaggtttgatccccaaaaaggcttcacaagcatggacgaaattggcgatatgcactatggaattcgggtttaggtgatgcaagctgattccatagaaattcaagatcccgcggaaaaattttgaggtcggaagagcaaagccgccgtagaagaaatgcgagaagaccacaatctcatgagtatccggagacgggaaagcctcaccgtgcgctggtcgccacccgatgatctccttggcagggagaacgccgtgcgccaccatctccttaagatcctcctccgttacgtcggatgacgcccattggccttcgaagctttctctctcttccgccatcggtttcactcaaatgtgctgatttgattcgagggatggcttgggagaggtgagggattgaggcggtggatcacgggaaggattttgatgcacttttcggaggtggatttggccggagttgtgaaccctagttcgccggcgcagctttgcactgtagcagggagtggggaaaatggcgagagttccggcggggaagacgaagcgtcgcttggatatcggatttttcagttaagggtatcggaggtgctaatgggcctaggcctgaacagtactttagcccaatacttttaacagcgtggcccattgtgttccttagggacttaggcatattttgctttggcgatattatgcacacaacagtgttgcccaatgctgatgaaatcctttttatgcggtcatataattctttggaattattgcaatgcaaattaaaaaggtgcccgacagaaaggcgttatgctgtttttgcgagcttttttaggctacaaaagctgtttgggttaactaggaatgacttgtttttattatagtcatctccttggcgtgttatatgcctgttttcatggtaaatagtcatggcctaggctattcgacttattattaccatgatctttataatacttgatgggtaatctttagagtttttatattcggatgcctgtcgagtgtgttcattcgtgaaccttttagagtgtaaaccactcggatttcttttattgcggctaaaaagcagtcggctagcatgcctatttaggcgccgcgtacgcttttgtcatataatgcacaattgtgttattattttgtctttcaactatatgtttagtttgttaactaatcacatagttgggggctacacctaattaggtgcatctattcgatgcaccatattctttatcttttcgccctttacagtccactcggcaggttttggcttgaagagtttgaagtactcggattatcatctttgggaaggctacgatggtcgactgcaaaggactcgggggctactgtggagattatgggtatcccatatctacacggcgacggtattcgaactgggtacaagatacctaatgtagatagaatatcttatctgtatctcgggtttgtttcttaacttgtgtatcaaggaaacaccctagacttagtcggttacaa

SEQ ID NO: 16000 - DNA, 1729 bp, Oryza sativa
gcctcgccgccgctaccgctcttccacccttcctcgctgccgccgcccatctgccctgctgttgacggccgttatcgatcagtctcgaccatcaatactaccaaaataggagaaaactagtgatgcttgcaatgcattaaaatgttagagtaataatattccactagtattaggtttactaacattttgcagagaatgacaataaagtgaaggagaatcgacgtcaacacaaacgataaatcaatcggacgatgtcgacaatcagacttatgtatgaatggccaagaactcagaattgacatgatgaattgggccaaaattcacaagtctgcggagtggagcaataaaggaggccaccagccgaaattgggctagattgggccagccacaggttcggccgaaccaatcctggagccgttggatccaggttttggcgtggacgtccaggattgcatcccaatgacggttggaggacacttcggacaattccccttccacaaccgtcataactacctctatataaggacttcaccttctcacttcactcacacacctgttgacgatgaaatttggttagcccgaagtcataatcggcttagagtcagtatcggcttccgcatctcggaattagccgatgagaattatcaagtcgctaatagccggattcttgctatattcggttaaggaaattaatctattaaaggaagtttatctagaagagaccgagttcaaggaggatgcggcatggcaagttatctattaattaggaatagtttgttagtttccttttatctctaggaaagtatgtttagtgtccgataaggactatgtgttttccttttgtctttaagaaagtttctttcttgtcctacaaggaagagtatctacccatgggtataaatatgtacacccggggtcattgtaatctatcttcacgatcaatacaattcggcgcatctctagccatctttttgactgccaataagggtttcatcggggtttcagccgataagttatctggacgttgtatcggcttataaggatttcatatatatataagttgaatttagccgatgacaacaaaggtttcactgtttaatctaatctgtggattttatgacatcggacctccagccgatgtatgctttaaccttcggattgatgcttatttatcatatcattgctagccgattggtttatactagattatattgttattttattacatcatcatcagccgattgcctttatatcattatctacattggacatatagccgattgcttaaaccctatcgctaccggctggtatcggcatcggctatgatcggctatcggctggaactactccatcagtttgtcagccgatcggctgttttgtctattatttgcatatcttgtcagttgcaggatcaaactgactggcacgcccacatctcatcaacctttcgacctgcattggagctaagcagatctcccaggccggtgtgttcaattttttcgtcaacacgaattggcacgcctagtgggaccacgaattttatatccacatatctgaagaagaagtcaatgccaagattgtggtcacggtggagaatttaacggaggaacaataatatcggctcggggggcaagcgtatcagtttcagcatggtggagcacatcagtatcagctcatgaaagccgattacaagatagagaaagaagggaatttcgaagcatgacttctc

SEQ ID NO: 16001 - DNA, 5491 bp, Oryza sativa
cccatgggtataaatatgtacacccgggttcattgtaatctatcttcacgatcaatacaattcggcgcatcgccaccttttaccttttctactttattttatcgtccggcgggacttggcacctgacgcagtgctgcatcggtgttcgatctccagctaaggggtaagtccaatgttccgttggcccaggcagttgtatagtttaccgcggtgtcgttcaaggctgcattagtacattcgacctcttggattgctctggtttggatgatatatttgcctacctatttatcatatgtcactgttaatctagtcttagcatatcaatttagctctatcggctgcttctcgtttagggtttatgccggtatcggctaaattgtgttgttagattagattagcttagacatctaccaccctgaaaactcagtaaacagcttgattgtctagatattatgtttttttcatacttagtgctgtattagttaaatttgatctactaagtcgtgcttagaaccataatctctagccatctttttgactgccaataagggtttcatcggggtttcagccgataagttatctggacgttgcatcggcttataaggatttcatatatatataagttggatttagccgatgacaacaaaggtttcactatttaatctaatctgtggattttatgacatcgaacctccagctgatgtatgctttaaccttcggattgatacttatttatcatatcattgctagccgattggtttatactggattatattgttattttattacatcatcatcagccgattgcctttatatcattatctacattggacatatagccgattgcttaaaccctatcgctatcggttggtatcggcatcggctattatcggctatcggctggaactactccatcggcttgtcagccgattggctgttttgtctattatttgcatattttgtcagttgtaggatcaaactgactggcacacccgcatctcatcaacctttggacctgcactggagctaagcagatctgccaggctggcgtgttcgattttttcatcaacactcaagcaatagctctctcatttctctcaagtttagtttagtagtatctagttggtggaataggaatagagtagaaattaggagtccggaagccttcggaatagttcgggtatggctctatcagcttttctcttctcttttgtaagctttgtacttttattagaatactctactaaatacatttatggtattgaaatactttccgagtatatcagtacctaatttacattatgttcttgttatactgaatatacggctagcttatctgggagatgctttggtgcgggtataatgtttgcttatgcaattactctatgtcatgacgatgatattagagtagtatctggtagtttagacgtggtgtctagattacgggatatcattatttggggttatatattgtggatgagaggtggaccgctgatggtgacaactcagtacgggtattcctccatgcctatatataatcctaagttaattccctggggagggtattcctccgtatttagccccgattgtatggtcatggcggactgtcgtaaggaactcgacagtcaggggtggcttctcgaagtaccaggagggcatcggaaagagggtattagctagtatatcagtaaactaggatgtatgtatactatgtatattagaagtttaggaatagattatcttcctcttttctttccacttagcttagataatatattatgagaataagtagtttatgcttgtgtgtcactctacccttggattatcttaacccctgtttagaatatgattatcacaagcaatatataaattactagtcatgttctctctacatgattttcccacaggataaaataaatatgatacccttggaatactctcgggtaaaatgctataatggtatatccgtgcgcttgcggatgaactctgtaaccataatatacaagaagtatttctgcgccattgctgggaattatatttctagtaatgtcattaagaaataccaacaagcatttctggcgccattgccggggaagattcataatagagattacttattttatatttccctctgtataatcattttcctttgcaggctaaccttggttgttttcacttttgttgtgaaaacagggtagtgcatgacttgtttcaacctgctggaaaacttcaaggaaaatccagaagttgttgctccgcagaaaactttaccgatagagaaactagccgtaccagcgccaccaattttcaagactatggctagcaatactctccgcgagttcgctgctccttctgctgacaatgtggccattgggccacagatcaacatgggagacatggatttcgatttgaagtccagcctcatcacgatggcgcaggctagcccgttctgtggcaagcctaatgaggatgccaatgctcatctgcaacagttcctggagatttgtagcacgtacaccatcaaaggcgtcagtcccgacgctgtcaggctgcgactgttcccgttctcccttctcgagagggcgaagcagtagttctatgccaactgtgctgctgtcaacacctggcataagtgttctacggcattcctctcgaagttcttcccgatgggcaaaactaatgcccttcgtggacgaatttccagtttccagcagacgagggatgagtctattcctgaagcatgggaacgtctgcaagaatatgtagccgcctgtcctcatcatgggatggacgactggctgatcttgcagaacttttataatggactcaccccgacgtcccgcgatcacctggatgcggcagctggagaagcgttattctctaaaacggttcaaggagccgttgatctaatagagaagatggtctccaatatgggttagagtgaggaacgactccagacccgctagcaaggcatgcacaccgtcaaggagacggaattgcttgctgccaagctggacctcctcatgaagcggttggacgaccacgagaaacggccacaaggcaccgtcaaggccttggactcgcacgtcacgtgtgaggtctgcggcaatacgtgtcattctgggaatgactgctcggaaacccgtgaggaggcgatgtacatgggcaacaagaacaacgggtatcgtccacaaggaggtcagggatggaaccaaccacacgcatattatcaaggaggtaacaataacggtaatttctctaaccagccctgcttgaagcatctagtctttgcgcaagctaaaaccactgatgcgctaagcaaaaatcttgcggccaatgacaaggtcctggagaacataaatgtcaaattatatggctttgcttccgcttttcaaaatcagctgagctttaataaaatgatagaaacccagttagctcagttggcatctttcgtccctgcaaatgaaactgggaggattccagggcaacccgactcctccaatgaaaatgtcaaggcgatcacgacgagggaaggtaagtccactcgtgatccgccatatcctaacccttcaggaactactgggatgtcaaaagaagcaccatctagtgactcggctgatatggatgttcagccagaaaagacagtgccgtaggagtactgcgacacacggttgctgcctttccctcaatgaagtaggagaccgtcagtggacgagcaattcgctcgttttgttgaagtaatccagaaaatccacattaacgtgccgttgttggacgccatgcaagttccaacatatgcccgtttctcaaggatatcctcaacaacaagagaccgctcccaacaacggaggtggtcgacctgacagagcaatgcagcaacattatactccacaagctcccggaaaagaagaaatatccggggtgtcccacgatcacctgctcgatcggggcacagcagttcgaccaggacttgtgcgaccttggagctagtgtcagcgtcatgccaaaagacgtcttcgacaagctcaacttcacggtgttggcactaacaccgattcgcctacaattggctgattcatcagtccgttaccccgcagggatagcggaagatgtgctagtcaagatacgggatttattcatcccggttgatttcgtggtgctggacatagagacgggaaaggagacgctgctcatcctggggcgtccgttcctcagcaccgcaggagccaatattgacgtgggaatggggagtatccgtttccatatcaacaggaaggaagagaagtttgagtttcaaccgaggacggaacaatgctccatggtcagaataaagtacaggccgaacccgcagaatattcaagaggtcgaagtggagccaccgaaaacggatagcctggtgaaattcatgcagaatttcctggagaaggaaacaacgatgcctaggaaccgttattggaagacgccgataaaaccacccataccggccaagaagtcagagcagccagcttagaagaagccgctatccacaccaaaaccaaagaaggtgtggaggaagaagccaacgacgcccgctccaacacctccggagacgggtagaaaattcttgaactgaatcagaaggaggtacagtcttgcacgtcggactttaaatgacgcgactttcgccaacaggtaaattggtatgtatccgcataattgatttcaacaatttgaatttttgcatcatcacatgtttgaacttcaaaattgcatttaggacttttgaattttgaggaaattcttcaaatgaatttttcagagcaaaccaaaataaaattttcaataaaaattcattgtgccatgaccacactgaccgttggaatccaacggccgaaagtggggccggtttggcctaccaggggttcggccgaaccagccaggccaacggtcagctgccccctccttttaggcaacggctagtgggccccataggtcggttttgaccgttgtgggtgcactacttaagccaacaggccgggagagggaattccaccccatttcaacacgttttcattccctctccaaagtttgctctcaagttcattcaaactttgatagtttccctcaaatttaaactcttagttgcatatatacaagtcgctttggtgaaactaactggcgagtgaaatccttgtcattcctaacccccgccgagttcgtccgttcttgctccattgtgcagaatgaagaggcgattgtctcgtctgttcaaggagtccggctcttcatcaagtcatcatgatgagtctagtactcgttcatcagccgatatcgtgatggaagatgccaaagtccgccacaactcctgaaccacgccgatcttgaccttgttggtgatcgggagagacaagcctactatatgctagccgaccgggagtatgctcaccacgcgagaatactcaccggagctgataaaaaagataggtatggatactgaatttcgtgctatttg

SEQ ID NO: 16002 - DNA, 10383 bp, Oryza sativa
gtgtggaggattaggtgtagccttggtcaagctgcctgtggagtggagccgtctgcgccgtttatttattttccgctgcttagaactttattgattgagaggaactatctacctctgtaatgacattctattcgcttattaattagagtaatatttgtactctattatcaatttgttattgtgtgcctcggctgattcctggacgagggttcacacacatgtaagcgtttggaattttggatagaaattccgggcgtgacaagttggtatcagagcctctttgaccctaggttatgccaaatggttacccatagaagccctctgaaaaatattggaaaagtagaactgttctcctccctttctcttttaattaaaccaaactaatggcacatgcacttcataatctcttttaatggttctcattcaaaatttattccagtgttattagtactgtacatctattactgtactaatggctcatttaccagcaaaagttttacaatactgttttatttaatcttgctgcaataaaacaaatttagcatgttggttttataatttcctttcatttcttttgaaaccagttattcaaaattacaaaatttgtgacctcgtttccaaatgttttaatttatttcgcaaagtttactttatttacttacttttttttactttgattttctaactttattcaaattaatccaaaaacttgtgctattaattggataaagtcttaactccctcctttcacttgtctttagatgccgcgttacaagcctgagtacctgtttggtgttgagggttttgtccaggagttgcgtacgatgtcctttgtcattggatttgggactgcccctttttatgcccagattcctcatgatcgtcatgaagagaagtgccgagtcaaagtcaccttgaacagcaatagtgaagaggtcccctcagtgatgtttgaagctggaggaagaaactacatccatgcatgtcaggaggtggcaaggatcgccataggagagctccgtgatcgctacagtgatcaattggccgacactgagtatcgctaccatcctccccaaccttagggaagtgaccgtggcagttaccttgagactgaaggaattgagaatgatgtaccaccaaacatttggttgagatgttgtgggctatggatgaaagtcgtgcggagactgtgttaccagctcaagatcgtgaagatcggaatcgtggtaagatttgcaagctagaagacaaggtggatcgtttgaagaaggaattagccgcattgaagggagaagcaccgccgcagaaggccaggattcgtcttaccgcaaggaagagagctttatttgtccctcgctatcaactggcgccaaaggttcgtgtggtggagaaagaagttgctccagctcaagcggatcctccggtcatcatcataagtagtgatgaagaagaagaatccaagcgcaaccattccaagattgagtgggtagcaactcaagatgatgaagacgagccttcaatcgacctccgatgcttggaagaactagagtgacttgttaagtcgttgtcttagatcgttgtgttagtttgcttgctttaagtttgcttgtgtgtggttcgcatgtgatttacatcagtggtgggatgtaattgcatgtgtttgtttgcttttgagtgttaggaagttggtgagtttagtggtgtgagagtcttcagtttgtaataatgaaactcagttaagatcaataaaagttaaagtaattctctatcctaagtagtttccccgttttctcttcttgtgccctgtccatgccagatggtgaacactcgtagcaatgggaatggtcccaacaaccccaataacaacaacaatggagagaatcccactcttgcccaagttcttgctcaacagacacagcttataaacatgatgatgcagcaatttcagaatcagcaaaaccaagggaataatcatgcacctccacagaacaagttagcagaatttcttcgtgtaaggccgcctgttttctctagtaccactaatcctgttgaagctagtgattggctgcatgccatagagaagaagttggatttacttcagtgtactgatcaggagaaggtctcatttgcatcacatcagttgcatggccctgcctctgaatggtgggatcacttccgccttaacaggactactgctgaacctatcacttggcttgaattcaccgctgctttccggaagacgcatataccatcgggagtagtgtctctcaagaagaaggagttcaggtcgcttacccagggatctcgctctgttacggagtatctgcacgagttcaatcgtcttgctcgttatgctccggaagatgtgcgcaatgatgaagagcgccaggagaagtttttgggaggacttaatgatgagctttcttacccactcatggttggagattatcctgatttccagaaattagtggataaggctattcgtcaggaggacaagtacaatcgcatggagcagaagaaacgtcggattgctcaattcaagacacaacagggaaataatcagaagccgcgtcttactttaggaccccagtccatgccacagggaggttcttcgtctgttgttcgtccgcaacgtcagttcttcaacaacaatgctggcaacaacatccgcaatcaagctccacgtcctgttgcagctccagcacagcaacaacctgccaagagggagcaaggcaacaagcccgtggtgtgtttcaactgtggagatccaggacattatgctgacaagtgtccgaagccccgacgcgtgaaggttgtccctgcccagaataactctgctgtaccagcatccaaggctcgtgtaaatcatgtcgctgctgcagaagctcaagatgctccagatgtgattttgggtacgttccttgttaactcagttcctgcaacagtacttttcgattctggagctacacattcattcttatctatgagttttgcgggaaatcatgggatggaagtagaagatcttagacgtcctttgatggttagtaccccaagtaatcaagcactctctttgcaacgtagcccctctgtcagaatagaaattcaaggagtaccatttctggccaatcttatcttgttagaatccaaagaccttgatgtcatcctagggatggactggttagccagacataaaggtgtgatagactgtgccaacagaaaagtaactctcaacagctatgatggtcgagttgtaactgttcatgcattgtcatctgagtctttcaggtcaagactgaaccagataactttggaagagattcctatagtccgggagtatcctgatgtgttcccagatgatttacctggtatgccgcctaaaagggatatagagttcagaatagatttggtacctggaacaactccgatccataagagaccttatcgaatggcagccaatgagttggcagaagttaagaggcaagtagatgatttgctacagaaaggatacatcagaccgagttcatcaccatggggagctccggttatttttgtggaaaagaaagaccatactcagagaatgtgtgtggactatcgtgcactaaacgatgtgactatcaagaataagtatccactacccaggattgatgatttgtttgatcagcttaaaggtgccactgttttctccaagatagatcttcgatcagggtatcatcagttgagaatcaaagaggaggatatacctaagacagcttttaccactaggtatgggttgttcgaatgtactgttatgtcttttggacttaccaatgcccctgctttcttcatgaacttgatgaataaggtgtttatggaatacctagacaagttcgtggtggtctttattgatgatattcttatctactcttgaaccaaagaagagcatgaggaacatcttcgccttgcattggagaagctacgagaacatcaattgtatgctaagtttagcaagtgtgaattttggttgtccgaagtgaaattccttggtcacgtcatctcagctggaggagttgccgtcgatcccagtaacgtggaatccgtaaccaattggaagcaaccaaagacagtttcagagattcgcagtttcctaggcctcgcaggatattatcggaggtttatagagaatttttccaagattgctaagcccatgacacgactgcttcagaaagatgtgaagtacaagtggtcggaagaatgtgaacagagttttcaagaattgaaaagtcgcttaatatcagctcctattttgattttgcctgatccaaagaagggttttcaagtgtattgtgatgcatccaaacttgggttaggttgtgttctgatgcaagatgggaaggtggttgcctatgcctctcgacagttacgtccgcatgagaagaactaccctactcatgatattgagttagctgcagtcgttcatgcattgaagatttggcgtcattatcttttcggtactcgtacagaagtgtacaccgatcataagagtttaaagtatatctttactcagccggatctgaacatgagacaaaggagatggttggaattaattaaggattatgacatgggaattcattatcatccgggaaaggctaatgttgtagcagacgctcttagcagaaaaggctattgcaatgctacagaaggacgacagttgccattggaattatgcaaggaatttgaaagattaaatttgggaattgtcggtaaaggtttcgttgcagccttagaagcgaagcccactctaattgatcaagttagagaagcccaaattaattatcctgatattcaagagatcaagaagaatatgagaagaggaaaagctattggtttcttggaggatgagcacggaactgtatggttgggtgagagaatctgtgtccccgacaacaaagacttaaaggatgcaattctgaaagaagctcatgatactttatactccattcaccctggtagtactaagatgtaccaggatcttaaggaaagattttggtgggcaagtatgaagcgtgaaatcgcagaatacgtagcagtatgtgatgtttgtcagcgagtcaaggcagaacatcagaaacccgccggtttgttgcaacctttgaagattcctgaatggaaatgggaagaaattggtatggattttattactggtttacccagaacgtcatcaggccatgactctatttgggtgatagtcgacagacttaccaaagtggctcattttattccggtaaaaacaacctattccggaagtcgcttagcggaattgtatatggcaaggattgtgtgtttgcatggtgtccctaagaagatagtgtctgatcgaggcagtcagtttacttcaaatttttggaagaaacttcaggaagagatgggttctaagctgaactttagtactgcttatcatccgcagacagacggacaaaccgaaagggtgaatcaaattttggaagacatgttgagagcttgtgctctagatttcggtggaagttgggataagaatctaccctatgcgaattttcatacaacaacagttatcaagctagtttacagatggctccgtacgaagcactgtatggtcggaagtgccgcactccgcttttgtgggatcaaacgggagaacgtcaggttttcggaacggatatcctaagggaagcagaagaaaaggtaaagatcattcaagaaagattgcgtgtggctcagtctcgtcataagagttatgccgacaatcgccgcagagatttgagttttgaagagggagattatgtgtatcttcgtgtcacgcctctacgaggagttcatcgttttcataccaagggaaaattggcaccgcgttttgtgggaccttataagattgtcagtagaagaggggaggtcgcttatcagttggagttacctcaatctttggcaggagtacataatgtgttccatgtgtcgcaattgaaaaagtgtttaagggtacctaccgaagaagctaatattgagcagatagaagtccaagaggatttgacttatgttgagaaaccaatccgtatcctggaaacaaatgagagaagaaccaggaatcgagttatccgtttttgcaaagtccagtggagtaatcactcggaagaagaatcaacttgggaacgagaagatgaattgaagtcagctcatccgcacctgtttgccagttcttccgaatctcgaggacgagattctgtttaaggggggtaggtttgtcacaccctgaaaattcaaaatatataaattgttgtttaaatggaatttttagaaataattttaaaaagtcttgaagagaagatctaagtttaattaataaattccaatataaaattgggccagataaaatttcattaaatactttgcttaattctataattcctagatttttctggaatttttttgagctaaggaagtatttttaataatggaattgcatttaagaaataatttaaattgaaaaggttttaaaaagtcttcttttggctttgggccgaaagtcggcccaaaaccgttctctctctcctcggcccagtccggcccagtccgcagccgcccgcgcgagcgcgctgtcgctgacaggtggggcccacccgtcagtcgtcgtcttcctcgggccgaaaccctagtttcgcgccgccgagctgccgtcgccgccgctttccaaatccggccgttcctttccttctccggccgatttgttagaggggaaacaatctctgggatctcctctaccttttctcctttggaatctttggttaaatcgctttgtgtcacatcctgattttcgtttcaggatttataaattatttaataaattaataatagaatttatattaaatgttcattaatttacaagtgaagttaaatgtgggaaataaaatttcctaaatataaagcatggatggatttaatttttattaaattctccatggttaattatactctctggaatattctcggatttttcggagctcaattcctattttttaatcttacaaagagcatttcagtaattacccacatattaaattaatcattaaatggtctaattataattttgttaagtactttgagtgtccaagtattttcaagatttttcttggaattatttgagcataggaagtatttttaacaattcaaagatcatttcagtgattaatttaattggaaaagtatttaaaatccccttctccttttcgggccgaaataggaaaagttcagcttctatcctcggcccattctcccttctttcggctggccttatccctcctccaaagtcttctttgtgtccctttttcaatcgggccaagaagtagaagcccagccaaaagtctagttggcctccctgctacagtgtcttcttcaatctccagccggctggagacagagcccgagccagccgcacagtacctgtatagccgcggttttcccctccaaatccggccttttatctcgtgtatttccaaaattagttgaggggaaatattcctcttatcctcctctatctttacccccaggaatcggagcaaaccgttgagtattttatccgaatcgaactcgtttttgagtttatctccaaaaccgagtttttgatttcccggatcgatttcttgcgggaggagtccgatctcttcaatccaaggctataaataggaccccctagtcctcctctttcgtttgccccctctcccgtggtctcccgtgcctcgtagcgccgccgccacgtgctccaccccgccgtcgtcgccggccgagctccatccgcgtcgcgccgccgcctccgtcgtcgccgccggtctccgtcatcgccgtaaggtgcgccgaggtgtgggcaagctcggccgctatctccccgaagccgccgaccaccgcagctccgccgccccgtgcaacccgagccgccgccgtcgcctcctcgtcgccggccgtcgtcggtcgtcgtttggcacgagggtgagtatcgttgggttcgtctcgtcgtcctctacgtgttcatgtcctccaaagtcgcagccgaccatccaatctccggcgaggtcgccatcttggtccggccattgatgaggtcatcatgatgtcatcatcgtttttctttttcctgtttttctaatagattaaatcttcggaaattcataactaaatcatcgtaactcggttttgagtggttcaagttgctaaattcatctaaaatcatgatctacatgtttgtttactttatatgtactgtttatttggtttttattagtctttttcttcgttttgcgtgttagcttgtcgtttccgtcgttgcgaaggttcgtgagtgcgtcggaagtgatcaagaagattacttgaagaccgattattgcaaggcaagtcacacagatcctaaacacaatcctttgagcatgttgatcctatatttaaattctctatttatttcaactgtgcatttattttcgaatgtcaccgggtggtgtgaacctattcctttgttatggccaatttgcattgattactttattccttgataccttgggttattataacttgactagttgggctttatatattggttcagctagatattagttatgattgcttagccatgcttagaaacattagcacactattgggataacttatgactcactattatttaaggatggcttaatgatagttcacgatggtcaatcgtgattggttaattaattacttgccaactaaaacttgataatggtgggttgtgagcacatggttttgagagtcgtgctcatgacaattaaggaccggttcgcgagctactgttgtgaaacatttatcgtgccaaccacaagccagcgtgggcaacggctttatcttttgtatagcgtgattcattatagtgcgccagactgagaagtggcgagaagtccacgggggtcgctggggagtccatgccttatttataagggggtgattatgatccaggaaaggtgcgctgtaatggattatgttgtgcaaggggtattgtcacaactcctttccgaggtaccgtggtggtattgaggcacatgatgacatgatgtggggttgtgtcttgtgggtacagtggtacacctctggccagagtaaaactattcgaatagccgtgcccgcggttatgggcgggttgagcaatgtttttcgtgattagtctcacacctctcacaataattatggatgttataactggtaataatttgcttagctcctggtttggagttagatctgtacagccgggtatggttgttcaggatggttgggcctgtgcagcatgggtgtgctgttcagtgttgattaaaatttctgattaattactccactgttttacttctcttaaatgttttgctaaatgctgcttttgcaaatgagcctatattatgccatcctttggtatccttgtgcacttgcatatttgctgtgtggcttgttgagtatgtcatatgctcattcttgcaataatcaatcaaacctcagttgaagataaaggatccagaaggagaagacgtttggcttataccccagttgagctgcctgtgggagtggagctgaagccatcgctagaccgttaattccgctgctgttttcttttcttttgtaagtatgtaacgttattattatgatggatttgtatattaaattgtcagtttatgtacctcggctgattcctggacgaggattttatgcacaaataagttcggaaattactagtgaatttccgggcgtgacactttggaaagctttggaatcgagttcgattcggatcggttttccctctctccaagccgcgagtttccttcgccgttgccgtcgccgtgggcctccgccgtcgcctccgagcccctttaaaaggatccccggtgtctcctctacccgtcgcagccctcgctttcgcctctcgtcgccggaagagctctagcgccgtgtgccctagcttcgccgtcgccgccgccgcttcagccgtgtgccgccgtcgctccagctgtcgccgccgctcgggaagaccgccgtcgtcatcgccaagtcgccgccgtcctcgtccgccccttcgcagccgtcggaacccgccggagcttcgtcgccgtcgacaacccgaaggtagccgccgcttccttctcgtcgccgtcgtcgtccgttccttttccgccgccgttttggtcaccggtgtgttcgccgtgttgtcctctacgtgctggtgccctccgttggtgccgtggtgccgccgttcgccggcgagtgtccgccgcccgagccgtcttcttcgccgagccgccgccgtcgtcggtaatgtcatcgttgacgtcatcgggatcctctcccgtaagccggtcgtggaccgatcgatct

SEQ ID NO: 16003 - DNA, 7734 bp, Oryza sativa
  unsure (1)..(7734): unsure at all n locations
tcggtgatgtcatcgttgacgtcatcgggatcttctcccgtaagccggtcgtggaccgatcgatctcggccatccgatttggatcggatcaatctcgaccgtccgttcgtgtgaaccgccgcccgtgcgccggtccacccaaaccctagcccgctgacgcaataaatccccttttccttttcaaaaataattcattattgcgtcataattcaatttaaaccgatttaagtgttttaacccgatttaatctttaaaaattcataactaattcatcttagctccgatttagttggttcaagtctctaaatttttctaaaattgagatctacacattaaaaatatccacatgtactgttcatgcttgtttatgtgctgttttggtgattttgctcttttctgcttagattccgtcgtttccggagagtccgttttcgcagaagaagagtttgaagagttccaaggccagcaaggcaagtcacacagatcccaaacaaccctttgagcatgttgatcctatttaaagctattgtttctattcaactattgcatctattttcgaatgtcattgggtggaattgacctattctttgttatggcccttttgtacattgattaccttattccttgataccttgggttattacaatttgactagttgagctttatttatattggttcaactagatattagatacaattgcttagccctgcttagaaacattagtacacttatgggataactaatgactcactattatttcatgatggcttattgatagttcacgatggtcaatcgtgattagttaattaattaatgtgccaactaaaacctggtaatggtgggttgtgagcacatggttttgatggtcgtgctcatggcaattaaggaccggttcacgagtttcggttgtgaaacatttatcgtgccaaccacaagccagcatgggcaacggctttatcttttgtatagcatggttcattgcggggcaccagactgagaagtggcggagataagcccacgggggtcgctggggagtccatgccttgtttataagggggtgattatgatccaggaaggtgcgctgcagtggattgtgttatgcgaggggtattgtcacaactcctttccgagataccgtggtggtattgaggcacatggtgacatgatgtggggttgtgtcttgtgggtacagtggtacacctctgatcagagtaaaactattcgaatagccgtgcccgcggttatgggcgggtctaacaatgtctttcgtgattagtctcacacctctcatcatagtaaaagatgctataactggtaataatttgattagctcctggtttggaatggtacattcctggtttggagatagaactgtgcagccggggtggttgttcagagtggttgggcctatacaacagggtatgttgtatagcgttggattaatattgtttaattacttaactgatttgttaaattctcaaatgtttgctaaatgctgcttttgcaaatggaaccctattatgccatcctttgttatcctgtgcacttgcatatttgctgcgtggcttgctgagtatgtcatatactcaccttgcaatcattcatcagaggaagagttctacaatgaggctgatggtgtggaggattaggtgtagccttggtcaagctgcctgtggagtggagccgtctgcgccgtttatttattttccgctgcttagaactttattgattgagaggaactatctacctctgtaatgacattctattcgcttattaattagagtaatatttgtactctattatcaatttgttattgtgtgcctcggctgattcctggacgagggttcacacacatgtaagcgtttggaattttggatagaaattccgggcgtgacaccaaaccagtacttgaacgaggaagggaacgtggagagggatgcggagaggaaccagcaggggcacgtggaaaggaatgtggaggggaaccaggaggaggaggctagtggtagtcaaccctccgttggacagaagagggcacgcggacaacgaggtgcagcgaagaagcttgagggtcggcacatcataacggaagtggaagaagatggacgtcctagtgccccggccgaagccgccaagaactatgtacgtcacagcggttgggttgtgcgggataacgtgcctgtcagtacagtgtactggcgaagaacaagggcacgcggagatcatgagagctttgtcccagattcggagaaagagatgctgtggaccacaatgctcgagacattcacccttcctgcgggtagagaggacaaagtgaaaaggtggactctgaagaaaatggcagaacagtttcagagcttcaagggagatctgtaccagaagtatatcctgaaggggcagacaccgaacttcgacacattcccaaagctaagggatcactgggatgagtttgttgcatataagacaggtgaacaagggcaggcgatgatggaaagaaacaaagaaaatgccgccaagaagaagtaccatcaccacttggggtcagaaggctatagcgtcgcgatgccaaagtgggaggtgatggaggctagcttgattgagaggggtatcgaaccggcaaccgccaattggccggaacgatcgaagttctggtactatgctcacggtggaacgctcaacccagctgatggctcactggtcttcggcgatcagatacgagaggctgcgcgacgactaacagatgcagtggaagcctcctctcagggcacgttccgaccggacagagatagggacgagctgacactcgccctacaaactccagagcatccaggatgaatacgagggaaaggggtgattccttggaagattggtttcaaggaggacatccacacgtacaggagtcggatgaggagcaagagagataccgaggcgaagattgcagatctagagttccgggtatcgagctacgaactcagcatgcaagaggaggtggcaaggaaggttgatgaacgcatggccgcacatcggtcccatgatccccagccgaccattcctcctgcaatggtgagcccgttaggaaaaccgtagcagctgcgcctcaacggggcaggtaggatcacagagcatggacgccatgcaaacacaggacgaatcgacctgtcccattgatgacatcactcagcggacaccatgtgagctgcatattccttacaagaacttatcaataaaggtaagctcgtagtttatatattttagatttagccattccgctagttgctgcttatatatgttgattactaataaataatctctcacaacatgaaggtggcgtcgggcatggccatcccaacggacccttcaggtacttaccactgcaggccgattccagcaggatactcgaaggtcgaagttgagttggtcgaaggcgcgtacgaggacctcgagctggattaccctggaggagacagtgagacgcatctacgacacacaagccagcggtacatcatcctccctgggcgacaagcggcgtctcgtgcaccatctcctcctcaggatcctgcaccgtctcctcctcatgctccgccagcaccgtctccacctcaggctccagcactgactcctcctcaggatcctgcactgactcctcctcgggctcctacacctactcctccgtaagctcctcttccggcaccttcaaagtcaagggcccccccagctccaccgcctgcccacacaagggcaacgaagaaggcgaaagttgacgccgccaagaacaaggacccggggtacgattgcacgcaagaggagcttgacgcttacgttgcatcagaagtcaagagacaattcaagcctcgaagtccagaaaagaagattcctatagaccccaatgtcaggaacttcttcaggggtatgtctgcacctgtcaaggaggccatcaagctatcggactatgagcgaacgctgaagaaagcatcttctggaaagtccaaaccagtccctcagcttggagagcaaccaaaccaggagatcgagccgttggtgatcggggaagacatgacgatagaagaatttattattgacaccggtctaactacggatcaattgctaggagttgaaccaatagaaaaggcggaattgaaatacatgtacgaactcgataaaccgcttgtcaagcccgagctggtgcagtccctacccacacaaatgtacaagttccatcagctgtacatggagatgagcgccaccggtagagagatgatcggagcgaggatcagggacccggacttcttgcaaggagatgatattctctagatcaatttcaagggaatctatgaagtataccagctggacgccctcgacgtctctattatgagttgctggattttgtaaatatatcgttcagttatatttcttaattactacgtctcctttaattaattaggtccttgtatataagtaaactatataaaataaaatactcccttttatcgttgtagaatggagattcaaagggcccgacggcggagggttttcaatactggattcatcgaccctcggagagtaaatgtcgcaatgctcgaccaatatccacaagaaacagaggacaatctcgtccatctcctgaaggcgcaacattacaagacgttcatactgttgccgtacaacacagagttagtttaattttactgtcttcctacataccaaatttcattcccgtatgaacttgctaagtgtttcatatgtaatgcatcccacgcacattgcagattccactgggtgcttttactcttcgacctgtcggcctgcactatcaacgtatatgactcaatggataaaaacgagtctacgtttgacaaggttttcgaacttatagacatgtactggcataagttcctctgttaattaagaaattcttgttatgttaattatttctactacgaatcatatctttaaactccttgtagggcttggtatcggttccatcatttggtccgtggcaactggagagaaagacttaggcggaggttcaaattttctttgagtacacatgctctacatttatatttctccgattcaaattaatacatacaagtgtatattaattagatctcacgccgttaatttgtcatttatttgtagtgcgcaaagcaaaagcagggaactaacttgtgcggctactacgtgtgcgagtattgccactgccttgctgaccaaatcatcaccacaagagagctcgatgtacgtacaaataaattcaaaatttcattacgtatcgatttcttgtttaattactaatcaatttcatacattcatatagtttattcgcatgagggataacctgaccacacacaaggaatttatcgcggcggttcaagaacaactcatgggattcatcaacaaagaaatccttgatcccaagggtgaattctactacgacggaaacacaattcaccggtccttagcttctgagctagcagcgagtactactactacgtcgaaatcgtagctagctaggacatataatggattgtaattaatacatgactacatatgtttctatatgcatgtgtacacattttctataatgtaaatatattttggtcatatatatatatatatatatatatatatatatatatatatatacacacacacacacacacatatgcatttgcataacatatatatgtataaatacatatatattatgcatgtacatatgtactgaaccatatatacatataatataatatatatatatatatatatatatatatatatatatatatatatatatatatatatatatatatatatatatatatatatatatatatatatatatatatatgcatatatatgtattgaaacatatatatgcatggtttatatatatatatatatataaaccatgcagcaacagggccatgcaaaaagaaaaaggtcagctcgatctttagtcccggttggttggctgagccatctttagtcccggttatttcacccgggactaaagatagcgatctttagtcccggattggtactcccggtttggaaaccgggactaaagggggttacaaatcgggaatacaaaggtttctccaccagtgtatgcagatactgagcaaacaagaaagcagtattatctcctttagcgatgagatgcagctgtatgtagtgaccgaacaaaaaaaatatagcagcatatactgaccaaattttaaaaaaaactagtatatgctccgtcaatactaatgtattcccttcgttttatattataagaatttctagcattgcccatattcatatactccctccgttttttaatagatgcgccgnngactttttctcccatgtttgaccattcgtcttattcaaaattttatacaaatgtataagatataaatcacacttaaaatactatgagtgataaaacaactcataacaaaataaattataattacgtaaattttttgaataagacaaatggtcaaacatgtgagaaaaagtcaacggcgtcatctattaaaaaacggaggtaatatatgttatgtctagattaattaacatctatattaatatggacaatgctagaatatcttataatatgaaatggaggaagtagtatatactagccagaaatttgaaaacagtatatactgttccaaggaataagtagcacatacttgtaacaaaacagtatatactgttccaataaacagtatatacttatatatagtgcaggatgaatgagattccacagccgatggagagtgacataattggctcattcacatgcataattgtatctattaattagatgtaatgtttggtcatgtattttttatggattgaacgtgacatcgatgaacttgttattgtttaataaatgcaattttgcttgctaattacaaaagtatgccacgtatgttcggaataaacaaatactattcaatatcttttcatggttgaacaactttcaaaaatcagtcttttgggaaaaagacttctggtaaagtcgtacaattttatcttaacataacaaaaattgatttttaagtcattctataactattttcgttatgtgagctactcagattaccaaattgggttcatgctatacacctagaatcaaattctaataaaaacatgtttaaattcagttcaaacttgctttgaactagttagtaaaatagttaatgttaatgctaaacatttaaaaaaatatcatactcattcaaattggatatatactcatttgcgtatttcataccatggtgtctcatatgagtgtcatatacatatatatacatacgtatgtatatatatatgtatatatatatatatatatgtatgtatatatatgtatgtatgtatgtatacatatatgtatatatatgtatatatatgtatatatgtacatatatacagagacatactatactagacccagagtgcataataactaaaatgttacccctcacgtcctaccccccaccccaccctaccacaaccctcccctgccccaccgccgccgcctacggccaaggagtggcggcgtgcaggcgacgggcggccgacctaatcaccgcccactcccaccgggggtcgtcgtcgggttgtggccgtatcggcgtgcggctccggcagcggcagttcaggaatgaggaggagcggcggcgaggcgcatccagccacggctcggagacgaggaggttcgggcggtgaatccg

SEQ ID NO: 16004 - DNA, 2520 bp, Oryza sativa
aaggggaaaaggcttcgtgctcctccagtcgggcgcatttgccgccattccgcccgcgctcgccgaggccatcggcgccgctgggtagggcgcgagtgtcttggaggtgatgggcggggcgcgcagactgctcgtgccggacccgaccgggacctgctcccaactcccgtggcatgcaagttgagtggtgccagatccggcggctacgactgggcaacggctgatccggggaaggcttcgtgctcactggtgctgccttctcccatgactccgacctccctctctagccgccgccggcgtcccccgctggatgcagtcaatgtaggctcgggactcgcctgatctggggtggatcgacgaccattgggctgtcgaagcatagcagagacccaggcagaggtgtaggttgctgcttgcaggtccgccactgcccgtggacagacagtgctcgtcgatcgcattgctgtaggcgccagcgactagtcctgccaggcctgactggagaacggtgggatttggtgctgctgcaccctcagcggcgctggttagttccttttttttttattggatcgatggaagttctgagctaagcttgttactattgtgcttttggctttttgtggtctcgatctagttgaacagagctgttctaagagcatcttaatattattcccttgcttagcagtaaccaagtattacaaatgaatagcgataagtgtatgacatgaaaaatttgcccctttatatctttgtagtttgtaataagcctgctaaattctcaatgttcatgtgttctgttcaaaatttatatgattcagaaactatccaagccacttgtgctagcgttattcataaattaagatgtcatggctgatatgatctgtgtatgtttgaatttcgacagtaatctcaaatttatacaactcaaaacttgtataaaccaccggtgctatctgttagagcttgcattttcagaaatagctgtaattggacatattttcataaatgatcatgtattcttagtgaatttggttctatgtattgttgtgatgattgctgcttttgctggatcaagcatcatgagtgaatagccctgataccagagggtttttttgcaacgcatgaagaaccatgctctcatcttaattttcatttgttcagtcatgaattgtttgtgcaatatattcagaaaagtgttcccatgtgaatttcatttgtttagtgatatatttgtgcgtgcaatatttggaaaactgccaatagcatcatcatcaggttctctgatatgtttgataaatgaaaactctagaagctcaattcggtagcagttctatgaagttttgtggttcaacagagcatatcaattgattttctctgaactgctctgaaattttgtggttcaacagagcataggtgtttgaataaaataatctacaacctattaacgtgatgatggtaacattttttatcagtgaaggattaaaactccttgattcccatttatttatgcgaatgaaaaaatgagccattttttatcccagttttgcatcgcggaggaaaaaaaatctatttttcaaatgttatttactaatgtgtcatgattcatgatctgagaatttatcattgttttagacggatctatttggttttacttaaatgctcaccctctagttttaacccttctagaactgtgccatctgcccatctgtaatatagtgcagcggaatgattcattcggctcagttgaactagaaaatctagaaaatgaaccttgcagctgaatgatttattccgatcatcttgaccaaatagatttatttctggatttggtatttgctttctcattccgctgagttgcacaatgttcaattgtaggctgggagtaaggcaagcccaagaacactatagtccggatttaatttttgctttctcattttcaggtatatgctcatgtgaatacaaccaagtacattttcagatccggttgctagccagtgccatggaggagcagcaacaaccacctccatgacgcgacgccgtcaatgtccagccagcgccagtcatctccgccaccaaccaccgactggtctctagatctatgttatattgtcatggagtaaaatgtttactcacaccatatgattgtttcatggcgtgtaggcttattgtaaaaaagttactattctcatatttctcattgtattcatatcgtgtaggcttattgtaaaacatttaccatgtgctaataagtgtccgtgaaaaatacttgagtctatttaactatatttaactaggtagtaaaattattactcaacaataacgaattaatctaacaatatgttcacgagtaattgatttacttagtgaggctccagtgtgaacaaaaaccaataacttattgacgaaaacaatattgggcgcagacgtaatctcctattaattcttttacttatggctccacgttggaaggaaaacaacagaaatcaattcggtgtgcggtagtgttagtaactcgtttac

SEQ ID NO: 16005 - DNA, 6320 bp, Oryza sativa
ggtttatgtggttggttgccttgtccatggcaggttcattacatgcggtgatgaagttaatatacatcaggtacctaacaggtccattgctttatttgtctgcaaagttcagaggagtctagttgccaggtcggagcgcagctagaggatcctaggtaatctcctgacgcaggcacaattatgctctgatttcttccccaaacttcatccgcatatctgtgaatggaacaattttcttttgttgtcttttagctagaaatttttctttgattaggggggagattgagaaaaatggtaagattgaaacacattattgaggtatgaatctgattacagtaggtactaggcaagattttcaccgggcaggtactaggcagaatattgattattacaataggtactaagcaagaaaatttatgtctcttcaatttggatttttctctcttctcccttctagtctgcgtccctactagatctgatcatctatgttgcagcacaacagaagtggagaacaatctgatttgtacaacaagaaggctgaagcgatgccatcgtcagcccttataaacaacaaagctaaagttcagtttgcagaccttcctgaggtatgtttaccaaagaggaacattcttcagatttctgtttgcaaaaagttatcttatctaaaataacttttatcatgtccctcttgtgcagaatttgatgtgattaagtctcagaaatgccacagaaggatgttgtgagaactgatttattgtcaagttaatggaggtgcatgcatgtggacttgttgcacgaaactttgacttgatggtgttatggtgtctagcgataatattaatgcagtcttgcagcagcactctagtttggtcgaagagtttgaggtgaagtttgaagttgacagcaagctagttgatcactcaatggtttggtcgattttgctgtatcatcacaggccaataaagttgcttttgatttagagcagaggccttccttttttttttctcggatggattctcctgtgtttataaacggcattgccgtggagtaaaatatttactcagacagtaatattgtatcatgctgtgtatgctgattgtaaaaaaattactattctcatattgtcgtctagtggaacattcactacgcgttaataattgattgtgaaaataattactaatgggtggatacatatgactgagcatgcaaaaacacttggcagaaaaaatattactaagacatcgaattagtgagaagtaaagatcattactagtctgtaacatcattattaatgggaatatttagctgccagtaacatcgttactaatagtagctaactaatcgtaaaatttttactcactaccttaaaaaaatgtttcccatacaaatgactttagtaaatgatttactgataagtctacctgtcaaacaaaaggtgcggacggataaactatctaatttcaatatatagtaaatagtttactctatcatgaactatgccaaaaaacggaggtagtatatgttatgtctagattaattaacatctatattaatatggacaatgctagaaagtcttataatatgaaatggaggaagtagtatatactagccagaaatttcaagaaaacagtatatactgttccaaggaataagtagcatatacttgtaacaaaacagtatatactgttccaataaacagtatatacttatatatagtgcaggatgaatgagattccatggccgatggagagtgacataattggctcattcacatgcataattgtatttattatttagatgtaatgtttggtcatgtattttttatggattggacgtgacattgatgaacttgttattgtttaataaatgcaattttgcttgctaattacaaaagtatgccacgtatgttcggaataaacaaatactattcaatatcttttcatggttgaacaactttcaaaaatcagtcttttgggaaaaagacttctggtaaagtcgtacaattttatattaacataacaaaaattgattttactaaaaagaggttagtaatcatttaactaaacagaattctgaatttgttgtgcgggatggttaccaccaaaagtggacgtggggttgagggggtgggtggtgggggagtggggtagggtgggggtgtatctatgaggatagcgttttagttataacacactgggtgtggtttagcgcatccgcatatatatatatatatatatatatatatatatatatatataacacacacggtggcgctacaggcgctgcgcgccacgaatctaaatggcgcgactaacagcgatcagcccctgccgtgttttcggttttcttggccccatccgatcccctcccaccagccgagtaaaaaaattactttcctttctccagttccgcatgcatcccttcctgagtaaaaaagaaaaaaaatacttgtttgcttcagcgaaaaaattactttcctttgcatccatcacccagattcgtgagtaaaaaaattgtactgggagagtaattgttttactggtgggtaccttgactcgtgagtctgatcgcaggagcttctcctggacttttagttttttctccccattgaacgcaattttatctaataactaagattcgtccacgtcatcactagttaaaatttaacttgcaaatttacttaggagtaaaaattttactgggagtaaaatttcacgagttaaaattttactgggagttaaattttaactcgtgatgacgtggacaaatatcagtcgttggatttattttggagggccgagattcaccctatgtaaccgcgtgacatgccaacatctgaatccattcatctctcgtccatcatttagttatttttctactggcaaatttccaatagtaaatattttacttcacaaattacatataatttttttttactctgccaatatactgatatgtgtattgcaatttggttgcaagatatctagatgcatttaatcatacagggaatcacatgtattagaagctaattacacacacataatacaataacaataatcaaagtcacaggacaatgtccaaccaaaatcaggcaaaataattgatgggcgttgctgtcgaccctagcagctttctagtccttctagatccgttgaataggaccgagctgccgatggagagaacaccggcgacagtggtgctcctcactaggtcaccgcctccaccggatcagcatcagatcccatcggcaagagagaggagattcggtgccgcccatgattccgcccctgcatctcaccgtccagtgaagggctcagaagaagacgacaaccacttcgtggatcttggtcatcgtgatggagaatcctgccggaactcgtcgccgccgtcgagccctcgcaagcgagcaggcagatgtgtggcgttgagaaggagacggttgtcgctttctcccgtcgctaatcgccatcaccatcatcggtaatctcctctccgttgaggtttgctctagatccggaaaaaacgggatgaggaagagaggaatggctggatacggtgagatggctggctatcaacggtataaatactcatgcgttagccatgcagtagtcaaaaaataactcatgagacatcgtatgtgttgtagtggagttaccaatacgtggcggtgtgggggtgggactgttgacgtgtattagtcaaaaaatgactaacgtaatcaccgtgcgtggcaacgggaggggagtgaggggggtgggcagcaggtggacatattaaactgtgtcaggtgccgtttaatacatggcaccttaaggtgccatatagtagttctatatatatatatatagactgatatttttttcttctctgaggttgtcttataattagttctagtattctactcatgagaaaagaaaactttcacaaaatcaagctttaatatattttttgaatacttacactggatgaaaatcatatgtgcattacagtggatgttgatctatatgtaaatatatgtgtttgaactactgccctgtgattgaacttactgcattttgttattaaacacctcactctgagtttatttgtagaattttccaatctaaacttagatatctcttgctctaattagcgaagatagttttagttgtaattctgttagtttgctgtaaaatacaccatgaggcaactttaaactgtgggaagaccaagaagtacgtaatacattttcttttgataaggaacgttcagtgactcaattttaaccaggattttattttgcttatggaaaaatgtgttctatcaaaccgattgttggtgtgacctatattcgttatatgtaggggatgcaattgttaccaatgggcatctgctagaaagaaaaacatcgtgtaaactctgtggcgttgcactccaagtgtttgtggttttgccttatgtagtagttattttgctttgcgatatggtgcttgcaggggctgatcactggaggtgtgattttgtttgccagttgagggaggaattcacacgcttctgttcactgaggacatcttctcaacctattgcttccaccgatcatctttaatgatagattagctttctgtgtacctgtatttcatgtggttagctctcaaccaaagtggagtttactttttgtacttctatactgtaataagaagtgccttgtattattttaatttggttttgtgtaatttaatcttgagaacaaaatgtgttgcaataggactcacttgagagattcatatggttcagaagtatacatatgattgtattattttcgccgttttatataaaatgttttctatatctctgaatttatcaaacccacctttttaagactttctcaaacgcatgtgatttctgaatatgaaggtacacttattgaactggatgtatgaaatagataactgcccatctattcctctgaaattatactgaaaaatgaattaaataatcatgcatgccatgtcccaaacaaaggactcttcccctgaattgcggtcttaaaagtattgcatcacagcaatacacggaacccttttacaattagaggacatccatgagtggaaattatttacttttaaaatgcgtgtgaatcatttagattatttttcttgactatgcaaatataaactttatagagaattatcacctttttactctgccctatttcaaacctaggaaattgcatgcgtttctgcagtaactgaattgcttaatgtatatttcttttgattagttaataacagtataagggtgcataatttatatttctgtgcaaacactgttagaagagtttgtgcatgcgataatagcatatattgataggagatagaatcggtttctattttctttcttatttcacaagatgtattctatctctaattgtcccagtttgtacacgccacgatgagggcttttctcatctatattaacacgtaacgcggcctcgagagaggtagaacgcttctgccaaattacatggtatcagagcctcgctagccacgcacgagattgcatctacggcgatggcgagttcctcctctagcggcgcgaatcctctctcagggcaacccgtcccagagaaacttaccaggaataatttcctgctatggaagactcagattcttcctgctatccgtggcgcacgcatggaaggatacatcaccggcgcaaagcaagccccagctgcagaaattgacgccaaggaaggtgacaaggtcgtcaaggtgacgaacccggcctacgaaacatgggtcgctgaagatcaacaagtgcttgggtatatcctggcattggtatcaaaagaaattctcacgcaggttgtcaatacagagacagccgctgaagcttggagagcgatcacgacgatgctctcgtctcagtctcgcgcgcgtgctctcaatacgcgcctggcactgtgtttatggaaaacacgaggcctgggagatctgcttaactccagtgcaggtccaaaactcgccttcggatgtacgagcgtgccagttgatttgatcctataattaacaagaaacaaagacaaagaaaccatgattaaatccataaatgatagccgatcggctagatgccgatgacatatcatttatctttgagccgatgtcatatgtgaatcgatcggcaattattaaggaaacaagacggaactaaatctgctcgatcggctgtagatatcaatgatatataatccttatatcgacatatacttaaatcaagtgattgggatagatcggtcaccttgccgagacaatataaatcacttagattgaaatatatattaa

SEQ ID NO: 16006 - DNA, 6883 bp, Oryza sativa
gatctagtatgtatgggctaaaactccgatactactttatattaagatattaaagcaaataaaatatactaaacagagatctaatatacttaaatgccacaagatcttaacatgaagggcagatctaacatattaattgagcatatagagcaagagcaactagatcagataagatcggctgaaactccgatactaccctaatcggcaaccagtaggcaggctagagattgaaattctaaacacgacttaatagatcgaactcaactgatacagcattaagtatgaaaagaaggacaatatctagacaatcaagccgctggatgtttcatagggtggtggatatctcatataatctaagccaacatcattatttaacctaatcggctgtcttctggtagcagatgttagctgattgtaggttagatgacgatattgtcaaagattatgcaagatatatgataacttgacggattacataaacaagattagagtatcataaagatgtaagcactaatcttgagaacacaagccgtcataacaagttttacctcttgttgaagatcgaaaccgatgcagctcaacccgaaagcaagaactcgttgaaataaaactaaagcaaaaagggtggcgatgcgccgaaattgtattgaacgtgtgtgttcctcattacatagggctcggggactatttatacccgagaattacaagatatgtccatattggacacgactcttatctctaacaaactctaagataccataagtctttgcggcagacttttgcccacatttatttctaaggaatttacataaaatatcctaattaatagatacaattgccttcccaggactctatccttgtgtggcaatcatcttgaagcacatcaactcaaacccaatgtcgcacacgggtcgtattgtcggaatcggctgtatcacttaaccagtccaactcagacttagccgatcccagtcgtagccgattcggactccagccgatccttactctgtttccgcaacaatcctcatcttcgattccgcttcgatcccatctttatctccgatactgatattaccaaatttggtcgttaacacatgccccccaagtccgggatatttggtaatgttccggatttgccgtgtatcgactccgagcaagtttcgcaatcggccgtttccgattgttaccctagcgcttcaaatactaaccgttatccccgagaaatctcacaccgtgacttccgtcttcaccgcttaagcgaaactttaccctctttctctccggcgattccttcgacgcaccaggcgatttcaagacgattccgtccccagccagatctccacccgcggtaatgtcaacttccaccaatctatccgccgcgccatcggccgaatacgcagaggtaagcacccatcagttagatcccttttttccgcagcagattgattttctttcgccttatcttgttttcttctcttccatccctacctgcatctgtagcatctgtccaacctggttgcgtttctgagtctgtcgcatgagaaccattactttctcggcccaatcggcaaccttgaccctactgattttatcactggtgaaaccaacagaattccctttagattagccaaccctaatctgaatcattggaagaataccttcaagtcttggccatctcttgagaaaactgcccctgagaagggttggaccacatggtacaagcgtgtatcggcgaataaagcagcacactgggatgagatcagaatcagcccagcgcttgcccttaccatagctaattctgctaaggacgaacctctaatggctgccgccacctatttctagtccaacgccatcaatgccttcttattcaaccaagggccgatgaccccaactctcatagacatcattatgatcacgggtttggatgtcacctcatcggccaaccctatgagcctgaacacgaagaatcaatatgacttcaagaccaagagcataggcggttggtcaggctatgtagcagcatacatgggtaaagggcccgtcactcctcgagagcatgtagcctttctgctgatgtggctagaaaaattccttttttgtggatcaagctgtagccctactaccaattggcaatttgtagccgaagccctagaatcaaagaaacaatttctcttgggcaaaatcctcctcggctatctatatcaaatgttgaataatgcatcggccaagatagccgtcaactcagtagttggggcaggtggaccatggtggttgttgcaaacctggctaaacttggtagttatgaaagtcgtcaatcggccatctgtgacagaagctgaatttccaagattagagccgattacagaagatgacgaagaacgcactcatcgccgatgtatgtcatatggagaatacgcatccacaccgactgatgctggagcaaagttatcagccgaactgctcaaagattggttctgcagtctctacgaaggctttcaaaaagatgctcaagtttggtttccctatgaagattcagcagaccttgaactcccatcagattttagatttgaagacattaatcatgaaagatttcaaacatccagagaaatcttcacagctgcaatcagcccatgtattcttccagtcggcatccatcaaggaagaaatattcaagcctcttacgagttctatcacccagtgagttcagctagacagcttggaatgggccaactcccaatcggcttattctttgctgacaagatccaatgccgaggagaaatttcatcaaccttgatgatggatcggctgctcaaccttccaggaccccctctgggcagcattgaaaatctggagctagcaatgttcaggagcaaaaactttgatagatggtggggtgaatggaagttgcatctattccaccaaccagcttcaatgtacatgatagacctctttccagatgttgtccctcaagtaagtctctgacttaacttgatttcatttgaacaacttcctagccgatttatcttaactaatcttttctttgatttgtagacaacagaatcctctcctcctcgtcaaagcaacagtggcaaggatatcacctacgccccaggcttaattcctaatggaggtgggccatctcaccctgtcatcggctatgatgcccccaatactttagctcttctccaagggcttatcagagaaccagccgatgccggtaggaaatggaaaaccagatcatcgactgtagatacttcagccccagctccaaagaagaaaatcaaaaagaaagctaaaccagctgatgatctgcctgccctagatccatccattgaacaagctctggatgaagaagaaatcggagaagacgttgatcaagccgcaaccgaagtaagcgatactgaaagaacaccatcggcttcacctaagcagacccctccaactccttctgctccaactccctttacaagagtaagcacccttctttaaccatttttgtaatcgtctcactttatggccgattgctcacattcttggtaattgcagaaaaggaaggctgctgtgaagaagaaatcgactccaatgacatctaaaccagctccaccggtacaataatcttacttctttcattaattaatttcagctgattttatataacatttgtctattttcagcctccttcccctcctattcaacaagcatcaagcgatcgaaccccatcagctgtagggagtcatcacatagaagaagaagttcaaccaattgctccgactattccagtaaatttcttataactaacatatgcagatcggctatgcctgtttaatctctaaccctcttaaatcattactgtaggtcttagccgatcttttttcttttgatatcagagattatcttgatgaggagacagaggttgacactactagcaaagctctagctcctttgtctgacgacgtgaagaaaactcttgaaaatatttctcatcggctagagacatcatcactagacagcctagtagtcaactgtggatcaatcaggactcggcttcatgaagtccaggctcaaatccccgatgagttagctgatattcttactccagctgtttatcttgaacaacatcaatataagctggaaaaggccaagctgagattagccgaacgcagagagcgcaaagacattgaagcaacaatccaggcaaatcggcaacttgttcataaagaaaaaaccagactcgatcaattatctgaaggcccgatcaaatccaatattgaccggcttgaagctcataagattgaactcttagcacaactttaagaatgcaatgccgaactggatttagagcacaagaagttagccgatctcccacaatctatcgaagaacaaagagcaaagttaaaatcggctatcaagaacgttgctgatatgaccaaatctctgaaggtcattcctggaaccgatgctcaagacgcccaagccatagaagaagtagaacaaattagacagagagctatatcggctatccagcgatacttatctcaataatcttaatatgtgatatcactttgcttaaaaatgcttaaaaattttgcactgtatatatgcccccctagttttacaatgtcaaaagcattgataaaaatatgaaacaactaagggcgatataacaatattggccattgtacatcggcaaacctcaaccgattacaacaaaacaactaagggcgatataacaatatcagccatctcaaggcgatgcaaacgcaccggctatcatgtatcggtaatactagccgatcatgcgttaacccaaacacttgggtgatatttcttcaaatacttgccattaagcgctcgcccaaaaacttctccatcaagtccttgcaacatgtatgctcctttagacacaaatttatggatttggaatggtccttcccaattcggcgaccacttgccgaatttactatcacgagtaccaatcggcaaaatcaatttccatacaagttctccttccgaaaaatctttaggtaccactttcttattataatgccgagcaacacgttccttatccctagtaactttagcaagtgctcgtaatcgcgactgaaccaagtcctcccgttcatcggccataagattatagtactcgtcggctattaaatcactttgcaactctgttcttcgtgagccgattcgaacttcccatggtaaaacagcttcatgtccataaacaagcttataaggaggaacttggattgatccatgataagccatccgataagaccacaatgcttcggctaaacgggtatgccacttccgaggataatcagaaattttccttttaatcaacctgatcaaactcttgttagatgcctcggcttgcccattagcttgtgcataatacggtgaagaattcaataatttgatacccatactatcggcaaattgaacaaactcatgagacacaaagattgaaccttgatcagttgtaatagtctgaggaataccaaatcggtagattatatgttcttagacaaactgtattgcatctccagaattagccttcttcaaaggaatcgcctctacccatttggtgaaataatcagttgccactaatataaacttatgtcctttactcgatggtggattaatcatgccgatcatatcaattccccatcctctgaatggccacggtttaatgataggattcatagccgacgctggcgctctctgaattgcactaaatttctgataatcttgacaacccttgtaatatctgaaacaatcttccaacattgtcggccaaaaatatcccgtacgccgaagtaaccacttcatcttatgagccgattgatgagtaccacaaattccctcatgaacttcgccgattgcaactttagcctgatcagtgctcaaacacttaagtaatactccatcaatcgttcgataataaagctcatcatccaataaagcatacttcaacgccttatatcttaacttcctagaagccgactgagatggatttcgtaaatattgatgcacatcatatctccaatcatcggccgttatggcagcaacttcaacctgaacatctttgatcatcggcttatatcccgatgccccttgagctaaatcattggcctcaacattctgctctcgagacacatgcttcaaagtcactagccgaaacgttttcatcagtccttggcacttctcattataaaccatcaacgtatcattcttgcactcatattctcctgccaactgactgataactaacaaagaatctcccataatttcaatagcatcgacttcaacctccttgagcaattgcaaccctttaagaactgcctcattctcagcttgtgtcgcgaccgagaaaatttgcattttcacgaacgctagtgtattaatccccgtcctatgaaaagccggggtacaccacacaaacatgatacaaacgacacatctttattatatcgataatatttacattattacaaaggcacttcaagcctgacaataaaaaataaacagcagcggactagttggcctacggctccatcttcataggcgctcaactggggtataagccaggactccacctaagacttcttctccaaagcttctcttactgaagggggggggggaatatagagcaagaatgagtacaaccacagtactcagcaagtcacaccgggagatgcatgattaatgcaaaggaaacaaggggtaataatataggggattaggttttgcaggacagcatttaaaagacacttagttgcccaaagctattttataaagacgattctagagatacacagtattattaatcaaggccgtggacccacacgaacctgccttaacccaaggcctacgatga

SEQ ID NO: 16007 - DNA, 1174 bp, Oryza sativa
tttgttcaggactagattgagcaccgagttaatccttacccattagacatgtggttagtacagtagtgctttgcaacagaggcccgaagaccggtccttatagtggccgaggtgctactagcaaaaccctgcacctcaagcccagcctaaaaccattttgggggttttgaatagaggggggaggtgtgtgttcaattccatcacaagccaaccattccacagtgtccaaatgatatgagaattcccgaagtctaaagttataaaaccacctactgttgcctaattagtcagcgaagcatctacctagattcatactagtggaactgttaatagagtacccactagttggggttttgtttatcctagggtgaacaaggtaataataaacaatagcaatgataaggctataacaaggattaataggaagtgctaaataaaacagtgattacgcgggaatttaaataaagcggtaatgcaataatttaaatcaaaataattttataaactgggattcaatatgctcaagggtgatgtgacttgccttgctcagagagaacggccttccgaaccttcggcgacgaccgcaaaccatgcttcgagaaccttcggaacgatagaagctacgcgaagcacacaagcaaagctacaagcctataaagaagcaataacaatacataaaaataaagcacacggttctttaggttataacaaacattaggagacttgaacgggtcgattcggggttcgtatgaccaagatatgatcatccgaagtttaatgctgttacatggagatttacggattattgtgattaggttttgcaattataaaacgtgtgtaagcgctagcctggaaaagataggaagactgtgctgttgacatgtggaccccacatgtcaacctaagggaccacagtagaccgagtacacagagacggtccacaggtcgacggaagcggatcccgtgtgtcaaccgaggcaagcggtcgacaaacggactccactagacaccacacgggctgcacacgtggaaaccacgcggctaccgagcgggcacactaacacggacactacacgcacaagcaaacgactaccgacaccagtacacaggtaccggggtcgacaaccgcacaacaggcacgggcgacaccgaaaggactaggacggggcagcga

SEQ ID NO: 16008 - DNA, 7219 bp, Oryza sativa
aggtttgcacgggagagagaagaggccgtgcgggaggaggaagacgaccggcgcatgggccccacgcggccaggcgcgcggtcggcgcacgcacgtgcgcggcacgggcgggagggcgccgctcagcttgggcccggaggcggcccaggaggagaggagggagaggcagcccgggagagagaggggaggagagggagctgggccgggagggggagggaagaggtgggccgggaggaggaggagaggcccgggagaggagggaaagggagggaggagagggagactttgggctgggcttggcccaaaggaggaaggaggattatttttaagtttttctttttaataaactttgatcatagttgttgttgcttaataaatatttccggtactctaaaaattcaagtaaaatttgagggctcattttagaccagggagaatttaacaaaaattctccgggccacattcgaaattttcttgtacgtattttagtgtttgccaatttcttttcgaattttaattaattctattattccttttagaaaatgatttttatttcgggatgaatttatcaggacgtgacagcttgattattcgtcgcataagatttaatagtataagcaaactcaaagcatgcctcccgaggcaaaattataactaagccgataccacaaccatgagcacaaaccaacccatcaaaaagtaaagtccatggcacaatctcaaccgagccgattgaatcatcacgatagtcaactatgaaatcggctatagcttgccctttgactgccttcggcgatccataccgaagatcgaattcagttaatgaaaatatccattttccaacccttcctttcaaaattggagccgacaacatgtacttaaccatatcggccttacatatgacagtgcattcattggacaacagataatgccttaacctcgtacatgaaaaatataggcatagacataacttttccacagaagaatatctagtctctgcatccaagagtctacgacttaaataaaacacaaccctttcttttccttcaagctcctggatcaaaaccgagccgattgacttctcaccggctgacaaatacaaccgaaagggaactcctttctgtggagaaatcaaaaccggaggagaactcaaatattccttaatattatccaaagctttttgccgctctaccccccaagtaaattgttgatcggcctttaatcgtaataatggcgtaaaaggctctaatcttccagacaaattagaaataaaccttctaacgaaattaatcttgccgatcatctcttgcaattctgttttatccttcggaggcttaattttcttgatcgcactgatacttctttgggtaattttgatctccctctcatgaacaagaaatcccaagaactgaccagccggcacaccaaaagcacattttgtcggattcatcttcaagccatatttcctggttctctcaaaaaccttcctcaaatcggctatgtggtcctctatctctttagacttaacaaccacatcatcaatatagacctcaaccaaccagccgattaaatcatgatatatataattcatagctctttaatacgttgctccaacacttttcaagccaaaagtcattacaacacactcaaataatccgattgcaccgggacacctaaaagcggtcttataaatgtcttcttcaaccataaaaatttgattgtatccagcatttccatccataaaactcaaaatcttatgccctgacgcagcgtcaaccagttgatcggccactggcattggatattcgtcctttggggtagctttattcaaatctctaaaatcaatgcataccctaaccttgccgtttttcttgataataggaactatactagaaatccactcagcatatcggcaaggacgaataaaaccagcatcatataagcgttgaatctcagccttaacaggctccagcatatcggctttgcatcttctcggcggttgctgatttagtctaaccccgggtttgataggtagccgatgttgaacaatcgattggctgagtcctggcatttcataatattcccaagcaaagcaatctctaaattcttttaagagctctatcaacttggttctgaattctgcacataaatttttactaataaatgttggtcttggccgatcgcctggacctatatcaatttcctccagatcatcggccgacataaaaccttgaccttgtttgtcatcgagatcatctactgtatccttggtgtagacgttcgaaccctccacgacgccctcaaaataatagcttgggttcttcatcttcaattggctatatatcagaatcggatacttttaaaaaatctccattccaaacttttccagataaacaatcaaggccatccatctcccaaagagctaaatcggcactagcaacattaactgacctgtcggctggcacgatctctatgttgtcgccttgccattgaatcaaacattggtgcatggttgaaggaatacaacaattagcatgaatccaatctcttccaagcaacaagctataagaacccttcccatcgatgacaaaaaatgttgtagggatcgttttactgtcgactgtcagttccacgttcaaaacccctttggtttctgatggattaccaccaaagtctttaagcaccatgttcgtcttgatgaggtcttcggcgttcctacccaattccctgaatgtagcataaggcatcaagtttactgcagccccaccatcgaccatcatcttagacatcggcttcccattgacataaccgtttatatacaatggtttaagatgccgattctctatcccctcaggcttctcgaacattgctcgctccggtgacaaaaccaacttagccgattcctcttctatctcatctacatcggcttgatcaatcccgaattcggctggcaatgtaaagaccatgttaactggtgctgttacaacactcttcccttttgccaacctttttgcctcttcgactgcaacatcatcggctacaggaacctagctcttaacacgccattcctgtcttggctttgctttctttagccgatggttaatttcctattcaacttcttgaagctgctccctgtttctcaacctttgaacccttctcttctggttctttgtgaaaataccagaaggacaccattgatttgtcctaactacctcatccttctgaccgcgaccttgattcactaggcccaatctttgatgaacagacactctttcctgccttagccgattattcccattatatgactggcttgagctctcaatgataccattgcacccagggcagttttcgatggacggtaacctcatcccttcattccagcagaatctaaagaactcacaaccccaatgaggatcaaaaccatcatcgtgttcttcataatgcttctcctgctgcttgtcatacttcctctgatatttgttgatcatcttagccgaattcacttgaaaaccctttgcacggaccctatcagctgtatgtaccatattaataggaaaaggattaccatcgaccttcattggtttcttcgaatcatcaaacttgatttttcctccctcaatagccatttggatttgctgcctgaagaccttgcagtcattagtcgtatgagacccagaattatgccacttacaatacctcttcttgcccaactcttcagccgatgggattgtatgtccggtaggaaattgaatctgtttttcttgaagtagcaaatcaaatatcttatcagccttggttatgtcaaagtcatacctttcctcttttcctgagcccttcacccattggcatggtataacctttttattcctgacccactcggctgcagctattttggaatcatcatcctcatcatccgatccatacatataaggatagacatgattaatcttcctagagttcttcctagcatccgtgaacctttgttcatgcaaagccaccttctgtgtaagatgtaacaagctttcgaaatcttcagatgagaatttttccctgatcggagaaatcaacccttgaaaagccaaatcggctagctgggcatcagtcaaactcaagctgtaacatttattcctcatttccctgaacctttgaatatactcatgcaccagctcatcatgcttttgcttgattgacgtgagatcagacagcttcatctcatgaaccccactatagaaataactgtgaaactgcttctctaaatcggcccaactgttaatcgacccatgtggcagagaagaaaaccaagtaaaagccgacccagctaatgacaaccggaataacctaaccctcaaagcatctacagccgatgcctcaccacactgagctaagaatcggctgatgtgctcataggttgatgtagtattctgtcctgaaaactttgagaagtctggtactttaaaccggttaggtaaaggaactctttcaaaccattcaggataaggttgtcgatacaaattcccagtctcttttggtttaagcccaaattgttccctcattacatcagctatcacgtcggcccatggtcgctgctgaggtgtttgttgtggtataggctcaaactggttgtagaattgaggcggcaccgatcctgtctgttggtactgaacttggggtgatggaggctgatattgataactcaaattgcccccttggcaattgtgaaggttcggctgaataccacgcgccaaatgctcaggaataacttgagccaccaccggaccatccggttgcatatgatgaaccaagtgttccgggaccgcctgatttgcagtgtactgcacaggctggacaccaggcattgcaaacccagccgatgcgttcattgaggcttgctactgaatcggctgaatgacctgctgtctcaacggtgtctgttgaatcggctgtaaagccggttgctttggtggcgtctgctgaactggttgcacggcctgctgaattggggatgcttgttgaataggctgcacaacctgttgcctagacggtgtttgctgaatcggctgctgctgagccgaattaatagcattctgaggaggtagaaacatagatgcaacctggtcttgtgttagctgaatcacattcggtccaggatactgtgattgctctcttaccaataattgaggattgattaattggcctggagccgacgacggcgctgcaggtgctggagctgatgctggcgccgttggctgagctgatgatgcaacaggaggaactccctgagtaagtggatgaacatcggtgatcaaagttcgataatttggaaaagtacccccttgcaagtaagctgggcctgcagcttgatgttcagctattgagccatcggctaccgatttcatcatatttgacaaggtattagtcaacactccagattgattaatcaaagcacaatacacagcatagtcaactcgatcttgaaagttattgaaaaaatcttggaatgcattgtcattctgattaagatttcccccttgcggtccctgagtgccgtcaccttgaaccccatggtccccttgagggtcgtcgccttgatctcctggagagccattagtagcacctttgttactcggctgggctgatccgtctggaatttgtttcttttctccctctttagatgaaccgatcccaaaatcctcaggaaccaccttcaacttgtacttctgaaaaaatgtgcccttgcgagtttgcatgaatgaacttaaaaattgatctcgtgcttgctgcatcattgcattgaagtatttttctgttcatgagtgaacttctccggatcgatgggtacaacgtttccttcatggacgtcaatcagaccgaatttctgggtcttttccttaccactacccgggctggccgacgacggagacagtggtggtttctcagccatgaaggaagctgttcttctgacttctaatcagccccaccgggcgtgccaaaagcgtgttgatggaaaacacgaggcctgggagatctgcttaactccaatgcaggtccaaaactcaccttcggatgtacgagcgtgccagttgatttgatcctacaatcaacaagaaacaaagataaataaaccatgattaaatccataaatgatagccgatcggctagatgccgatgacatatcatttatctttgaaccgatgtcatatgtgaatcgatcggcaattgttaaggaaacaagacggaactaaatctgctcgatcggctgtagatatcaatgatatataatccgtatattgacatatacttaaatcaagtgattaggatagatcggtcaccttgccgagacagtataaatcacttagattgaaatatatattaataatgagattatacatattcatagcatagccgatcaaatagatctagtatgtatcggctaatactccgatactactttatattaagatattaaagcaaataaaatatactaaacagagatctaatatacttaaatgccacaagatcttaacatgaagggcagatctaacatattaattgagcatatagagcaagagcaactagatcagataagatcggctgaaactccgatactaccctaatcggcaaccagtaggcaggctagagattgaaattctaaacacgacttaatagatcaaactcaactgatacagcattaagtatgaaaagaaggacaatatctagacaatcaagccgctggatgtttcatagggtggtggatatctcatataatctaagccaacatcattatttaacctaatcggctgtcttctgctagcagatgttagctgattgtaggttagatgacgatattgtcaaagattatgtaagatatatgataacttgacggattacataaacaagattagagtatcataaagatagaagcactaatctcgagaaccgatgcaggttttacaggttttacctcttgttgaagatcgaaaccgatgcagctcaacccgaaagcaagaactcgtcgaaataaaactaaagcaaaaagggtggcgatgcgccgaaattgtattgaacgtgtgtgtgttcctcattacattgggctcggggactatttatacccgagaattacaagatatatccatattggacacgactcttatctctaacaaactctaagataccataagtctttgcggcagacttttgcccacatttatctctaaggaat

SEQ ID NO: 16009 - DNA, 1535 bp, Oryza sativa
tccaccctgccttgccgccgcctcgcctcctccgccgccgcactccgttcgtcgctgtcgccgcccctccgccctacctcgcgctcgcctcgccgccacctctccgccatgcctcgcgctcgcgctcgcctcgcctcctctgccacctccgccgccacccctccgccctgcctcgctgtacgcgtgagagagaggaagagtgagactgagagtgagagaagagagagagaagagagagatgaagagtgggagaagtatgataggtgggtcccacatttttttttataaatagaatgctgtatggactgccacgcgtacgccacgtagatcaaaaccaccgcggattgggtcgaggggggtaatttgtccggtttgtatagttggggtgaagaatgtccggttttgtggttagggagggtaattcggacgaccgcgatagttcgggggggtgattcgtactttttccaataaaaagttatcatagcattaattgttatgtatatcagccttgtatataaacatttaaagatcattgattggatatttcatatttataatataatatagtttaactacgtatatttacataaatttgtagactaatatatttatatttaaattgtagaaaatattaagaccatcgatctatttcagtgacagtatttttttgttttattgtttttatagtattccgtgcgtagatttttcttttcttcccatggacagtactaagaaacctttatttcttttttccagttgtacataagtacggcatacttatgattttttgtctttttctagctgatagttatatagttcatatagtaataaggtatttctttttttaaataaaataaattagagatctaatctaatggtataaaaaattgggatcatcaattttggtgaaaattgacggtgatatctgtttaaatttatgttgtcactagcaaaggtgcctgtgcgttgcaacgggaagtgtacagaaaaaaaaaaagagaaaaatttacattatgtaattaattaaaatatttggtatttttaagtaggtaggtgtataattaaatcaatttacaagtaaagcacgtctgcaaaataaaatgacatggttaaatttaattttattaaattctccattattagttacgctctttgaaattttattggaattatcagagcttaaattgctaatttttaataatacaaacatcatttaacaattatttaattggaaaaaaaaatcaaaatccacctttctatgtttgggccgaatatagaacagtttatatcccctcccttttgtctattcaatgtgtctggcctgttttctttctccattgaagtccattttgcgtcctccattcggtggcccaataggccggcggcccgatacaggagctgctggagccgttcgatcgaatggatggtccagattaatcctaacctaaataaatatacccaaaccctaaccctaaccattcactccccctggcctcccgcgccgcccaccccgagcgaagacggtggcggcgccc

SEQ ID NO: 16010 - DNA, 968 bp, Oryza sativa
atccttcggtgattcggccacaacgcgaggcgcagtggctacatgcaatccggcgacgacggcgtggtggttcatcggccgatcggcgtcacgacctaggcacaactggcgtcggaggagatcgtcctcctcgttgttggtaccaatccttgatttctgactgctagatatatattctgattccagatattctcgggcctgtgtacctacacaacatgtttcctttcgagagatgcatgggcgttctgaagaagtatgttcgtaaccgtgctcgtccagaggcaagcattgccaagggttatggaacagaggaggtcatcgaattttgcgtagaatttatcgaagaccttcgcccaatcggggtacctgaatcacgccatgaagggagactacggggaaagggaactctcggaaggaaagcaataatgacggtagacaacaatttattccgtaaagcccatttcactgttctgcaacactcttcattggtagctccttacatcgaggagcacttagctctagttcacgccaggaacatcggtaagtccaatgcatggattacacggcatcacattgatactttccccacgtggctacgacaacatctcatgggcacgccggagatcaaccaacaacttgccttcctgacgaggggaccgtctgggtcgatagcgacattccagggatatgagatcaatgggtacacattctacacgagagcccaagacatgaagagcacgaaccaaaacagcgttgttcgtgtcgatgccatgagacacgatggaacaactgccacgtattacggtgccatcgaggatatatgggaacttgactatggtcctctcaaggttcctctgttctggtgccaatgtgttaggttgactggtggaggagtaatgattgatgacagtggtatgacaactgttgaccttaacaaggttggatactcggacgaaccttttgtcctt

SEQ ID NO: 16011 - DNA, 12696 bp, Oryza sativa
cctgtcgatagttaccatgcatgttatttggtgtcccacagttaataatatatgttctttggatatcctacagtaaagatggtaaactttaagtgtactatcgcaaattttaccttaagataaggcagattacaatgtttcggtgttaaaaattggaatcagaaaaaagtattacaatgtctgagcacaacatgcgacaacaaagcttctgaagcaaactattaattatggagttatatcatgtggataacgataggggattacaaatatagagatatgcatgtgttaatttcaccacacagtactactcgatcacctctgttgtccggtgcctctcatgattcatccatgtcttgtgtgccccatatttagttgaaatcgctgcccagccaaagattacgacgcagggccaatatgtaattagcgttcgaataaggagaacacgtgcaataactggcaatacctgatttcccttcctaacatacatcgctattgcaacacggggtgcatgcaatggctccgtgaataagcatagagatgcaatcatcatcattacacagattgcaattgcagtccatcgagccactggagccagtaccaaatacatacctagcataaaagcagcacccaaacttatcaccgaactgaaggccaggaataaagatatgttgaagtgccggcgacggaggggccaactaaccatagccattccggagtacatgaggtggatgatggctaaagttgagcaaatgaatgctattgtgttggccatggtgaatgcatcgaatatataccttccagcaagtgttggtgtaccgccattgtaatggtcgtcggctttatatcctccaggtatggctaaaattgcgccaaatgtgacagtaacaattagtactgatccgatgcctagagtttgtgttgaagttgtcagtttctctgattccttcgcttcgtctgcctgttttttctgaaagtgatctgcccgacggcaaccaccacttgcattgcaatgtgttaatgccagcaatatcaatttttctgggttctgcaaagaaaacatatggatctgtaattcaaaactacttaattattttgctttgtttgtactggaaagtggaaacacaaaaagagtgagaagtgtattacccatacatagtaaaacccttcatgaatcttactgtctgctatttctaaaggagtctgcccctgattatttagtatatttaagtttactttcctgttccttagtaaaatacaaaaaatgtacttatttccattccgcactgctatatgcattgcggtgttgccatcattgtcttgcatattgaaaatcctagccaatgatcgagtacggtgagcatactcaactatattccttctgcccctttcaacagcgacatgaaggaaagtcctccccttaaaatctacaagaccagcgatctcatcaggttgctcctcaattaaatatttgatagtccgaatggcacctgaggatgcagcaacgtgtatcggatacaatccttcagaatcttgctggtacaactgaactgggttggctagcagtactggaatgagcggagtgcgtgacatccacgttattacagtatattcactaagtgatgcagcgaagtctttacaaagtgatgcagcgaagtgaagtggcgtgcttcgatttttgtcaacttgttctgtgaggtccttgttccaattcagtaacatttcagtcatctctgcatatgtggtgttcaagtcaaactaggttgtggcatacaaactttgcagtagctaagaagaggaattgaacataaatatatttctacataatccacttctacagtacgaaaattagaccatttttggttaatttctccttaaggggattgaaggtaattcagagaggaatattccacacttattgaggtgtgaaattaatcttcctcaatccccttcaatcttttcctcttaggccttgttcggttgtcccgggaacggccgggattgggctacaatccccatggatcaacccggtgcggattaaatcccggcttgcaagaaagtgtgcgttcagttaagcccagtttggattatatcacaacccatcccggcctttccgcgtcaccccggtccgggaagaaatcatcgacccaagaggtgtggaaaaaaatcctcgagacgatgcgcagtgcatgggaggtgactcggtggcggcggcgatgcgaccgaggggcgatgggagaccgcaagattgggaagggatggcaatggcgactcagcgccttacccttgtccactccagtggctagttctcacttctcaccggtgcacatatatctctttcttcctctctcctctcctgggtggcagtgttataaggtttcttggagcaagggttcctaagtcatcgcttgcgctcctcattgccaccacgactatcctcgcagcaatatattgagaacgggccagtgccgcaacccaagcccgatagcatgcccgatgtgtgtcaaactaaatatggtggaggagaaccttggtctttctgctttgagatttgctccggtctaacaaaaaataccttgaggtaccgttatctcacgataccaaatcgttttcgatagttggatctagcaacgcccatcctgtctagctaaattcaacgatcggaaacaatttaataccatgagataccggtatctcgaggtattttttactggaccagagcatatctcttctgctatagatctccagtatcttaacaattgagtcaacggagtgctacaatgaagcgtgtgaatgctgttcaacttgattattttctgttttgtcaacttttgccatgcgtgtgatgcctcttgaatcacggccatagccgccgacagccgcgcgtcatcgccgtcccgtcgctattcccgctctccgcgcgcgtcatctcgcgtcgcgtcgcaccatcgccgtcgccatcgcatcgccgcgtcccgtcgaccgtgacctcgctgacgcctcgccaccacagcgtcgtcgtgtcgctatcccatccaccccggaatcccgctgaagaagctagccagctacacgtgaattcgcggaggctagccgccagctcgccgctgcatcccgccaaaccctcaccgcctataaaagggccccaagctcccccattcttccccacaccatcaccatcccaacccatctctctctcctctctctttctctcgatttcactctctgtgccgccgcctagagccgccgcgctccgtcttctagcgccgccgtcgccggaggagctccgccggaggccgccgccccttccccggccgccggtcgccgagccgggcctcgccgccgcgacgcgccctcaggccgagccgagcagagcgcgaggaagacgaagaaaccgagccgagccactgccaggccggccccgcgcctcgttccctccaagagccgctgacagccggggcccacaccttttcccctccaacagttgccgacaggtgggacccttcttttgctgtcaaccctagcggaatattcccttgccgtccaataaataaaatcccagaaaatattttatcttttgaaaatccgtagaaaatcaaccataattccgattgaccccattcaagtttctaaatttttctaaaattgagatctacacagtggcactgttatttctctgatttaagatagttttattgccttttcttatttagatttgttttcgcgtttagagcccgagtacgaggaagctccggacgccgctttcgagggaaaagaccccaaccctgtgcaaggcaagcctctttgatcacattgcccctatattttcaataatatgttgtttgcaaaaatgcattgcttagtatacacgattaacatgtttaggcctcggattgtttatacaactgacggaccaacctaggagtcgcacttatatttcataggttgatgtttccatacctttgatagctccacaaatatttgcgccggtattgttgtacgaataccgagatagtttcgcttagccatgcttatgttgtttgccaaatacatgtttaaaagtccggtacgttgtaccgaggtgttgtgaaataaaatgtgttgtgaaagtggtgatgatgcggagtcatgcctttgtggtttggctacgtattgtcgttaaggaacgattcctttgggaaatccatccaaacacattacagtgcgaccacacgggtatttatgggatgcctctggctaagtaaattgctatcacatgggagttggtgtgccaatggttgtggaatgccgaggatgaggagacgaagtttttacctttttgcccatcatgggtgttattttgcctctattgtggtgtacgaaatcagtaggagacatcctcggtatttcctggcgtgcgaactttcgttgccgacgggtaaacgatgtcagtttcgtgtcgtgtgggtaaaacgtgcaacctttgcagagattaatgaactgtccgaacagccgtgcccacggtcaagggcgagtgtaaggtgtttctcatagcgtagatttgtttgacaaatgtttgtgaagtggttatttgggaagggtaacgttaccagagtccgcctgtgtggcagacggctaacctatgtggttaggaacaggtctgtgtgacctggggtgtcgtccgacaccgaggtgttgttagggccatgatggcgttgttgtgctgagataactgtgtggactatgtgttgttgtgagaagaaactaatagaggaaacaaattaattgttgttcgttaatcgtgataagttgttgcaaagcaacttgtggaatgggtcgaggcgtgagcctcctcctgacaactaaacacttgactcactcactaggagttttgtgaaataaatcactttgccaaaaaggcagctttcgcaaataaaaccatagcctccttgtttaagccaaacatgtcattctttcctctggcttgctgagtacgttaagtactcacccttgccccttataataatctatagagtatgaagatgaagacgtcgacccgaccgccgaggagtatctccaggagcaagctgagtatgaagacttctagatgttttgtccctagccccaagcctcgcttgtggaataagttagttgcctaggttcatagcctagagcatagttgcttagtcgcttagtctctccgcgtgttcgcttttatgtttttctgtgctattgtgttgctcatccatgggcctgtccatgatagcaacttatgtaatgactgctacccagtgatgtaataatgcagtttactttgatttcacatttattctgtgtgtaccagctagtgtatcctgggactggtactatatcacaggtaatgcataacaccctgatgtaagttagctatgtttatggctaacgaatgtcggggcgttacaggcatgatgtctaggaggctttgttgttgcaggtccgggttgaggaggagtaccacatggtagcggatgcggtctaccacaaacgcaatcgctcgagatcctccgggagtgctgccgatactggaggccaaggaagaggtagctgccaccggatctggtgtgtgtgtgtgtgtgtgtgtgtgtgtgtgtgtgtgtgtttgtgtgtgtgacctgccgctggccttggctgctgcttgccaagacctaccccattgacgccacaccatagtctctacattaatatcgccgccacgctgtggaccaagcccaccaacctctactactcagggttcctgttcgcaaaaacacaagcgctagagcttatgtgccttcgccatccatataagcgtcaagcaccgtcttgaataagacagaagtgagcagtgtggggaaaggttgtggctgagttgtagggtctacaagaggcaaaatggactttttcacaccacccatgctggcaatcctacttgtcacaccacttaggtggaagtggcaaaatattaggaaaccttctctctccgatggaaaaaacataggaccaaatctaacagtggcatttagaaaggagccacttattaatagtggactagcactgataacagaattggtaactgaatgtgaaaaaatattgtaggagatccaagaccgatgacaataatgaggcatgatatttgttagagaggtatttcaaccgaaccctacatcctggggcattgtgttgctctccaaactagtataactataatataccacggtaccaatatccctccagcagctaagacaactagtcattccctcgcctaagttcttaggtggtggctagagagtttaggattagagttcgacattacttctatcctaaacacatcctccgaaccctacatcctgagacactgtgtgttgctccccaaactactacaactataatataccacagtaccaccaataaccctcgagcaactaaaacagctagtcattccctcgcctaagttattaggtggtgcgtagagagtttaggacaagagttcgacattacttctaatcctaaacacatcctccctctataaaaagtaattctggctacaaatctagacatagttagaatttcttttgttacataggagtcttataataacttcttctttccaactgacattgtatgtatatttgaagcaaacttaatcggcaatgtttgcagtcattgcctatttattatcatagggcaaacttcggaaagtaggtcgctaggctaggtacaagctccctcaatgctgattattaattgtaaggcatattttgttattatattttggaatattatataatacttcttcagttataaatatttgatgtttatgacaaaatttagtaaaacttctgaaattcttaccatcgatgattctcagaacaaggaatggtataccatcatggtattataaaattattagatttataaacatatcctaattaatatatatataacattgatgcttgggattttaaagaagtttgaccaaaacttgtcctaagcataaaaattaatgattagaaggatttaaaataagtatgaagtaccgtacaaaattaacatgaaatgaaaaggtatatatatcaattgcacacgtacctttgccttggagaaccgctgcatgcaatgcgttctgtccacttaggcccgaatatgaaagattctctggactcatttgatgcaataactttgcgatgtcactacgttgtagcacgatagctaggtacaacggtgaaattcctgcttcatccgtaggggaactagccaattctggatcgaattcaagaagcttggtgatcatttccttgtttccgatgcggattgcatcatgcaagggaagaaaggccgtcccctttctcagaacttccttcaatctagccgctacctgcagatttgacctcggattattagccagatcaattagaaaagaaaccatttgggaatggccagccctgacagcgcagtgcaaaggcgtgccgcctttgttgttctgcaccagcaggagatgcggggccttgctgcagatgatctccacactcctcaggtagctccagccatcaccagaggtggccaaaacatgcagtgccgtgtcgccttcaatggtgaccccctccaggtccaggcatgactgatgcccatcatcaccagaagcttgctgcgtcgccatggtaggaattgcagggttagcttggtccaggggcgacgagtctgcagagggtgcaggacgatgacaagcaccttcctctttagcagccttctgttgcgtcgcagcttccatgttcagaagaatgtgatcggttatcccatcacaatcacctcgcgatgcaaggagtagcaaccatggattcatgggaggctttgcggtgtcctcctttgttttggccaccgtcagtttggatttgactgccgatgccatgatgggcggtggaggagcaccgaggctagctagcggcagttggcatctgggggcttgcggtgggtgctggtgctggtgcagcggcactaccactactcgacaatattgtggttaatcaaggagggtcacttgcagttgcagctaataatttgctgggcactgttgtgatctgcctacgtataatccacgttaatttataggttcattgatcggggagtatattgtttgccttcggcaacacgcgacaaaccacgagcaacaacattgttcgacacaaaaatatatcatgtgtacatgtgattgtgctttttttttttttaccttgatgctggggacggtgcatctgtcgcgcgactaccagccataaaagctctcagtcgccgtctgctgtctgctggcagggagagatatccacggtgtgttggagtttctaattcaagatcttcttactttagccaataaacaatcatcttctcttaattataatcaattcactgacctacgtttgaagccatcaatgattcctctgatttttcacttttcctttctttcttcttctctgtttcttcttcattttgttttttcttcttcttcaagaaccccttttagggcccctttaaatcgtaggaatgaaaaagcagaggaataggaaaaacacaggattctgataggaatataattgtaaaacagaggattgcaaaacacatgaaaaacataggaatagctgtttgattggactacaggaaaaacgcaggaatcagatgagagagatagactcaaaggaaatattacaagaggttagacctcttgctaactttcctccaaaatgtgcataggattacacattccataggaattttaaaggattggataggattcaatcctttgtttcaaaggttttcataggatttttttccataggattgaaatcctccaaaattcctatatttttcctacaaatcaaaggggcccttagtgcctagatcgaacgggcgattgtattaggattttaagattagagagagtttgactgtgacctctgccattgtttatatgacgatactagtggggctcaggggtattatctccaactaaaattgagtccttattttaccgatcacaaaaaaaaaaatctcttatttggtttcttgttgggaaatgaaaacgatgggattttatccctttcctaactaactggcattagccgataaaatcaaccaacacggtgatcaatctgtcatcgtttattttcctttttggatttagtccttttgcgattgtgttgttgccagatgattatatcgcttacctaatgtgccgcatgttaattaatcatcatactttctaacttttcttaatgagtaaatttcacaaaactacatatgcttgtgatggttgattttattgactcactgtcgataaggattaggaaagagattaaccaccaatttccttcccaatcaagaaagaaaaaaaataagcgattagattttgttttgtctgatcggtgtaaaacagaattccaaactaattggagataaacccccgagccccaccagtgtcgatatatatgagaaataggaggagacgcagatgtgacgccgaatctctccctgaaccctaaaccaattgtctgatcggttagacactggaaggggttcgtgagacatctctagacgaagaagaagaaagaagagaaacagagaagaaggaaaagcaagaatcaagcataaatttcaatggcttcatctcaggtcagctagatcaattaatttccgcataatcagaaggtgatcatgtttaggctaagactcaaattaattaattagattaaattacaacagcttggaccaaattttcacaaaactacaaatttaaatatgtgtatcacaaaactatagatttagtgtcaaacatttcacggaactacagatttaatgcaccattcacaaaactacatatgtagtgataaagttatcaaagaattacatattttagagtttatccatagcacgattatttatgtaaagttacaaaatctatagttttgtgaaaaatagttgttaaatctatagttttgttacataatacttttaatatgtagtttcgtgataaatttggcagtaaaactgtagttttatgaaacacattcttaaatatgcagttttatgatagtttgatcaaaaaatctgtagttttgtaaaatttactctttcttaatcttgactttttaagttgttggagttatatgggccttgtccatgtaataatagaacaatcaaaggcttacctaatgtaatagttgcatgcatgtgaacttcagtgccattctgttgatctactaagaataaatatcagtgtataaggaataatacattcttctcgctacttcaagaataatactatcagtttataaggaacagtgcgctcttcttgctacttaaatcatgtggttacgagagaacttgagtaacacacgctctcacatgtggcttagtcctggtaagcggataagggctcctagcttgttacatcattttagctataatatcaaatttatatatataataaatgtgcgcttatattttcaacacgacttatcagattaataaagtagcttcaacgaccaaagaatgaaagaaagaacctacacattgcttggcatttggaaacacgttaacttttgccgcatgcaacatttgcagcttttttatttttaattctgtggtgactatgttcttttcctcttcggacaaatcgaatgtcggtatcatgcctgcaggaactgattcctttccagctgtacaatgtgtagtgaagattgagcttttgcttttgttcaaagattgctggaaattaatttcatcccttccggacactagcacgcaaacactacatcaataacgactactcacatttataacgattaaaccaaccttacaacccaatagttacagacatagagactcatatgtaacggcactaaaaaacgtggagctgttacaggtgtgaaaattcaacttaaaaaaagaaaaattaggctcataagctatcacagatctgaaaattcccaataataataataataataataaagaaaaatcaccctgtctccatcccccctcctagcatcctacctaggggtgaaaacgcggtatgcaaagttcccgaccgtaccgataccgtttccgcaaaactaatataataataatatttttactgatgttaccgttttcaaaatttagtttttttaatttctgtcagcgtagcattgaagttggcactaaatagatgaattcataaatatggaaatttcccgaccgtttcattcattttcgaaaaaaataataaaataatgtaccatttccgaccgtttccgaccgtttcatccctaatcctaccaccgatggccgttgcacgatggtgcgaacgggtgtgtggggggagggaaggaaggatggtgcggccatggctggggcgcgcgacgagggcgtctatgtaggatcgagatgtcgactagagggggtgaataggtgatttaaactagatgagacctaatcaaaactaacctaagttgttaggcttggtgagggacaatgtaaactaagcaactaagttaagttttgcaaacctcgggtgatatgggctcaagtatatcactatgaaagtaaataacacgctaagttagttttgcaatcctagagtgatatgggctcaaatatatctatatgaaagtaaattgcacaaatgtacatgcaaaaggtaaatgagacaagagacaaggagtttttcacccgaggttcagaacctcgccggtttcttaatccccgttgaggcgagcccaacttcatcactcaaaaccacgaagccactacaagccctcttcatcaatgtagcacccatattttatcgcgcacatgtcttgttgcccgccttcttccgggaagccaccgagctcgcgcctccctctctctcgcgttccatcgccaccgcgcgtgacgtcgcccacgtcacctcgctctgagaactctaccgcccaaatcccggccgtagccatcatcggtcacgcgtcacccatgttccaccgccgttcctgctctccgcgcgtcacctcatgtcgcgtcgccgtcgttttcaccgtcgaattgccaccagtgtgtgacgccactccatcacatcaccgtcctctcaccccggaatcccgccctagctgctagccgtctacccccgaaatgccgtgtctagactgccagctcgccaccgcatcacccgcctataaaaggggaacccgagccccttccttgccatcaccatctccatctctctctcctctttccctctctcgttcacctctttgtgccgccgcctagagccaccgcgccccgccttcatgtgccgccatcgccggcggagctccgccgaaggtagtcgccgccttccccggccgccggtcgtggagccgcacctcgccgccgcggcgtgccgcctgtgccccggctgggtcgagcatagcgagaggaggaagaagagaagccgagccgagccactgccaagccggtcccacctccctttcctctctcctgtcactgatagccgggccccgcacctccctctatccctcaagcagcagacaagcctgggcccgcgcatcattccttccatctatcattgacaggtgggccaaccccttgccgtccgcctttagcgatgaatattccacggaatattccttttccgtttaatattttgatttccaaatattctagaaaatccatttatcctttgaaaatccatag

SEQ ID NO: 16012 - DNA, 7019 bp, Oryza sativa
ttgaaaatccatagtaaatcaaccccgattgaccccgttcaagttcctaattttttttaaaaaaattgagatctacacagtggcatcattgtttctctgatttgagcttgtgtttattgctttttgttaattagtttcgcttttcacgtttagagcccgagtacgagaaagctctggacgccgtttttgagggagaagacccccaaccctgtgcaagccaagcctctttgatcacattgcccctatatttactaatatatgttgtttgaaaaatgcattgcttagttcacacgaataacatgttttggcctcggattgtttatacaactgacggactaacctagtagccgcacttatattttataggttgatgtttccatacctttgatagctccacaaatgtttacgacggtatcgttatacgattaccaaggtagttttgcttagccatgcttgtttaaaaatccggtacgttgtaccgaggagttctgaaataaaatgtgttgtgaaagtggtgatgatgcagagtcatgcctttgtggtgtgccaatggttgtggaatgccgagaatgaggagatgaagttttacacatttttgcccatcatgggtgtctttttgcctctattgtggcatggtgccagtaggagtaggagacatcctcggtatttcctgagtggatgacggctgtccttaactgatactcggctatggatcttagcctttaggtggcatgtgattttcatgggttagctttagaaatgccttatcacgaacttccattaccgacgggtaaatggtgtcagtttcgtgtcgtgtgggtaaagcgtgcaacctctgcagagattaatgaactgttcgaatagccgtgcccacagtcaagggcgagtgtaaggtgtttctcatagcgtatatttgtttgacaaaggtttatggaaaagtggttattgggaagggtaacgttttcagagtccgcctgtgtggcagacggctaacctttgtggttaggaacgggtctgtgagacctggggtatcgtccgacaccgaggtattgttaggaccgagttggtgttgatgtgctaagataactgtgtgaactttgtgttgttgtgaaagtgaaaagaaactaatagaggaaacaaattaactgttgcttgttaatgtgacaagttgttgcaaagcaacttgtggaatgggtcgaagcgtgatgtcgcgaccgggaaaattgccttttcccgaacgctagtgtattaatccccgtcccaggaaaagccggggtacaccacacaaacatgatataaaagacacatctttattatatcgataatatttacattattacaaaggcacttaaggcctgacaatcaaaaaaaataaacagcagcggactagcggcctacggctccatcttcacaggcgctcaactggggtataagccaggactccacctaagacatcttctccaaagcttctcttactgaaggggggaaagattgagcaagaatgagtacaaccacagtactcagcaagccacaccggcagatgcatgattaatgcaagggaggtacaagggaataataatatagggattaagttttgcagtaaacagcatttaaaagtcacttagttgcccaaagccattttgtaaagacgatcctagagctacacagtattattaaacaaggccgtgaaccctcacgaacctgccttaacccaaggcctacgatgattcggaccgaactggcaacccgacctgggttccagctcgtcccaagccaacccaggccaaccattccatattttagttgttgagcaaattttaagaattaaaacactgacttgggtacattgctaggcttgcccatatccgagggctcggctattcgaatagatttactctgatcagaggtgtacatctttacccacaagacacatctttactccgcattccatggccttggaacccgtcgtaaagatgtgacatagtttccaacccatcctagccttagacaagagtaccgacccaatcctacctacggccgggatacccgggacaggcaggcagaactgagcccctagcattgggcaccaaccctctgccgtatgacatctcgactaccgggccgcagctcgtgtagccttcatttgccctggagaatgtccatcgacgcccgacttcatccatctccaatccgtgtacttttgtttatgactagactgagccacaaactaagccttacccattagacatgtggaagtacggtagtgctttgcaacagaggcccgagctttagtccttatagtggccggggtgctacttcccacaactggcatgcacccaaaccccaccgaaaacaggttttaggggttttgaaagaggaagagaggtgtgtgtccaattccaacataagccaaccattccatggtgtccaaatgatatgagaattcccaaagtctaaagttataaaaccacctaatgttgcctaattattcagcgaagcatctacctaaatttatactagtggaaccatgaatagagtacccactagttggggttcttattttcctagggtgaacaaggtaataataacaatagcaataataatgtcataacaaaggtaagtaggcatggctaaataaaacagtgataacgcgggaatttaagcaaagcgataatacgataatttaaatcaaaataattttataaactgggattcaatatgctcaagggtgatgtgacttgccttgctcagagagaacggccttccgaaccttcggcgacgaccgcgaaccacgcttcgggaacctccggaacgacgaaagctacgcgaagcacacaagcaaagctacaagcctatgaagaagcaataacaatacataaaaacaaagcacagggttctttaggttataacaaacattaagagacttgaacgggtcgattcggagttcgtatgaccaaaatatgatcatccgaggtttaatgctgttatatggagatttgcggattattataattaagctttgcaactataaaacaggtgtaagcgctagcctggaaaggacaggaaggctgcgccgttgacatgcggaccccacatgtcaacctaaaggactgcggtagaccgggtacacagaggcggtccacgggtcgacggaagcggatcccgtgtgtcaaccgaggcgagtggccgacaaacggactccactagacaccacacgggttgcacacgtggaaaccacgcggctaccgagcgggcacactaacacggacactacacggtcaccacccgcacacgtgaacgactaccgacaccggtacacgggtaccggggtcgacgaccgcacaacgggtacggggcgacaccgaaaggacgagggcggggaagcgagaggacggatccttaccaccacgcgacgaggcgcgggaacgacaacgacgaacgggcgcggcggagacagacgggcacaacggagacgaacggcgaggggacggcttcggcggcgatccttggacgaaggcgagacgcggccggcacgaggcttgacgacgcggaggcgaggacgaagacgatgacgggggctgcagcgaccttgacgaagcgaggacgacgaacgggaacggcttgacggagggacgaacgccacgacgaccgggaacgacgagaggacgacgacgacgacgacgaccgggaccggcgagggggcgacgaggggcagccagcagcagctgcacggggacgaggacgacgtggaacacgccgctacgatgccgacgacggaggcggcgccgcgagacgacgagccgggcgaccgatgggacgtcgacgacgagaacgatcggagacgacgatgaaacaatgatggcaggcagcagcggctgagcggaggaggggacggcgtggaacacgccgctgcgatgttggtgaaggtggtggtgcagcggggcgacgagccgacgaggaggaaggagaggccggcgcggagacgacggcgttccggcgaaattcgggcgaggaggaggtgatgccggggaagaaggcgatgccgcggtgtcgaaggaggagacggcggcgtcgatcggcgcactggcgatgaacagcagccggctggagggagtacagtggcaccaatgtcactggttgccggcgggggcaccgttccggcgagtttccggcgaggagacggtgaggccggtgaaggggacggtgttgcagagccgaggggggcgacggcacggccggacgatgctccggtgaggagggagaggcggctggaggtggccggcaaggaggaatgagaagggcgacggcgggagtgcgcctccggcggtcaccgcgcgaaacggagggtaggccggcgaagaggaggcggctgcgatgctagaggaggcgacggcgcggccggccggcgcacgggcgaggcggcacaggcggctggaggtcgccggcggcgtgggagagagagggcgacggcggggatggggctagagaccacggggaggctcgggatggggttaaaacggtagaacggagtgcggggatcccattttatagaatgggggagggagccggccacggggaaggtcggaacggcggcgggaaagccggccggcggcaatggttggtggccggagaaaacgcgggcgttcccggcgattgggggcgccattcaaggggaaaaacgggggaaatcaaagaggaatcaatggggattaattccccccaatcaattttggaatccaaggcttaaatcgcgtggattcgagggaggaacgaagctaggttttcggggagagagagaggaggccggctgggaggaggaagaaggcgacggcgggctgacgcgtgggccccgcgcggggcgcgcggtcagcgcgcgcacgtgcgcgctcgggcgggagggcgccgctcgagttgggccgggcggccggcccagggggggggaagggggaggcggcttgggccgggcggctgggccgaggcaggccgggaggaaggaggggggggggaaagagcccgggagagagaggggggggaagggagctgggccgagaggggaggaggcccaagagaaagagggagagaaggagagggagagaaagagagggaggaaagggagactttgggctgggcttggcccaaaggaggaagaggattatttttaggtttttctttttaataaactttgataattgtttttgttgcttaataattatttccggtgctctgaaaattcatgtaaaatttgagggctctttttagaccaaggagaatttaacaaaaattccccgggccacatttgaatttttctggcacgtattttagtgtttgccaatttcttttcgaatttttaattaattctattattccttttagcgaatgatttttattctcgggatgaatttatcaggacgtgacaaatccaccccccttacaggaatctcgtccccgagattcgaggaggctagcaagaagataggttgggcggtcttctcttcttgtctgacttcttccgctccgtcttctataacaaacttgcctagcacaacttctccactctggactgcttggctcgatctcctgttgcagatggaatcttctcttcacctgacttgtccctggttgaacctttagctgacttcgactgggttgcggcacttgaagatggggcttcagttccagaacttcgcatagctcatatctttggggtcaacctcatacaagttaccacttcatgttatgcgtcgatatcagcttgtcattactaggataccatgcttgttatttacttctaacttaccactattcacttcatgttgtcctcagttagcattcagcgtattcctttacacctttgaccttgatgtgttctttcccgatttctcttatcaatcacctttcgacctacttctttgcctggtaataaacatctttttcgatatcttctatcagtcatcttttgacctttgtcgctaagtactcttcactccgagagttgtggatgcttctggtggcgatgaggtcctttggtttgctacctttcagtgaaaccttgaagtgtttcgccaaaagctatacggactgtcattgcctttgatccgaaaaagacacatctgaaactcttagtccaaacaaatgtctcttgggttaatcacttgatttgcttcgccatcaatcgctaggttatttgattcataatagattatgagcttacggaaatgagaccctaggtctccctaatcagcaacaaaatgtacacaactcacagcacttgcaatcctaacatggatccctcaataaacttatcaagctcattcattatctcatgtttctctgttattacatgattgacggggaacaactataaaacataagtatatgattactgatataagagtattatggttgcttctgactagcgctaggcttaacaggtactgcatttgctccagtgaccacttggcgattggcacgtctgcttccttaacaggtactaccgttgtaaataactttcttacgcttgggttcttcatcctgtacttgatttcttggctgctgtgctggaacatccaaaggtacaatgccgatactggcctctgtcttgtcaactgatggctggggctgaaattgagcattgacaccttgtggtaatgcactcgctggagttggagctgttgcaacgcgggctataggactgcttcgggatgcatggatgacaattcgttgaggagcaagcttctgattgcagggagttgcgtggactgacgtgctggcagctatgtttctcggttttgggcacttgtcggcgaaatgacccattccttgacaattgaagcaacagatgtcttcccggactcggcattttcttttctcatttcgattcctctgtcctggcactggagttaggctgaaactgtaatcttggcgaggattggtgttgccttgatgcttctctccgttggaactggcgggttggttagccatcttcttcgtcagcagaaaactgaattgacaatcttttg

SEQ ID NO: 16013 - DNA, 23033 bp, Oryza sativa
tggcccaaaggaggaagaggattatttttaggtttttctttttaataaactttgataattgtttttgttgcttaataattatttccggtgctctgaaaattcaagtaaaatttgagggctctttttagaccaaggagaatttaacaaaaattccccgggccacatttgaatttttctggcacgtattttagtgtttgccaatttcttttcgaatttttaattaattctattattccttttagcgaatgatttttattctcgggatgaatttatcaggacgtgacacgtgagcctcctcccgacaactaaaacttgactcacaaggagtttttgtgaaataaatcactttgccaaaagggcagctttcgcaaataaaaccttagcctccttgtttaaaccgaacatatcattctttcccctggcttgctgagtacgttaaatactcacccttgccccttataataagctatagagttcgaagacgaagacgtcgacccgaccgttgaggagtatctctacgagcaagccgagtatgaagacttctagatgtttcgtgcctagccccaagcctcgcctgtggaataagttagttgcctaggttctttgcctagtgcatagttgcttagtcgcttagtctgtccgcgttgttcgcttatgtaccatcgctttatgtttttctatgatgttgtgttttcatctatggacctatccatgatggcaactttgtaaggactactacccagtgatgtaataaagtagttacttagattccacatttattttgtgtgtaccagctagtgtatcctgggactggtaccatctcacaagtaatgcataacaccctggtgtgagttagctgtgtttatggctaacgaatgtcaaggcgttacaatcaagcagtgggcaaggtgggagtaggccctcgaagtgaaatacccaagcctcgatcactagggtagttcttccttcaatccaaaggtggtgaattctaaaccactcacaaccggcgctgggccttctccacaatctccttggagaggtcaccaggcaacacctccacaagccgtctaggagacggcaacctccaagagtaacaagcgatgacccggctcgcagatgatcaagcgccacactatctttgcaatcaagcaaatgcacttgactcttgactaatcaaccctcaatcacacctaatagatgaacacaagcactagagagtgtgagagagtgtgagagagtgtgcaaagggtgtatgcaagagaagcaagtgccaagagagtccccttgctgctggtgggggagtgtttatacccccaccaacaaaacctagccattagaggagaaatccctcaactatgtgcactgccgatcagatcgccattgtctggcaggtcagaccgaactactttgtaacggctagaaaactagccattacagtgcaattattgatcccactcagcccaaccggtcagaccgccatacggtggccggtcagactggccacggctcggtcagaccggccatggctcggtcagaccgccactagctctgtctgaccgactgtggctctggcggctcgggttttccaccccagagcacaccacctaggcccacagccaccttccaaggggtcggtcagaccggcattgagccatcggtcagaccaacatctacccgccagtcagaccagccccagacagagagaaatgaatatagattgagaaccaagtctaaatacaaatgacctaatgtggcattttaatcatctctttgtttaggtcattacccctcttgatagtacggcaaagctataaatacaactagcaaattttgatcgcctaactcctcgatcaattaaaataaaaacctctagttttaccatcttcgttccttttgctttgcgccatcgaatttagtccagggtaatcatccatgaacacatatcacgtggtcctaactcaaaatatataactcaagagaacagttagtccacaattagctcttgtcattaattatcaaaattaacaaccggggcctagatgcttcagtcagcgacgaggagtcatgatctttagtacgtgttgaaggaaactgttgtaaagatatatatatatatatatatatatatatatatatatatatatatatatatatatatatatatgtgggattgtgggactcgaactcaagatctctcacctcagccctcacgcgcgttaccatcccacctactacacacatctgacttcgataaagatactttctttttaaactaaccctagagacatctttagtctgggttgatgttaccaaccggtataaaacgtgttgccaaccggtactaaaaatatctttaatccgggttgatgttaccaaccaatactaaagatgcatttttagtaccagttggtgttaccaactggaacttaaggtatgtttagggacttgggcttttcgaactggtactaaagcatatttagtaccggttcatcaggtatatttgtgttttgggactaggataaaagatttctctagtagtgtacggatgtaagaatatgtgctagtgggatttagctttcacgggtgcagagaaatcaatttctaggaacctagcaacggctttcatggtcatttgttgaaccacctttagccaagtatctacaaaaattacgtattgtgcacacgcacaaaagagccatgcatcccatgaaaatactaaacaaagcaaaggctctccatgtcacttctccttttaatcctaacgatcgacccaattcttcaagtactagacaaagcaacggaggatggcaccttatcatgtctaagtggccggcaagctaggatgcgaacatccctctacgcagatgatatcgcaatcttcgtcgcaccaacctaacgggatgttttcatccttagctcaaaccctagaggtctttggtgaatccacgggcttgcactacttagaaaaagcattttacccgatgtggggtctttttttcgcaggcagatatgacccttggagccaaatgaccgcctacaaaaatataaatcggggtgaaattcgctgtcagaccacttaagcggcgcctgcgaaaataattttcgcaggcggaccatttaagcggtccgcatgcaaaaatcgtacctaccccaaaaaaaaaacttaactccttatcttctcctctcaccccctccccatcactcatttccctctcaactctctctctctccctccctcaacacttctcctctccccaccgtccgggcccatcatccccctcccctccctccctccccgccggagggggagcgacggcggtggcgcggacgcagcggcggcggcacggacacggaggcggtggcgtggacggcgactgtggtggtgcggagcctgtggtcggggcgcatttttttgttcgtccagaggattttcgcaggcgggccattgggtgatgattttcgcaggcgtttatctacaggcggtccttcccccgcctagaaaaactacttttggccgcctgcaaaaatgctttttctagtagtgttgagagctaattcacctgcggaagagtcaagtggcaccaattcactgcttttagattaacctaaacaacatcatgacgaacttccttgccacacaaggtgatttcctgatcacctatctaggcctacccctctcgttgacgaaacttgggaaagcgcatcatcaaccgctgataggcaaggcagcatacacgcttcctccttagcagggaaaactcctcaaccatgcgggaagaacaactggtcaaaacggttctcatggcccaggcgatctaccacttaacttcaatcaagttacctaaggccatgttccaagcattggacaagataaaacgaaaactcctttgggccggtagtgtaaacctctccggtgccccccggggggatgcaaaattaactggaatacagaccgaaagacctaagtggtctcggcgcactggaccttcaacgttttgctcgagcactaagctctgcgctggctttggtttgaattggtggcgctagacaaacctttggtgcagcatgccggtgccttgcaaattgcaatgagaaatactacaaggctatgtttaatgcggcaatggaaatcagggtcagcacgacaacaagacgatcttcttgaacgacaaatggttgaatggccaaatcccgtggtccattgcaccgaatatctacgcgtctcaagaaggaagaacatatcagttaactaggctatttcaaacaacaattgggtaggtgacctcctgtctatgcactatgccacggcccagcattttcaacaatttgtcaagctccggatgcaaatccaaacaatcgacctgctgccaaacaccgaagactgcatcaagtggaggttcactgagcacggccaatactcgtccaaatcagcctacatgatacagttcaaaggagcaataaaaatagttttttaagaacatcatatgggacacatgggcaccatcgaagtgcaaattcttcgcctagctaatcatacaaaatattgtttggatggctgacagattacaagcgcgccaatggcccaaccaatggttctgcccactatgctgagctacaccagaatatgtagttcaccttctgatccattgcagattgacaagaagaatttgggactcagtcgcagcaactcagtacaagattggtggaacctcctcctcaccttactgaacgcgccaatgtagcccataaaatccctaatcatccacatctcttgggagctttggaaggaaaaaaaaactccaaagtgttcatggagcttgcaaacacaccaatgagcatcctggcaaaaatcaaggaagaggccacactgggtagcggtaggggtgaaaagcttatctgagttctgtcctctaggagagtagaactcagagttggtccgggataaccgaaactcccaccccttgaggtaaataatgaggtgaaaaattaatgtaggttattccttgatgaaaaaaggcaacagtgcagacaacaaagtcattcctgatgacactgggcgacttcctccacctcgctgcatcaccactctagctcgtccttcccaaatggtgacatgcaagtgatggcgccgcatagtcaccaacgccaacttcctatgttgctttgatcaccccgtccgtggaaggttggcaagtactaccatcactgcctccgatagtcatgtcctaacaactaccatagccgcaccttttgtccgttttacctcaccgctagaaatgattggcctcgatgcaaactacttcttccttgatttcatataacaccccgatgttcggaccgttaaaaactattttaataaaaaaatctattttcaaacattttggttgtttaaatgttattaaggacataagcaccaaaagattttagttgaatccttccttgcgaccattaaaattccccgtccaaaaatccctatcaaaatttcaatcataggatttgaatttctcaattcgaaattactccaaagttcttccaaaatttgggccagcagtataatgacgctagggcaaccggccgctccctcacttctcttgctaccacctctctctgttgtcctctttcgctacccaccacatataaatccgtggtcatcccctcttcttctccaacctcagcccacagcgccgtgcttcaaccctgagctcgccgccaccgcaagggcagactaccactatgggacgcgcttaggctaggccgggcagcccacgggccttcctggccgggcagcccacgggccttttctcctttttcattcctccgatgtccattttacccacctccgacctgaccgtacctgtcatcctctaaatcaaatccaaattattttttcgaaagtcttaattttctataatcccaaaaatgtttttgatttctaagctccatatctttccatctgtagctccgattaatccaattcaagtctcaatttttcttgaaattgagatctatctatcgacgagctatactcgacaatggtatttatagagtatggggtcgtttgtacctagatatacacaagattataataaggagaccaatggaagaacaatgatttatattgatttgggttctcaggatgagtaacaactctactcaagtttatatgtgtatcttgaaaaaaaacaccgtaccatacggattacaaaggggagcaagttagataatctaacctgccgatttggatatgccgagtacgtctcgatgagttggtatcgacaactaaggctctgactcttccagattatctctcaatgtggctttgactatggcttgtgattcgatgtttctcctccccacaacgggccttgtatttgtacggatgtcttctccaagtagaatatgggctgaacaaaaccttgtattctttgggttgaactccaatgtcttttattcccacgaaaacagtttctttcctgactcaccttattaccatacttgaatatacatttccgtatatcacgagaatccatatatgagaggtatgtcttacctgtaacactaactctatctaatactattagttattaataatactacatccgtatcatattataagttgttttgacttctttaagattgactaaatttataaaaaaaattagtaatatctataatacctaaatagttttataaaactaacatttaatatattttaataatatgtttgttttgttttaaaaatggacatatatttttctataaacttgattaaattttaaaagtttgagaaaaaaattaaagtgacttataatataaaacggagggagtagtattttatttttaagttattttggttctctctttttcgtgcgtactcaaacattgacgtacggagattagttccgacgcgaatattcgaagattttgaagatgaagaccgaggcatgtcactctttgattacattgcttccagattatagaatgtttttgcaaaatggtatggctaatgtgaacgataaacctgaccggtcgcttgacgggccaagaacacttttcgacctaaggcatcaatattccgccagcaatattattgcgcttgaaacatcatgcaacgcaaagtgaatgcatgcaactgtcgaaacagttttggaccagccagaatcaatccacatctcatcagcatcgtctcctcccactaatctgatcagcatccgtagcctgcaaagcccgcggccatggcaactcgcaggggtaagccaccccggcatacttgttcctctcatgccaccgctccaccgccatcgtctccagctcgacggagaagagccaagtgtcctccaccggcggcgtcagcagcacatacgccgcgctcgccgcgacaacgatggcttctccgttctgctcctggaagtacccctcgtcgtaccctggcaggccccgtgccgccgccggcaaccaaacccgcttctcgagcacccactcgccgtcgccgtcgagctgcgcgaacaccttgaggtcgttgtttatcacacggaccacgcgcatggcgacgccgtcgccgccggcgatgatccggaacgtccgcttgtcgtagctctcgcggacgttctccgggaacgtcacgagggagaatcccgcggtggtctcgtcgaggacgagcatgtcgccgccttcgtcgccctcgatttcccagtagacgcggccatttgcacgccccacgaagctcgtggcgtcgagccttacatgctctagtgtgacgtcgccaccggcggctgtgctgtgcggtaggcgccagccgccgccgccgctgccggaggtgaacgtgcaggccaatgtctcgctgagagggagaatatagttcagcaggtaacgatcgtagagtgcgcagatgaccttgaagttggacatgccgatgcggccgccgtcgccgtcgccgtcgaggaggaagacgccgaggcactggtaaccgctgaggtcgggaggacagaggataccctggtggcaccgcgtcaggggctcgcagacgacgatgtcggggaaggtgaagcagtggcgccgcgccggtgagccgtcgccggtgcgttgcttcatcttggtgaggaggagaaggccgccgcgggagtcggcgagctcccaggagtagccgctctcgcagtccgggaggaaatcgagggaggagaaccggcggcgatcggtgtcggcgagctcgtcggaggggacgaagacgaagctcctgccaccatcagggaatgcccccggcgccgcctgcctgtcgtacgcgtcgtcgacggtgtggtagtgcccggcgacgtggtgggtcgcgccgtggagtgagcggaaggcgtcgaggaagccggcggcggtgacaacgcggcgccaccgcttgcacgcgtacgccgcgcggacgaggcaggcggaggagccgaggcagaggaggatgtcctggaggaggtggtcggggacgtcgtccacggtcgtcgtcgtcgtcccgccgtcgacgaccttgggtgggtcgaccggcggcttcctccgcgccttgttaagcttgccccctcgccgaccgcggcggcgcgtctccgtcggcgtcgcgtctccgtcggcgtcgccatgggcagtggcaccaggtgtgtgaagacgtgacgtgactgtgtgttagggtcacgcgcgagagagattagtactaagcccacggccacgatctcggtcagcttgtttgactgacgacgcgttttttccttattaagagcgtgtgtagtgtaagcgtggggcgcgcggcaagtacgtcgcgtaaaaagctgactccatatgcgcgtggatagctgcttcgtccgctagaatatctggaaaatgggctgcacatgtattgcatggttgaacgtgcgggtgacgaggaaagcgtacgtgggtcattgtcgaatatgcttcgcatgccactaattaagctcgaatttgattaactgaatcttttcttcttgaaactgattgtgtgtctagctagacggattggcttagaaaatttgggcactactttaaaacaatcatttttgccgtcggacaaatcagttataacacgaggctaatccccgcgaaaatagtgtattttcgtaggtcgcctaagaaagtatttacaaagcgcaaaaaaaaaacctaacaaattcaaaaattccatattcgagcatattcaaatgcccccgatccattcaacaaatttattcatcaaattcatcaaatatcacacaaagcaaaaaaaatttcgcccggtcgaagccgccggcgcagcctgagagccaccacccaacctaccaaagccgctgctagttgaagtcgaagccgctttcgagaacggcctgaggcgtcggtgatggacccgctcacctgagactgctgggtggtggatccatgtgccccaagctagctagcggcggatccaaccgttgtcgtcgtcgcggccgacggtggatccaggcgctgttgccatcgtcgtcgcggccgtcattgttgtcccggccagcggccgatccatgcgcccaaggctagttggtggcggatccagatttttgtcgtcgtcacggtcggcagtggattcatgcactgtcgccaccgtcgtcgtcacggccagcgatagatctacgcaccgtcgccgtggctatcattgtcaccgcctgagggaaaagaggaaggccggatgagttggtgaggggacagggatggaggtggaggagaagaggagatggaggaggatttggccactgttgtaagctcaattctggccataagtgattgcacatatttagtagtagttctgcctagcttcttctctaatgtcaaagggttcaaaagagcatcgattttataacataaatgcatgcatcccttgcatgattttcaaatgattttaaaattttcaaacaaaattttgttgcagaggtcataatatcatcatatagctctcttcatgaacatacaacactaaatccaatctacacattcaagaaaagcaagggccatgtttatatcatcttacaagattaaagggtattattccaatcaatagacacagatgttagggcaacgaccatatatatccaaatcttctacaattcacggtgcaagcgcttaaggtaggtggccacggaagctcacacggatacgcaacacttgcgtacttgcattccgtcacctccatggtctcaaggtcgatggagaccatccatgtcgtcttctcctccaccggcgtcacaacagcacacgacgtgctcaccgtgacgatgtccactccgccgcaaaaacagctctccttgtagccttgtagcctacgagtagcctccaccaaatggaggctcttctcaagaaccaactcatcagtgtcgcacaaccatgtcacaacacggagagtctctccctctaagacgacgacgcgcacgttgtgacggtcgccattgccgtcgacgatagctcgcagctctgaccctcgcacacccgctggcgtgcgtaaaatgtggggatcaatcccattctcatcgagaattagcagtgacccttcgtcttccttgatcgcccagaatatcgagcccccagcatggccaagaaaacgaagggaatccctatcatggagatggataccgggtctggttctgagatgcgtgacgacgacgtaccactcgaaaagcttgggtacctcatcatcttcgtcgggcttcatgtgccgggtccaatcccacatgtcctccatgtactcgcaaacagtaatcgtgccaacatctccggacacaccgaagtatggctggtacaccacgcatgtcaccttgaaattggacatggagaagctgccgttgcggtcgaagtcgaggaggaacacgccgacgcagtggtggtacttcatcacctccatgcgagggatcaccttgtgccgccgtgtgaccggctcgcagacgacgaggtcggggaagcagcggcgcatccagttggatttctttttcttggcgaggaggaggaggctgccacggctatcgacgatctcccaccgcgagccgccaccggggaggaagtcgagggagaagcggcggcggcggcggccggtggtgagaaactccggcgaggtggggacgaacgcgacgctgctgcagcagcctctgggtttgggagtagtgaaggatggtggatggagacggtggtggtagtggcccacgatctgatgcggtggtatgtcgtagtcgaggacgaagctctgttgggtgatgactcggcgccaccgctggcatgtcgccgcggcgcggacgagcgagagagacgaatcgaggttttggaggatgagctccaggagcttgtcggggacgtcgtgcagcgtcgtcggcggtggcctgccattgccggacgctgttgttgaccccttggtcgtcggcctcgccgtcgccggtgctttgctgctgttgtttgtactgcagcaaggagctttctcctttgccatgtataggaggagatcagtactgtactagctacactactggatgttcagatcgatatctaccatggattggctatatgtatatataggttgtaattaagtagccacacgtttgctatcttgtcctacaattaattaaactaatgtttttggtgtgtgatttcgcacatgctagagtagggaagagttccctccaagtagtttcgctagctgctgagttcacattgttttttgtttcaaaagagaagacccagcattgctggtggtgttatattagaattttgcatactttagctagtcagcaaacacgctttatggcaaagacatgtgcctgcatgcgtgactgagtcgtgagtccataggagaaaaaaaggagctgctttctaaaagctagcgagacaagtggagaagaacttatcttatcttctcggcgagaaaatcaagcatatgttcttccgacaagcatctgtacatattaagaacatttcactgtacaggagtattattggagcgctaattttctgagtcgcctgcaaatcaggcgtccgatttttttctcaaaaattggacgctgtgtcactaagtagactgaaaatatttcgctaaatagatcgaaaatgtttcaatcttttaaaaagctgaaacacaacaaaatcacctcataaaacattttgctacaacatatgaaacaacggtttccacaaaatcgggcgttgtttcaccatatataaaaataatattttagcaaatagagaaataatgtttcaattcttaaaaaaaaaagtgaaatacaattagatcgctagatgaaacaatttggtttaacatatgcaaaatgattttaagccattgcaactcttaaaccatctgcatcaacaaaccacgtgtcaatcaagataaaattattaagacagtatcaaaaatctacagcaatttttggtacatacataatgaaacatcatgagtacactagctgaaacattgttggtggaaaaaaaataaaacggattctcctaatagggcgtttccgtaatatgcaggtgatttgctgcaaagcgtgcgtggtgggggtggcgcgtgaggcgtgggagccgcgggagtccgattttttctccccacccccccatcgggcgcccgatggggaggattttccctaattttcttagtcacgaacttaggttatatacatgtgacctaattaagtttatgtgtcgaatttggtaatatttactgaccggtgtttgatgaagccattggagcaagcagtgtaagtaccacacttgataagcttaagtcggcaattaggcctaccaaaagttgtaggaaacaccctccacagtgtatttggctttaaatagagtttttttactgacaataaattttatgattcaactcatgcttttattcatttctgccccaatgctgagaacaattaataatcgcacccccatccccacctatcaacaactcattcgtactttccccatctccaccactccaccgagccaactgatcttctcttctcccactacaactatgccgcatagtcacccaaccgatgagaaacacgactcgtctacctcatcgatggtcgtggccagtgtcgtgcatccttccctttgcagctccttctcttcctcaacagccaattgcctttccccatccacacacgcaaacctgggggtggcgcgaccggcgagctccgacatgcacaaatcaaagccatctctccctctcatgatgacgaggaagtagagaggacgacgaggtgaagaagaagaatgaggggtcgacgtcctcacggttcgtgctgacgatctcgagctcccctcctcatcagcggtctcgagcttcagacccggtgacgattgaggggtcgtgagctcgacagaaactactcgaccacgagtctggcagtggtgcggcatagagctaggggctttctccctggctgccgagacgagctctctttcctccctctcccatggttgcacggggcatgaccattgttggatttagtcccacatcgttaattgatgatgggggagcacgacttaaaaggggggggcaatacttacccatcagactaatcttttgagttgtgtattcccaggagctaaatttgtggctccggttgagcctgtggtggagcaggcccagttgtgacatgggtggcccaccaacaagtggtatcagagcccaagattggaatccggaacaattttcatgggtcacatggtggggagcccaggtaagtcttcggggtcaaatggttaatggtttgatgtgatgcgggaggttgttgggcccgatgtgtgataggggagattattgggtttagtctcacatcggtaattgatgatgggggtgcagtactcacccatcaaactagtttttgagttgtgtaggcccaagacctaaagttgtggctccgattgggcatgtggtagagcaggcccagttgtgacttgggtgtggcccatggttggtggcccggattgcgcactgtaacagctagtgtgggccggtaccgacgatgctgacaaattcttttgaggtacgagtgtctaagtttggatccgcgttcttcatttggtcatgagagagacatatatatacgtgactagaaggcacgcagcggagtgtgcttaacatcctgagctcgccgagtcacggccttgcaggagcatatctcccaatcgctgggccctattggcactagtctatttaaccactgatctagttgtgggccaatatcatagctgagaagtaagcttcccggccttctttctcgacgttgagcgttaccgctgttcatcttcgtccccaacaaaagccgcaatgacatttctccccatggttttgctatgtagttgaactattttcggtaaaaattggagggtaggctagagcctgatggagcctacctgctagaatcgccattgctttcgagtgtagaaggtggtcagaagggtgcgtttggatccaaggctagcaggggcctagcctggccaggccagtcgtttgaaatcagaaaaaaatcctagcctgtgggggcgagctagcccataggagcgagaaaaggctggctcacaagggagagctgaactatagggcttatagatccggtcaatttgcaatcatcctcctccccttgctgaactctcaggcatcctcatcatctgcagtaatcccgtgcccttatataaatgtagtagagcctccagtctccacgtagtaaatcggagagcaaggccaactcgatttgaggagagcttgttcttgcagaagattgctgctggacacaagattgctcgtggtgagaacagagaagctcccagatttgatttcttccaccggcggcgcctcgtctatctagatttgcaggtacgaggacttttttcttttattaaatctctccatattcctgtaatgtggtttggcagccccaggttgttgaggaaatgttgcgatatgtaacgccccgattttcgttcgggattaaaaaaaaatcatttaataatgcattttctagaaattaaataaaagttaaaccaatttaatcaagtggaattatggaggaaattaaaatttcctttaaaaatcattggccaggaatattctgtaatattctttgtgccctaatgtactctctagaattttccgtgaattttcggagctcaagaaataattttaaaagcacaaagttcattttaaccaattaaaaaaaaagaaaaaaaataaaatcccctcccctcccttttaggcttggcccaaaccttcccctcctctcccgtgggccgcgcgcctcctccctctctcggccggcccgtgccttgcgaaagtctgctttacgtcccccggtttccctcctctctctccatccggccgacaggtgggaccgtggaccccacctgtcagctcctccacctacctctcgccggccaaccccaaccgccattgccggccacgtcctgccaaatccggcgccctcccgctcgcgccttcgcgcccaaaccaagtaaaataggttcctcaccacctcctccaccaaatccctcacttttccccaatttttggcgctaaatcgagcccccacttcgcccacgatgtcgcccacgtcgccggccgttgccgcctcaaatccgccacgtccggccacgatttctcctccccaatcctataaaaacgatccccggagcatcctctctcttttcccctcctcacctgagcccgccgcgctctctctcgccctccccatgccgctcccgcgcgccgccgctcggcgtcgacttccagccgtgcgccgccgccgctccagacgccgccgcgttgcgccgccaccaccgttagcctcgttgtcctgagctccatcccggcatccactttatttccccgaaccaccgccgtgatgccgtgcccgcgcgcaacccgagctgccgtcgcttttgccgcctctggccgcctcttgctgcagcgcccaggccagccgtgcctcgtccgctgctcggtcgtcgtcttccgccgctccaacccatcctctaagttcgccggtgagctctacctcttgtcgtcgccatcggccttcatttccagtcaccccgcatcggtcctcccctccctaactccctcttctccttttgaaggtcaagggcgaccccgtccgccctccgtcctcgcaagctgtagacccccgatttcggaaatcggaaatcttctgtgtttatccgtaccaatccctggatctgtagttggtacacacatacatagttggatcacaacatatcatgagtgaatttaggctaaaagagataaatacttacattagggccaggtaggccaacaactatcagagaacaacagcagaaaacaaaataatataagggcccggttaacatgccacaggcagtcgactagggaacgagacttagaacaagaccgcactctgatcatcttgtgggatacgcaagcgtacctacaagggcttctcttcaacactctcctaaaagatatataaatagcaagggtgagtaccaaccgtacttagcaagccaccacaacaacaatgcatatgatagaggatatttcaaggaatggcttcaggttcttctacataaagctaattttacatttcttttcacaaacctaaaatctagcatagactgatcaaattttagtaccagtgttcactttaaataacgacggttctgtccaccatctattgtgatccaaaggatagcttcccgccattgaatcatcgtggttttctaaggatgtccaccttccctcctctcgggaagtggctccatcagcataaaattcatcatgcaatatcccatcccccacaagttaagaatttagagtgtagccaagtgtaatacatgtcccggtgctcaataaccgcgagcacggctattcgaatagatttggtttactcacactgcagtggatgtacactttacccgcactccgcgactgcccaacacatgagcctcgtcccaacacatgagacgcgtcacggcaaagcttttcgataacctcgcattggcagtacccgctccatgaacttaaatcctcatgcactctaggcgtccatgtttctagcagtgagaggagttctggcgctcccaggaaagagaagtctcacacgcatattaaattatggttcaagttaagttctctctctcacacactcatggcagtcctaccaatggcgacaccgatgtagggcacgcttctcggccctacctcaacggctgtcccatcgtagcgcacctgcctcactcaggggtgaaccatctatgcagggatactgcctccgctcggctatctaatccgctaggtctatacctattcgagaagtacggttgtacgggggtcgtttcatgcttaacttcatggcccagtccttaattgaccggggacggtactagccttttccagataccacccaaatcctccgtccgccccagtcgaaaacagttgtttaattttatttctcctttcacaaatcatgtcatcaacatcatggcaatgtggcgctcatgtctccacatgccgcatctcaattaccttcccaaaggtaattgcccaagcatatagcatttgataaatatgagtatgcatgattctagaatagcatttctaagcaattgtcatagttgactagggactcatacgtaaacatggttacaaagatttaagggtaaacaataatcaaggcatggcataatcacaagtaggatgttcattattgcatgcaattttatttgtaaacaaaacaatttcgcaattgggatcaacatgttcaaggaatagtgatgacttgccttgctcaggatagtccttattcttgatataattcttgatcaaccttcacctcctggaagttgctgacgttgcctcacgactaaccgatatacacaagtctataatacgcgagaaaaaccaatattcaagcaacaatcaaatatgcacaaacaaaatatatttgttgaggttgaacctaaggttgctcatattattcgcgcttgctaatgggttccaacatgctaagggctaaagtctcttaatctttctgttatcatggtggtctatttaggagctagccaatatagtatgaatgagatacgtatctggctaatttgtggtttagtctagctaatggctatggaaggattatggctacacatgcatctatctaaataaaatggtcgtatactagaggttctgttgtcggatggatttaggatcaatcaaataattacagtgaatcatttgtattatttattttattgatggaagctttactttaattatgaacatattttacttgtcacagtaaattataaaaggttaataattatccatgctttgtatgttagagttgtttaggttaatcatattatggttacagattatcccatcacataattttacaatgagtaatcctaatttacaggttaactataattataattatatgaggtcaagatttataactagtatttatctaatatacatgtttgtcatacactccctcttaatttcatatatgcaacacgcaaattaatactataccgtaccactataatgggatgtatagtatatgtgtaggcaacaatatcttattattggatcatatatttgagtagtttctttttactgtaagctatacaatacatgttgattttaagatggctctgtttggttaactaatggatatcaaccgactctatatatatatattctacttcacatgacattgtatcaactaattttttttaagtggtccaaatacaactagctctgtgattactctcctaaacaagttaaagattcttctatgtgtgtttatattttagttacataatcataaggctatacttgatttaaataacctataagccatggatttaattatatggccatcgaatattaaataagtactagtattttcctatacatccattcatttgagacatcacataaaattagtttgtgtggttgttacagtggcaagacatgttagagacaaatattattacatccactctactgtacaatactaattttatttattagcatatttttaagttgactattatgcatcatcttgatattaattatttaatatttataaatatattttatcaaatagtgaattatatatcattggaaagcttatgaatttagatgaatttaggttcaagtttcactcaaatcggagctgaaatgaataagttatgctagtgtaaagattcaaatttgaattaattctaataattgcgaaatggtactgctcctaattcatttatttataacacaaccttatccacaagctatagtgactgacaggtggggtcaaggtcttgattttcttttctacagaattatttttctaagggaaattggatggaattaatgataggtggggcccactctaacctctctcccccattctcttttctctctctcttctctgttttctctcttctctccctcccggcttcttctccctcctctctctctcggctctctggcgacaacgaccgagcaaggggaggaggcggcggcttaccgacgacggcggcggcgacggcggcacgatgacagcgacggcgcggcggcacgaaggcggcggtgcggcggcgccagggcggcgcaacggcggcgcacggcgtggcggcacgaaggcggcggcgcggcgtggtggaggggaagggggaaaaaggaggggaaggaggggggagtggtgtgggatggaagggcgaccgggggagggatttatagggcgcggggaggggtggccggctttaaacaacgacggaacggcgtggcgacgtggggcttggggcgacggcgacgcgcggcgacgggacggcgcagcgcgacggcgacagtgcgcggcgcgggtggggctcgaggcgctgatggcgacagcggtgacgcgatgacgcggtagcagcacggggctcggggcgcggcggcggctcgtggcttggtggcgcggcaacggcgcagggcgacggcgacaggatggcgggtgacgcaacggcgcagggcgacgggcgacgcgatgacgacggcggagcgtcgacgggacggcgacgcggcgacgggacggcgtggcgcggcacggggctcggcgcgcggcgatggcgacagggcagtgcggggctcgagacgacggcgacacgacggacgcgacgcgcgggcgcaggacggcgtgacagcggcggcgcgcggcgcgaggcaatgacggcgacggcgcgcggcgcggcagcggcgacgcgacgggcaggcggcgctgcgcggggcgcgaggtggtgtgtgcgcggcgcgaggcgccggggcacggctgcgaagccgacgcaacggcgatggcgacggcgcgcggcgcggcgatgatgtcgatgcgacggcgacgacgacggcacgcgcggaggacggatgtgaccgacgacagcgatggcgcgcggcggtatggagacggcgcggcgacggtgacatgacgcggtggcgcggcagggcgactgcggtgacaagacggcgcacggcggcgcggggcgcaaggcagcggcgcagcagagggcggcagcggcgtggcgcgcgcaggggcggcgcggggagcgagggggagcacggcagaggaggggtggtggttagggaaccaaatcaaacacctagagggctaatgaacagtgctagccaactgtttttgattttatagggtattttgcaattaggaaaaatatactattgccactaattttgtcacaatgtaaaatacaccaagcctaagttaatccatcgaaatttgtattcaaatttaatattgaacatatttttatttttattatatatttttctaagtattcctatttttagggctttggtttatttataaattgagaaaagttgcaaattaaatttgtatttactcctaagcagttgagtgactatattaagtgctcaaatgtgaattttcccaaaatttaatatggtccaatatttaatatatatcctagatttttataatttcctatatttggggattttggtatttatctgttttgacacatattggtttatctttttggattggttttaccactacatggatttctataatttagcatttgtgattcaattcaatctatataatatctaattaattttcccagtaaaactattctatagatagagtttcatttatttgaatgattatcatttcctaagtgtttatatttcatggcacgcatcacatggttcaagtattcaatatttgatccataaattaaattggtaattaaccttccctttgtctggctttgttttctcgtgcgtaaatatttatggggttcataataaatattttattattataattattacttagctgtataactttagtttaattttccattgtgacaatttatagtttggcaagtaaaagcaaccataacatccagcatgatgcaaaaagtgttaaaaagttcaaaattttagtaatttttattgttgagaattttcaggatgttacacaagccgccatcgggcaatcgtcgtcgccgtcatcttcctccgcgccggccgccgcttccggtgaggacctctcctcccttcccttttttttcccgtccccctttcttgccgaccgccgcctcttggggtgcgtcgccgtccccgtgcgcggcgttgtcctccgaccgcccgccgccattccacgtcgccggctgctgccgccggtggccgcatgccgccgccgcgccttggctcggccggaccggcttcgtgccacgcctgtgcccctggctgccgctcccctcggccgcccgatcggctcaggctgatctgggccgtccacgtggtggacgcgcacccgacgccacgtgtggaccatgtccaccgtgcgccctcccgctttgactcgctgacgtgtggggcccgcgtgtcggcgccggccgccccttgctgacgtcagcgaggtccatttcctttgtaaaaataaataataattgcgcaataaatcgagtttaattcttaaaattcatttaaatggctcaaaacttctaaaattcatatctaattcatacgaactccaaattgggccattcaatttgcaaaattcatctaaaattgatctctacatgtttgtttaatttttatgtactattcccttggtttttattagagtttttccttgttttgcgtgccagcgtgtagttcccgtcgtttcggaagtccgcggtcgcgaggaaaagagttcggaagatcaaagtgaagaagcaaggcaagtcacacattccccttgagcatgttgatcccaatttacaaatgttttactatttgcaaataaatatgcatattttgctaattacatggggtcagggttttacctatctgctcgcttgtgccatatttacttgatatatgtcctttgtcaacattgggtaataaatcgactagcttaggttacttatgtgacctagctagaactatatgcttagccatgcttaattaccactagctcagttgatgggataattaccgtattagaccttttagtatcagaataagctgcgtgctcgagacatctggccatgcttcatggtcataattatccaactaaaatgtgactgaatggtgggctgtgggtgcatggttttgctggtcgcacccatggcagttaaggaccggttcgtgggatgccctaaaagaacttattgtacttaccacaagccagcgtgggcaacggctcggttgtagtgtagctttcctctagtcgacacatctaggcaagggtgggcgtgatggagcggggcgggccctgcgacggcctctgtcgctttcggattcacctaggcacgagcggggactacccgttgcccgctggggacgggggtgaaacctgaggtgtggtgtgcttggctagagggggttatgcgaagggtcctgtcacggcctctttccggtatgtcgtggtggcatgtcggcgcacggaaacgtgtcgtggggctgggtcttgtgggtacagttgtacacctctgatcagagtaaaactatt

SEQ ID NO: 16014 - DNA, 11689 bp, Oryza sativa
tcaacattgggtaataaatcgactagcttaggttacttatgtgacctagctagaactatatgcttagccatgcttaattaccactagctcagttgatgggataattaccgtattagaccttttagtatcagaataagctgcgtgctcgagacatctggccatgcttcatggtcataattatccaactaaaatgtgactgaatggtgggctgtgggtgcatggttttgctggtcgcacccatggcagttaaggaccggttcgcgggatgccctgaaagaacttatcgtacttaccacaagccagcgtgggcaacggctcggcttgtagtgtagctttcctctagtcgacacatctaggcaagggtgggcgtgatggagcggggcgggccctgcgacggcctctgtcgctttcggattcacctaggcacgagcggggactacccgttgcccgctggggacgggggtgaaacctgaggtgtggtgtgcttggctagagggggttatgcgaagggtcctgtcacggcctctttccggtatgtcgtggtggcatgtcggcgcacggaaacgtgtcgtggggctgtgtcttgtgggtacagttgtacacctctgatcagagtaaaactattcgaatagccgagcccgcggttatgggcggtcgaccagattcaccgtgattagtcccatcttaataaatcgacccaatacactgtagttcaggtgggttggttgggcctgttcaacgtggtgtagcgttgatcagtggagatttaatgttactttaattactcaacagttttactgttttgctcaataaaatgttttacaaccgcctttatgcaaatagccacaaaccatccttgtatccccttgcagatctgcatcgttggtgtggcttgctgagtacaatggttgtactcagtcttgcttttattccctcttttcagaagtgtagtgcttctaagctgaagatggagttagaggaccaaggctcagaccccagttgagttttgcctgtggagtggagctgaagccccgctagaatcgcccttttccgctgctgtcgttctgtttcggtgtgaggactaaatgcctcttccgtaagtattttacgctttatttacgtttggaactgtatattacttgtcgttttgtgtaccctggctggtcctggacagggatttaatacgcaaaatagtctggaaatttgggttaaatttctgggcgtgacacgatactacaaggagaggatactggctgatggaagacaacttgtatttcaagaagtctatcatgaggaatgtgcaaagcaaattaatggcaagtatcacacaaacttcacaagtcgacaagtttatcacatgtttcacaagttgaaggctcagtggaaggtgattatggaggcaaagaatttgagcgggccgtgcaactttgatgatgttgagaaaaaaatcctatatgatgagactgaagttgttcgaatgactaatgttagtgttctaactattctttccttgcaaataactatcgtgtttacactatatggatgtctatgtttctgacatttttcttgtcatgtgtaggccaaagataaaatggctaaattcattaacgtccccatacgttggtatgatgaaatggagtttattttttaagacaagcatgcaacgggggaatttaatgttctgtaaacaccatatgaccattcaatgactgaagatgatgattttattggtgataaaaatggcagtcctggtgatgttgactcttcatgaaattatgactcagattatcttccagatcaagagaacaatactggaagtagctcatcttctaggcttgtaaaaggtagaaaaactgataaaggtaaaagagtcagagctgatgataatgtggtttatgagataacaggggctatggataatatgtctgaaaccatgcgtttcacacatatgacacatccaaatgaatccctattcaagataattgatgagatgacggaatactctgtcatggttcgacttgagctgcagacttatctcgcgaccatgagaatatagctgccatattgaagggtaggccactggattctattaaggaatatgtggtccaatcgataatacaaaactatccggctgctatgtaatttctttgctaagatgcttgaatattactatgtattcaagctaaatagtttaagaatgacacgtgcagtttagatattatttaaataattgatatgctttggtttgaacttgaaataaaatagttcaaaaacatatttgattgtttcaaggaattcttttagcatatagctttgccctttttactacttctatccgtaatatttttgtggccaagttaactgtggaagaatctgtagtgttcttgtgacaaagccatcagttaacaaaatttgatctgtgtgcaatattattttgctcaatatgaaaagaagcggcgcaaaatactctgaagaaccaaacggctagccactaattcttgccatagaaagcaaaccaaccaaacaaagggtatatgcatggcaagcccctggcaagctggcaacgagttggcttgcccttacccagctaggctaggtgggcaatggaaccaaacaaacccttaagtttctataggtggctaagctagctgccatcaaccgtaggccagcgaaaatacacaattttcacaactgggctttcattcaaccgctattgaaagttgattttcctaggcggctaggtcaagccgacccgctagctgctgcaagtttgttctaggccagtgagcaaatgtcctgacacgttcaagatgtcactccgcctgaggtcagctgtacaaatattaaatatacgtcacctccacacggagtgcagccgatgaatcgatcgtgcacgaacagttgatatcaaaccaaacaatgtcattccatatcatcgtccaacgccaagttgccaagtcgttgttctcatcgatatctgccgcccgcgtgcaaagcccgcagcaaaggcaactcgtacgggtaagccacccccgcgtacttgttcctctcatggtggcgctccaccgtcatcgtctccagctcgacggagaagagccacgtcttctccaccgacggcgtcaggagcacgtacgccgcgtccgccgcgacgatcatggcttcgttctgctcgaagtacctctcctcgtgccccggcaatccccgcgtcgcctccggcaaccgcaccagcttctccagcacccactcaacgccgctacccgccagctgcgtgaacaccttgaggtcgttgcctatcacgcggagaacacgcatggcgccgtcgccgccggcgatgatccggaacgtcgtcatgtggtagttctcccggatgatgtccgggaacgtcaccagcgagaactccgtggtggtctcgtcgaggacgagcatggcgccgtcgtcttcgtcgtcgtcgtcgtcgattccccagtagaagcagccaccggcgcgccccacgaagctcatggcgttgaaccttgctgtgagctggatgtcatccgcgacggcgctcttcggtagccgccacccgccgccatgtctgcctgacgagaacacgcaggcggattgcacgccaatgtgccgattgtttaaccagtagagatcgtagagcgcgcagaggaccctgaagttggacaggctgatgtcaccgccgccgtcatcgccgccgtcgagcaagaagacgccgatgcatcgatatccagtgaagtcggccggacaaaggataccctggtagcgccgcgtcaggggctcgcagacgatgaggtcagtgaagaagaagtcgccttctgctgcatagccgctgcgtgtgtgtgtcctcctcttcttggagaggagcagtaggccgccgcggctgtcggcgagctcccaggagaagtcgtcgctcgccgggagaaaatctagcgagaaccacaggcggccgtcgacgccggcgagcgatgacgaggacgggacgaagacggagctctcgccgccgggcagcgccggcgcgtagtaggcgtcgacggtgtggtagtacccggcgacgcggtggtggtgcgcgccgtggagcgcgcggaaggcgtcgaggaagcccgcggcagtgacgacgcggcgccaccgcttgcacgcgtacgccgcgcggacgaggcaggcggaggaggggccgaggcggaggaggatgtcctcgaggaggtggtcggggacgtcgtccacggacgtcgccgcggcggggacggccttcgccttcctcggcgcgctgccgcagttactagccttgtccgcgcgccggccgccgcggcgcgccatgggaaagaatcgaatcagccggtgtgtgaaattaacggtgatgtgaaattttgattgtgaggttggtgagcgcgcgatttgaagctgccaaccacgatcactgctggctattgacttggtcggcccatctctgagcgtggcgcgcccgccaagtctatagctgcctgcgcgtgggcaccaaatggtcaagttcagatgtacaaatatacacaattttcaatctgaaagtgtctagatttcaggtgtgatctccgatcacttgcctaaatagaaatttgaacaataagttatttaaacataaacatcaattgaacttatagttcataaaaaatataaaattacatgcaaaagtattcaaacataggtaagaaaaagaattagggtcaaaatgtgctaaaactgcatattacaaagctatacaattctagctggctgaaaatttataaatttacagacgcatgaagtcgttaatttaactagcttggtggcccgcgcaattgcgcggctagcagccatacaaaattatctattttttaatataattttacttaaaatttcttaaacagttatctcattgtcttaaaagtttgaaaaatcaaaccttattatctccgtatttctaattttatagtttttaaaagttatatcagttgttgtcccttgcttctttctcaccctttcttgctcgatctatcactatttctatttattttctttggaacctttacaaattggaccttgtaatttgttgagtttattgtcatgttgggtttcgtttttataatttctagaagtcccgtcaaacgcttccattatactcctctacgatctttccgtcgtctcctctctttattataattgaacataattatcgtttcggttcatttttttctttatagaagtcccgccaaaccgtcaacagttttgccattgtattcatctacggctcgcccgttgccttccctcttgtcattgagaagtcctgccaaccgccgtgaccgtgtcgcttaatggcctgccatcgtccatctttttaattgttattgggattatattcaggattttgttaatagtttctatatgtcccatcgatcgccaccattatactcctttgttaaaagcctcctgcatcttccctctttatcgtcatttgtcattattgtattctagatgaaattttcttttgaaagttccatatttttcgttctgatattttttttgtaaattatatttcggctttgccattggactactctacggttcgcctgttgcctccccacttctcattgagatttttgaatcgaacatgattatcattgtggtttatttttttacttttagaagtcctgccaaacgtcgtgaccgtgctgcttaacgacctgccatcgtccctccttttaattgtcattgggattatatttgggattttgttaatagtttttacatgtcccatcaactgccacacttcactcctttaaaagcctgctgcattttctcttttactgatatttgtcatcgttgtattacagatgaactttttttttgaaatttccatattttcattccgatattttttctttataaattatattcctagttgaactcttataattatttttctgtattcagaatttattttatttgttctgaatttcaattaatctcgtattgtgttatatattgattattcttataatattctttattttttattttctaattcagttgtttcgaaattacattcctacttgaactctcttttttttctaatttcagattttttttatttttaattcagaattttaattaatctcgtattgggtttttatatggactcttctttcaatattgtttagttttaattctgaatttcagttattatttaattgtattcttacttagacttttttttctaatttcagattttatttattttagtttcaaattttaattaatctcatattggattcttatatggactcttctttcaatattgtttatttttaattccgaattttagttattttataattttattcctacttaaactcttcttttattttttttaattttattttttattctgaattttaattaatctcgtattgggtacatatatggacttttcttttaatattgcttatttttaattccgatttctttaaaatttgttcctagttggattctttttccatttcttcgattattgtgagaatttctaactcctgcaaacgaacatggtgttttctttcaaagccgattagtctccccctgttgtatgcatgcggacatgtccgactcataatttgattgctccagtcacctcaagcatccacatgcacgaaaaaatgcatgttgtctgatgcctctaattactttgaattttaccgatataatttaagaaagaataggctagcctcaatcgtatctcttctaagatgttttctatttgcactctgcttattatctttccttttttactttgaatttcagtttatttctaaattatattcctacttaaacttttatttttcttatttttttctattaatgtgagtttttttagatctcataacgaacgacgtgtcttcttttaagcgtgtgaaaaatagaggacattgacgataaaaaaaaagaaaacttgaagaggtaaaaatctggcgatatcattgactttaattggatttcattcaccggtcataatgtgcccgctatttattttatcagttgttgtttgaatacgtgaatacgttatcggcagttgtgctgaacttctgttgattgctttaggatgttgggtaatcaccgtaggattttgttttgattctgttgattgcttttttatgctaggtattaatcagtataggattctgttttaaattccacatcaagctgtgtcatatatcctgctagtattctgtttcaaatttactcgtgtcagttgttagctgccgccgccatacatcaatccgatatctaacatgtaatctgccattgcaatctgataatgtctctgtttctattgcgccataggtgaaacggactattattttccaaaaactcatatggactccatctaaatctgaaccattaaaatttagactgatcacgatctaatggataatatttttctcttttctctgattaacgtgggaatttctaaccccaacgtggtgccttcttttaaagctgttttaataatataatagatagatagatttcttttgctgctaatgtagaaatttctaaggtttcatttattcttcaaaattcttgcaaactcgtacttttttacaaatcgggccactgcaacctagcacatatagagaggactataaagcaagtacatatgtacatatgtacatatgtattatacagcaaaagtgctcgtgcgttgcaccgagtgattacgtagtgtgtactatgaaaaaagtgttgtttggtttagacaactaatctgctaaaaaaatgtttgtttttagataaataatctgctctatatttgtggagtatatatgatgtttagtttggatgaattgtagcatgggagaaaatggatggacgaataatgcaattgtctttgcctaaaacgcgacggacggatgaaaatttgtatcataaacgaaattatttactttttatgtaggtaagtctaataaaacacgacacgagcattgagatggacaaagtaactacgaacgcctcgagcaccatgtcaaatcaaagatttgaatccaggttgactggttccaccacaagaaacctatctagttaaactatactcacttcgtaattgtgagaatatacgtgtgtattgttacctgaagaaaatttgtggagtttaacaaatcgtaaaaaataatcttattaattttgtgaaagtgagtattgtttttatttacaaattgtatttgaggttaaatattaataagtagacatgaaaaaatgaaaaaaaaataaaagaagattagacggagggaaaaaaagagcagacaagggaacaaaaataaaaaataaaaataaattgtatttgttaggatttagtttttatatttcttataaaaattaaaaagttgtaaaaaaaagcccattagactaaaaccgaacgaaaattaaaaacccgcccctataaatctctatatttgtcgggtatatggcatatgtgatgttcttttttcaaatacagagtgctcatttgttttaaaaaataaggctcgtcagattggatccttatccccgaaagagcaagcggagagcgagcggcgcgtcgatccttccgtcttctcgttttatcccacttgccttatttgccaaccaaataattatgtgtatgcatataatcaacatgtagtaagtatcaagattgttgtttgggttatgatcaataattaatttagcacatgaaaaaatataatcacttttagaaaatataaagaaaattagaatatgctatttcttttgtatagatgaagtaataaatagacaataaaaataaaagcaaagcagggaggaaaagatgagagaaaatttataaagcaaagcggtcaggagagggggaacaggaaaaaaaaaagaaaataaaagaaaaagaggcggataagcactcgctctctccgtctctcgtttcttcctcgctctctcagtcaccggccagaaaaaaaggacaaagcaagaggaaaagaagaactccgactgtatccctcctcatctgatctgatagcagtagccagccagccactgtccagaatttttttgagaattaatattatttttatggaaaatcacaaaagtagtggtcaaccggggaaaatcgcgaaagtaggtccctgtcaaacgggtgcagttcgatagggcgcctatcgaacggccagagcgcgactggcgaggagatcggaaggctgccgttcgacaggacctgtcgaacagcccccgttcgacaggcagggctgtcgaactgcccctgttcgacaggatatccgtcgaactggcgcagttcgacagggtcgcgttctccatttatttattttttttaataatatgtaatttattttagtgtgtaagaaaggaaaatatttttgtaatgttatatgtatatgatttagggttttgataatgtttggtcagaaattgtagtatttatttgttggttaaaatatttgaattatttagtttcattatttgtatatttgaatgataatttgtcatcattcattcgaagggtatgctactgagtaattatccgaagaagtttatgaaatagtactgatagtactaagttaatcgtaaagtgtttctcaaatagtacggacagaacagaaatgactaaaagtttaatacaaatagataagtcaaggacgatcagtgcccttcgcacgcttgctaggtcctcccttcttcctacgcctaatctgctcagtgggatatgtcaaattatcaggggggtgcctatctctagctgcctgctgtggtgtcacgtctggcccctgaccggcctccgtctcctgcgtcggctgtgtgacctgaggtgctgcgtgccagtaatccatccctacttccccctagggaggatcagtggaaaagaagtcctcaatgaatgctgtgcgaggggagtaagcaggcattccgtgatgcgtcgacgccgaaccgtactcatcgtctgtttgcacaagagggagaaaccaaaaaatatggcgtagttagtaacgatacatataattagaaactaaagcgtgttattgtttaaaatgacttacatgcgtgctgtgtgtggccctgctctggcgcacgcggagtgatatgaagtccccatgctggtgtgttcaacacgttgtcccccgttggcatgtaagggaagtgtgccgacccagatgctccctgcgaggggtgaacataaggcggagtttggaatacctgcggacgtggtggtgccgtgctcgacgtgggtacccctgatccggctgaccccctggtgtactccggtgctggggtgtgctgaaaggaaggacgaccgtgagatatgtgggccgcttcgtacccgcgacgtgaagaggatggaccactccgatccacgctggaacgtcggggtagtggtggtgatggccgtcggcccgacgtctgcaccacatctgccgcgctccgacaggagacacgacgtagtagtgcggcagcacgtgcacggaagttgcgaaggatgctcgccacgtcgtcaggcctgacgactggaggtctcgcctctagtctttgcagcatggtgtcggactccacgtgaacgtgctcaacaaattccgcctgttccacaaataatcaaggcaattaaaattatttaaccagttgcacatttattaagagtatttaacaagatgcacatttgttagaaataatgaaccagttgcacatcatttataaatactgaactagttccacatttatgtaagaaaaggaactagttgaaccaattgcacatttattagacatactgaactacttgctaactttttaaaaatattgaactagttgctcaaattccacaaataaacacgtaccattgagttgtaagctgatctaggctgaggggcaaacgtgtcagtaatcgctgcctggtgggggacggtgctatctccttgtcgaggaaaacacctccatcgtgtaacactgcggtaccaacgaaggtaagctccataataactcccatcgtctggaggtgtctgaagtgccaagttatcagctgcatgctcccactcttgtaccgtcggctgaaccgtggtcacaataactagctcgtaggaaagcccgagcccctttctggagtacctgcacaacaacaaattcacacatcagaaaaaatgttgtgcagtgatttattttaaaaaatgtaggattagacaactgtgatgtgaactaacctatgaagactatcagccaaaggacgaccatctctcggagggaagtcctgatacatgcccaactgtttgagaaccctgtggacattgtgtggctcgacgtgcacgtccaccacgaggtgacaagtcgtcatccagagttgcatatctcgcgtgcaaagatccgcgagaccgtgcggtgcacgatcattgacatcgtgctgagtgtagggagtccaccgaacacggtcaggcgtaagctgatcaaagtcagctacaaactgagtgtagacacgatgtgtcgtcccgctaacccactgcggctgtaacaagtagtagttttcattagtcatataaggaaggtttgtgaactagtattcataatgataacataaacgaatttaacaaaaaaatacctcacggtgtgtccacaaggatcccatagtgggacgatcgtcgatgtcatcaacaccagacctgtacatctctcg

SEQ ID NO: 16015 - DNA, 5191 bp, Oryza sativa
ccgctgcacgatccactcctcctggtcattagggaagacatcctgtcgaaactgattcaaccaacttttcgtaggcccgtgcccatctgtgagatcctccagtgcaacaggcagcacaccaccaaaactggccagaaggtcatccgcccatccagcattcaccattgttgggccaactgctggcccagctattggcagccccaacaaataagacacatcctgcagagtgggcaccatctctccaactgtgaggtggaaagtgtgggtctcaggcctccatctatccacaagagcactcagaagcgccgcgtcaatgtggatccgttcggaccttgcacgtgaaggctcgaccaaccgtgcaaacgtcaacaacccagctgctctcagtctacaacatgacagagcgcaagttattaatatatgaaaatataaacaccttatattagtaaaaacaatatattttcacacaccttggaacccaacgaggatcaatacgccaatattgatccggtcctcgcatctttagcacattgcagaaagttcctgtactaagacgtcgcgatcgatggttcctatcgatctccttgtctatcagctgcccatcatattgatcagccatacctgcagatcgaaaaccacattagtacaatgcacgtatggtaacagtacagtaaatgtatgcaacataattcaagtaacaaatttgcatgccatttcaatttaaaattacagtaccagcacacatagatacagataagaacagttcagtacatttcaatttaaaattacaagcccaggacacatatattatgatattacaagtgtagtgcagttcgaaatttaaattacaattccaatacaaatacatgacgatattaaaagtgcagtgtagttcaaaatgaaaattacaaggccattacaaatagattcgggtaataaaagtgcaagaaagttcaaattaaaattacagacgcactaaacataaattgaacgataacgatcttcaaagtagagagtccaccaaggataatagtgaactaaggattatttttcttcttcgacttcccctttggaacgcgacgaacatcagcgcctgtggcatcttgccctacattgtacatgctgcaatctttacgggaatggttctccccgcaaagaatgcaagctttcttacgacgagaacgatctttcacttcagcttcatccataaggttcttgatactgcgcgactagcgacgacccttagtatcaactaataaatttgagtcaggaacccaattggcttgccctggaggaggacgagtgaaatcgcacacggcacgccaaccacgcaattcatcacgccaagttgcctcccacgattcctttctaaagtagggagaaacaaaaatgtttccatcaacacccccttttgcggaagcagcaagaacatgggaacatggccgatgtaacaggtaaggcttgttgcaaatgcgtttgtaagcgtgatactctggccataacgtgcattccaatgtgatgtcagtagtcccaatgccgacaccactcttgtcacgaagtcgtatctcaaataacaactctctattcccagcaggccacactctgtggattcctcccttcttacttttctcatccatgtactgtgtaatagcggggctatacttaacactgggtttgctgaggttcagactagccatggaataccttttacagagatacttctgtgtacccctcgtgatgccctccaggatagcaacaagtggtagaggtcgtgtattcttcataacccagttatacacttcagcaagatttgttgtcatcacaccatacctcgatccgtctgtatcgtacaacaacgaccatttctcccttggctcaaattctaccaactccgtgaagcacttcgtggcccttccacgcttcctgcgccgagtaatacttggtgcttcattaggaatgggttcaagtccctccggctcctcctctctggcaactataggttttttcctaacctcttccatgtgtgtagtggtcaaacgatccagttgatcccatatggcatcaaactttctttgttgattctgcttgcataacttcttgaacaggtccatcaatctcttactcctgaattgtctataaaaattagccccaaaatgtcgcatgcaccatcagctatgtaaatctggccatggcacggattgtgtgacatcttcttgaagcttctgtatcgctgatagcaaaccggcgtgtcggtcatacagaacacacacatttggtctgttttcaacaacacacattttaatgtgccgcaaaaaccatagccagcttgatgtgttctcgctttcaacaaatgcaaaagcaacaggaacgacatggctatccgcgtcgactccgatcgctgttagaattgttcctctgtacttgcctgtcatgaaagtgccatcaacacagagcaaaggaatgcaatttctaaaggcctctatcatggacccaaatgaccagaaagcccgacgaagaacattctccccatattcattcacctcatcgagaatagccatgtgtgtacccgggtttcttgcctgcatcacctccaatagtgggtgaagattgtgataagaatcctcataagttccaaacctcatctccaatgctttctgttttgccctccaagccttgtcgtacgatatctcatatccgtattctttctcaacgtcatgcattatggtgaaaggggacaaagatgtttttctaaccacctttgaatataccatttgtgccacaaatgccgctgtcaggtttctgtgcaccagacgggtattctccaacaaacacgtatgttgctcaaccctcgaagctacccataaagtgtcatgttgtggcttgtaaccatgcactctccaaggacatccaccctgtatgcacttcacatcatacgtcgtcctatttgaaaccttcaccctgaactcacgcttctggacaaatgcccacctcttcaccgcatcttgtaagtgacctttttcatgaaacatctgtccaactttcacctgcttactatcataacaccagtgggcatctaaaccatcgtttaccttcatacgactcattgatatggtcgtccaatcatcgggtatgttagtttcgttgtcccacagtgttgtatcttctccttccactacaagcgcaaggtattcctcgttttccactttcatctgatccactaccgcctcattctcctccgctgcatcaacacgcataggcgaatccggttcttcatcgtccgagtcgttggcctcacgattagtaccacgaacaatgacctctccttgtgtattaccctctactacttcttcccctcgaccttgttcagtccgccaaatattttcatcttgtccaccttccaacggagtttcttccaccacggcatgacttgactcccccgattgatcaacacatgttgtcttctgcaccactattaccaggctatagcctttctcccttactttactaacaaacttcctccaactcccagttgacgcaacctccactactctccactgccatccatgttgacccctcactggccacacggcatttatgacaaatttatcgtgcactggatctaccccaaacatattatacaaccaccctaacacgtcgttcaaacccatatgctccggtgcattcagactagtatcatggaaggcatatacagtcaaatccaccccgctatcacatatttgtataggagaatcgccataatacagacgaatgggcatatcacctgacatcctgataaaacatgacaaatagtctcacgtttaatcatttaatcattcgataattaccctattacaacttatactatattgccgtgtactaatttacaactattagtaacaaacaactagtttaataatccaaataaaatataacacctttgtacctattttaacacacaacatatcaataatatgtactaactaagaactaatttaaccgtacaattacttaaatacctctaccaacatttagcaataacaaatatgtgctaaccatacatactaacatcgaacaatgcgaaacaattaacaactcttaaaccaattttttattaaactttcatatgcattgtacttagggattactaatgtataccttaacttcactgctggagggcgttgccaaccctttgctcccggccggcgcctcctcggcctcctctccggcctgctatcccctcccctcgctccctccggcgctcacggcgacgatgtggcgactctcggtggtggctggcgatgtggtcctcaaaacaaatcgaactcgcggcctgggtggacggggctttaaaccggcctgtcgaacgcccattgttcgacagggtcggtggagggccctgtcgaacgcccccggttcgacaggcctcgtggcgccgggtggtgggccctgtcgaactccctccgttcgacaggtgagcgtgtcgaacgccagccgttcgactgggctttgtcgactgcccgtcgttcgataggtgccctatcgaattgcacccgttcgacagggacctactttcgcgattttccccggttggccactacttttgcgattttccataaaaataatattaattctcaaaaaaattccactgtccaccaccttccccatgcatcctcatgccgctgctcggtgtctctggcttgactttgatgaggcgctggatctggccggctggcgagctcctgcgttggtgtgctcgcgagagaaaatgttggatggagtgtgagatctcgggagggagcaggggaggaggaggaggaggaggaggatctatgtcaagcggattggggtggcctcacccctcctcgcctggatcgagccactgccatggccatctccatcgccggctcctctgccgccccggctccaccctccttcctccggcctccctccaccgccaccaagacgcaccgctgaggcgcaccgtgctaccgtcgtgtaccattgtcgcatcagccagcgaggaggctggggtcgccagatctggtggtttgcttttctctcgctctcctctctctcggtcctcttgttcgcttttctctcgctctcctctctctcggagccaaggcgacaggcggcggcgcaaaaagggaggcggcaggcgatgggtggtggcgacgggtggagacagtgc

SEQ ID NO: 16016 - DNA, 13098 bp, Oryza sativa
actccaccggatctggcggtggcgaggtccggccggtcgcccccacgccatacgggccgccgccttgctgccgcgcgcccgcgcccctcgccctcggccacgccacgctagcgccggagagtggagaagcggagtcggagggagacgcagaccggtagcgaatcctgtctcccatcctgtccctcctcaaacgttgttgtccagattggtccctgagcagacgcgcggtgcaagccgtcggcagcggcggcgtggggccgtggggtcagcgtcagcgctcgcctctcccctcgtcatctgcctctcgttggatggcgagctccatggcggcggcccctcggcgtgatggcgacggcgacagtgctcatcctcccttggctcgatggcgactacacttccccaacccccatcggcatgacagcggactacacttcgcgatgagaatgggggagcaacaacggcgctcgtccgttgcggtagtgactccggtgcattctccatccctaaagttttcaatcaaaatcaaaatattgttggagttctatatcttgaataaatattgaatgccttatctacctgattgaatcggactttttattcgcctttctttacggatttttttgttttttattgccttttttacggaattttttcaccgagtcaaattcaatcggactttccttatttttttttgggcgcgtgcacaagtgggacacttgattggacgccggacgaagggagcgatgtgacgacaggaaaaatatgaatatttataataggtatagatatagattattaaaacaaccttgaaataagacaccacgttctcgctgtggaggcgagaaattctcacattaatcggacaaaaagaaaagaaaagttcaagtagaatacagtttagaaatatctgaattcgaaatttaaaataatttaaaataagtaatattcaaaataaaaaataaaattttaggagaaaaaaaattaaaaataagtaatattcaaaataaaaaataaaattaattcctaaaatagaaaaataaaaataagtaatattcaaaataaaaaataaaattaattcctaaaatagaaaaataattataagagttcaaataggaatacactttatagataaaaaattatatataaagaagggagaagtaataagcctgtaaaacaataagatggtcaaccgttgttgggccatctaaaagttgtaaacaaaatcacaagtagaacccccaaggatgattaagagatggaactagacaggacgttgggtggaacgacagacaggacgtcaagcagcatagtcacgttgttggggcatctaaaaattgtaaacaaaatcacaagtagaacccccaaggacgattaagtggtggaaggacagataggatgttaagcagcatagtcacgacggttggcgggacttgtaaattgcaataacaatcatattttatttttaaaatctcaataacaataaacaggggagacaacaggtaggccatacaggagtataacggtgtgaagccgatggcggttggcgggacttctataaattaaaaataaatccttaaaattcaaaataaaaataaaataaatttcaaaaatagaaaaataattatacgagtacaagtatgaatatactttatgtcgatggggatacccgtagaccggatatagagggtattagggtacgctggtacgaggatctacgtagtacgacatcaagcaaacaggaaacaaggattatattggttcaggccccttggtagatgatagccctaattcagttgatatgagattatatgatcgaaaccacagatacaaagggaatagtggaactcgacgataccgacgagatcgtagtcgagttgatccgactagatctcccggtgacttggctccgataagctccggcttcgtaggctgtggtggatgtgttagctctaagattcgatgccttaggtcctcccgagggtcccttttatatcgcaggtcaactgtcttcaagtaggactcggagacgccggaccggacacgacataatgacgacccagttctgaccgagtaggactccttccatttatgtactccatgatgaattaccttaacgtatgccgaaaacttccatatacgcgcgagcataccatatcaatacgtggcgtatatcgaagggtagagggtataccttacccgtaaccctgacactttacaaataagaaaatatcgaaatgaaaaatatggaattttcaaaataaggtccacctagaactcaacgatgatagaaaacaataaataggagagaaacattaggcctgtaaagaagtaaattgttggcagttgatgcgacatctaaaaactataaacaaaactacaaatagaatctcaatgatgattaagaggagagacgatagacaagccgttaaacaacatagtcacgacagttggtggaacttctagaaagtaaaaagtaagtcacaatgacaatcatgttcggtttttaaaatctcaatgataataaaaatacatgagtatagtatggcgaagctggcggcggttgggcggatttaaagtaaaagatgaaccccaacaatagttatatttaatttttaaatcccaacaacaataaatatgggagacaacaggcggatcatggataaatacaatattgacatttgacaacactcctaaaaattataataagggaacctaacgagacaattgagtctaaaaattagaaggtgtattttttaaaggtttaaaggaagatatacaaaagctatgatagattgggtaaacaaataaaagggtgataaaagagtaagaggcaatgactggtgtaacttttaaataaaaatttaaaaaatttaaggatgataaggatcgatcttttaaggttataggacaatataatggctattaacaaattctaagtaatgtcaaataaagaaaaatagataattttatatgggtgctggccgtgcaattgtgcgggacatgcagctagtttaacactaaactgtatgtactacttgctgaaaaattcctacgaacatacgagcacttatgttaagtttaactgagcataccccacatatgtaatgcactacctcttaaccctaatcatagaaaaaaatgaacacccttgctaaagtataagacttagaaccccaataggcatgtttcgccaggaaaagtttagctaaccaaccaagttaatctatcagttcgctaactagctatttactgatagctttgaacatgctatccaaactatcaaacttcatatcccattaatttagctctgcatattatagggcagtcgagatgctctcgttcgttaacaagccagagagtgttgaccttgtagtaatcaaggcacagcctgtctaattcagtataattcgtttgcttggagggcgctccactccagttgttgctatacaattcgtacaatatactccctccatattttaatgtataacgccgttgcctttttaaccaacgtttgaccactcgtcttattcaaaaattttatacaaatataaaaatacttatgtcgtgcttaaagaacatttgatgataaatcaaatcacaataaaataaattataattacataaatttttttaataagacgaaaggtcaaacgtttgtaaaaaagtcaacggcgtcatacattaaaataaaataaaatacgagggagtaatttataataaccaatagctagcacaagaaacttatatataacaagtggtgctacattttacagagacatcgcaggctcgcagccaaaaaaaactagctgtacctccactgcttcccatggccaaggtcgttgttctcacatttgtatacgtggcaatggttaatgtgctactaaaattaataaacagatgaaggatcggagaaatctagatcaacttatttaaaacttcgtgggttacattgaaacggttgaatttcgatagaaattcttttcaatttccataaaattcattaaaactgatcggcggtacctgggccggttgaaagcctacttcccatggtctaggccattaatattctcgtgatactacccaactttctcgaattttttttatttttaatttttttattaaagtatttacaaaactaattttgtgtttcaaaaattgacaaaactagtcgcccgccgccctttgggagggcagtttttaaaatcaacctcccaaagggcgattttcgtgacgtggcagacgaccgttggctcatgccaaacggctggctatatgggacctgccattttgcaggcggccccttaccgcacttagggagggcggtttaacactgtgcggggggcagttcaatgacaatatacgcttcacatatataactatatcaatgataatgtttgtatcgattgttatagctaagacattgttggaggtataccgcgaagggccttcggtcgggcctgccgaaaccgaaaacttgggcgacaggttcaaactggaagcaagcggcgaaggtcgaagagggataccctaagggcgaaagcaatggctcaggaagtacgcgtgcttcgtcggacagggaccccgtcaggaggccacgcaggcgaagatggcgaggcaaaaagcctcggcctgaaggcatgggtttcgccaaggtaccaaaccccaccgtgaggaagcccagcgggccgttgcgaccctggggggattcgccaagatcaatgggccgagccatttagcctaattggggcccatacgtgtgaaggacactgtgtaccctaatcatgtccctatcataagggtaaccatgtaaattcccctgtaaaacctaaaccctagggggagagaacctgtaataacgttataaatagcccttctaggccatgtaatggggggatcctcaaaaaaatttttactaagcaatacaattgccttacttttccaacaactgttgagagaaccacgtctttcagtgtgacgcggttgtctattcgacaacagctggcgccgaccgtggggacctccgagcgaaaccactgagactgagcaaaaccactgatgccaccgaagaaggtcactaaggagaaagttgccaagcggaaggaaggcggaagtgaagtagagatggtagttgaatagggagcagatccttcggcctccgtgggtgaagccggagcagcactgccttcgacagggctgccacctctcccttcttcggcgcccaaaacttcgactgatgcggaagcggcgaaggcggtggcagcggcgaaggcccttcaggttagagacgtggtcttgtcctcccaagtactagggacgccctcagccacggccttcgcccaaccgatttcgacgtcagcagcgatcaccacctcacaagccaacaccgctctcgaagtacaagccgaagctgacatgggggccatgcgtcaaaacatggcaaaacttcaagacacgcttcgccagatgcaagagctgcaataagcatacgaagcagcaagacaagccaaggccaatgcccagcagttttatgctcagcgtcaagtcattccttcttatgtcgcgcaagcactggtgtacttcgccaggccagccctagccgctgccgttcacccaacacatcaagtgatccaagcaccggttcgcccggcggcgcctcaagcccagtacccgaagcctacttatacaccgcaagcaatgatggaagcagcttcgaccttgcaagctcaattccaagtttttctgcagcaacaacgtacaaagagcttcacctccggttcagaccgaggggagcccaagacaaggtgcattggcggggcttctggttggacagttcgcccagccaagtcaagttcgagggccttcgcctcaaggtccatcttcacaatttgacccaagcacaatggcccaagcactgacaacttttgcacaagctatacctccaggatacggatcagccccaccaccgaatcaaacatggaatcaaaccacgttcaacccaaccgcggcagcgcaggtcacttctccagaccagcagaaccaggcaatgatgttcaacatagcgcttcagtcgatgcccacagcacaacagcctgtggattccatggcttcaccgttcgcgctgccgtacccacatttgaattggcctgctcagcaaggggctatgatcaagccgaggaccgaaaagggcctgcccctcagctggggaatcaataatcatcccatcccaccccagttcaagtaccctccggtcccacggtatatcgggagaaacagatccgaaagagttcttgtccatctacgcatctgcaattgaagccgctcatggtgacgagaacaccaaggagaaggtaattcacctcacgctcgatggcatagccaggtcttggtatttcaatttgcatgttaatagcatttactcatgggagtaattgcgcgatgtttttgttcttaactttcgaggtacctatgcgaggagccgaaaacacaacaagaccttatgggcattcgccaaaggcaaggggaatcaacaagggagtgcatttgcctgttttcgcaagcgcgttgccaagtgcaagatataaccgaagcgtatgttatccatgccgctttggccagcttgctcgagggagaactcacaaggaaactcgcgcgtaaagaacccagaacacttgaacacctcttttgcataattgatggatatgctcgaggtgaagaagataccaagcggagggaagaaattcaagccgagtatgacaaggcagcaacagctgcagcagccgccgtccaaaccaacacccaagctcaggtccaagctcaagctgtaagttcagcaccagttcaagttcacccagcatctctggcgaaccaagtactgcaccccaggccgaaccaagcacccatgacatggaagaaattcaggactgagtgagctagcaaaacggtgatggcggtcgaagaggtacaagccctccgcaaggagttcgacacccagcaagcgggcgggcaacaacagccttttcacaagaaggtcaagaaagacttatgtcacgccctaaaaatcgactaaattaaaaatgcatattttaaatcatttttagaaattaatttaaaagcctacaagctaaaccctaattttctaggaaaattttcaacataaaaatgagctagataaaattttattaaatactatgcttgctcctttattttctagatttttctgggaattatttgagcaagggaagtatttttaataattgaaacaacatttcacaaattgttttatttcaaaaagtttaaaaaaatcccctcctaagccgttgggccgaattcggcccaactctctctctctctctcccgcgcggcccaagccggcccagctgccgccgccgctctctctctcgtgggacactgacaggtgggccccacctgtcaggtgtttcccctacctccggccggctgccctagccgagtccgagcacgagccgcctccttctcctctcaaattcgcctcaatccgaccccgattcctccgggtttttgaggggttttgttcctctcgttctcctctttcttttcccccaagaatcaaagagaatcgttgaggatttgatccgaatcgagttcgttttgattttatccctaaaaccgagttttaatctttcccgagtcgattgctctcgtttggagttcgatctcttcaatccaagcttatataaaggaccacctcgtcgttctctttcgtttgccccctctcccgagctttcccgtgcaccgtagcgccgtcgccgcgtcgttttagtcgccgccgccgccggccatctttcggccacgtcgcgccgccgcgtccgtcgtcgccgccgcttgccgccgccgccgttaggtgcgccgtggtgagaggaatctcggccgccccttccccttcgccgccgaccaccggagctccgccgacgccgtcaagccgagccgccgcgccgcctcttctcgtcgccggccgtcatcgtgcatcgtttgttgtcgtggtaagtaccatcgggttcgtctcgatgtcctcttcgcgttggtgtcctccaatcgcccggccgaagtccctagctccggcgagctcgcaaaccctaatcggccgtgggtgacgtcatgctgacgtcatcagggctgacgtcatcatccccttttctttttcctttttccaattttctaatagattaaaacttcggaaaatcataactaaataaccgtagatccgtttcaggtggtttaagtttctaaattcttctaaaatcaagatctacatgataaaaatatccacatgtactgtttatgcttgtttttgtactgttttgttgattttgtttatttgctttagtttccgacgttccggaggagagcgtttccgttgaggaaggttccgaagcgtttgtggaagcccaaggcaagtcacacagatcccaaacaaccctttgagcatgttgaacccgtttaaagctattattttatttcaactatgcattgttttcgaatgtcatcgggtggtgaacctttcccagttaattattggccgaagatgactttattttcctatgggttataatttgattagcatgaaccttatatattggattggttcagctaaatgctatatgtaagtttgcttagccatgcttagaaacattagctaactaaaggggttaattataaattatattatattattattcaattatggtgattcaatggtagctcacgatggtaaatcgtgtgatgataattaattggtaattaaaacctggctaaggtgggttgtgagcatatggttttgatggttgtgctcatgacaattaaggaccggttcgcgagctactgttgtgaaacatttatcgtgccaaccacaagccagcgtgggcaacggctttatcttttgtataacgtgattcattatagtgcgccagactgagaagtggcgagaagtccacgggggtcgctggggagtccatgccttgtttataagggggtgattatgatccaggaaaggtgcgctgtaatgggttatgttgtgcaaggggtattgtcacaactcctttccgaggtacggtggtggtattgaggcacatggtgacatgatgtggggttgtgtcttgtgggtacagtggtacacctctgattagagtttaaactattcgaatagccgtacccgcggttatgggtgagttgagcaatgtttttcgtgattagtttcacactactcatcaatgttaataatgtgataaataatttgactcctggtttggaatggttaattcctggtttggaggtttaatttgttcaactggggttagttgttcaaatgtggttgggcctatgcaacatgggtgtgttgtatggtgttatttaatattgatcaattattcaactgtttttattattctcttatatatttattaaatgctgttttctgcaaatgagctatattatgccatcctttgttatcctgtgcacttgcatatttgctgtgtggcttgttgagtatgtcatacgctcattcttgcaatattcattcatcagaagaggagtatctcagtgaaggtgatgatctggaggattaggcttgttcttggttaagatgcctgtggagtggagtcgccatagctgttccgtagtttgttatcgttttatatttccgctgcgtagaatgttatttttgtttgagaggaactgtctacctctgtaataatttttatttgcgagtattaaatagttatttatttgtactctattatcaaattgtcattgtgtgcctcggttgattcctggacgagggtttaacacacatgtaagcgtttggaattttggatagaaattccgggcgtgacaacttataatgcgcttttcacggacgctcttcgcacacgaccgagcagagtcgaaacattcggcagcaaggcaatgttcaagcacaaaggcattgtctcagcattgtctctacagctgacagcattccaagatacttttcacagccaatatccttcggaccagaagatgccaaaggagttcttttcccgcaccaagacccgttgatcgtttcggtagaaatggctagttttgaagttcggcgcatcctcatcgatggaggaagttcggccgatgtcatgtttgcgttggaggtataccgcgaagggccttcggccgggcctaccgaaaccgaaaacttggcgacaggttcaaaccggaagcaagcggtgaaggtcgaagagggataccctaagggcgaaagccatggctcgggaagtacgcgtgcttcgtcggacagggccccgtcaggaggccacgcaagcgaagatggcgaggcaaaaagcctcggcccgaaggtatggatttcgccaaggtaccaaaccccaccgtgaggaagcccaacgggctgttgcgcccctgcggggattcgccaagatcaatgggctgagccatttagcccaattggggccatacgtgtaaaggacattgtgtacccctaatcatgtccctatcataagggtaaccatgtaaattctcctgtaaagcctaaaccctagggggagagaacctgtaataaggttataaatagcccttctaggccatgtaatagggggatccccaaataattttttactaagcaatacaattgccttacttttccaacaactattgagagaaccacgcctttcggtgtgacgcataccttttcgccatagtacgtagtgggggccggcatgttccgacataacaaaagcacgagagtgactatgcgaacgatggcataaagctatgatcaataattcacaaagtttcgagcggacaaaatcacaaaacttttctatttacgtgagaaaaacctcataaaaaattacatcaccagttacatgttcgccctcaattaagttactaatcggcgaattaggttcatcgttgctactaatattatacacaacccttaaaggggacggtggccaaaagcaaactaagctgtaacggcgacgagcgatagcctcttggagaaacgacctcttaaagtttcgctagaaaattgcgctatcttcgcgatacgttacacgatacctgtcatagtctttcaaagttcgaccggggtgtgcacgcatccattcggcaacccgtataaccatgtagctgttgccttttattaacatttcatggtaaacaggccgaaaacgacacttggtcttcagcaatcctttaaccgccacgaacttctcgttcttgtttcgccaactttcaggtgggggccgaatgcccatttttcggccacgaatctcctgacaaagcacaaaagaacaagtgcaaaaggaaaaatgtggacgaaatcaatcccactttccaacaaaatcataaggttggcgaaagcattaacttttccattaataaaataaaaaagtcataatggctataagatgaaaacggctcaaagccgaacatgcaaagcgcctatatacatagtaggactaccaaaaagcctaaaaggacaaagaaaaaaaaggtgggagtcacacgagggcctcacacctcagggtggtcttggcctccattgcctttgccctcgtgtccggcgcccggttccgacggcccaaggtcccctccggtgttagtggtagtggcttcgtcctttgcaatcctctcgagattctcgcgaaggcgtgtcttcgcgcaatcccggccgccatcctcctagaaaccttttcggaaggcccttaaggccgttccggaacactgtgaattgtcaggacattcttctttcacgaggtcgggaaagatcccaatgtggtcacaaccgtgtgagtgtagctggctaaggatgaagcccgccgaaacacgcgcacaacagtcaccataagcacctgccacttcgacgactgagccggccgcttcctgcgtcctctcggagaagtcgaacgtcgtcccgtcgtcgcccggagcgccctccgcccgtgtcccgaggtcatacagagccagcttgagagtataacagacttgcttgggggactctgttgccggcgccaaagtcacagcagcagcttcggccgagataagacgggcctcaagggacttgatcttctcctcggccgcagcaagttggcgatctcgttctgcgtcccgctagttcgccgcctctaggtcggcgcggagagacttgttgtctcctgtaagagccttgttttccgcattcgccttttttatggtctccgccacaacacgtctttcgtcttccttgtggcaaagatcctcctcggtttttcggaggcgaagacggtacccgtccggcctctccaaggcagacttttccgcactcaagtgcgcggcgaggccctggacaaggggaaccaaatacattatggcgtgacataggtgaaatgagaaaattctgcagacagaaaattcatacccgcacaaacaagctctccacggccgtgcaactttcgccaaatttgttcagctcggtgaagaggccaaggccatcggacggtgcgataacttggcacaccccgtccatgaaaggagtgatctccggccacgtggcgaaatccacgggaacgaagtgcggggcagtaagcgtcacgtccgacaaagtcatttcgaccgccggagcttttccttcccgctgacgagcttgcgaaggaatcgcctcaacctattcgtccccggagacgttcgctccagcggccggagccgaggcacttccactcgttgcagcttcggcgtcactagcaagcgctggggacatgcgtctctgtcgcgaccgggaaaattgccttttcccgaacgcttgtgtattaatccccgtcccaggaaaagccggggtacaccacacaaacatgatataaaagacacatctttattatatcgataatatttacattattacaaaggcgcttcaggcctgacaatcaaaaataaacagcagcggactagcgagcctacggctccaccttcacaggcgctcaactggggtataagccaggactccacctaagacatcttctccaaagcttctcttactgaagaggggaaagattgagcaagaatgagtacaaccacagtactcagcaagccacaccg

SEQ ID NO: 16017 - DNA, 9167 bp, Oryza sativa
tgagggctccttttagaccaaggataatttaacaaaaattctccgggccacattcgaatttttcttgtacgtattttagtgtttgccaaattcttttcgaattttaattaattctattattccttttagcgaatgatttttaattcgggatgaatttatcaggacgtgacaaatccaccccccttacaggaatctcgtccccgagattcgaggaggctagcaagaggataggttgggcggtcttctcttcttgtctgactccttccgctccgtcttctataacaaacttgcctaacaaaacttctccactctggactgcttggctcgatctcctgttgcagatggaatcttctcttcacccgacttgtccctggttgaacctttagctgacttcgactgggttgcggcacttgaagatggtgcttcagttccagaacttcgcatagttcatatctttggcgtcaacctcatacaacttacccacttcatgtcatgcgtcaacactagcttgtcattactaggataccatgtttgtcatcataagaatatcatgcttgtcatttacttctaacttgcaccaactgcctcatattagctttcctagtctccggtgctagatacttcctctattcaatgtgagggtcggtaacttttgcctttgaattatgtttcccaaggtaaccaaattatcccacttgacatgctttgacgtcttcccaaatgactttactgctgaacttgttattgtctgatcattttcctgccaaatctgaagcttcgttgttaggtgtgattttaatctgacctctatagactatcttcgaacatttcacttggttcataactgggaatagttcccacgaacaggcagctcggatttactttcgttacattcagtttacttcccactattaccttcaggttgtcctcagttagcattcaacgtattcctttacacctttaaccttgatgtgttctttcccgatttctcttatcaatcacctttcgacctacttctttgcccggtaataaacacctttgctggtatcttctatcaatcaccttttaaactttgtcaaccaagtactctccactccgagagttgtggatgcttctggtgacaatgaggtcctttggcttgctgccttccagtgaaaccttgaagtgtttcgccaaaagctatactgactgtctttgcctttgatccgaaaaagacacatctgaaactcttagtccaacaaatgtttctttggttaatcgcttgattttcttttccatcatcaggttggttattaactcgaggttagaacatagttcctctggaatgagaccctaggtctcctttgacagtaaacaattatacgcatgatcccatatcagcatcttccaaaataatcctcatagaacttgtttttatcacacatgtctcccttattacatgaatacaaggcactaccttaaacaaaaaagggaagatgcttaacatcggtacattgtttctactatgggttaggattaacatgaggcctcacaggtacggcgtttgctccagtgaccacaaggcgagtgacttgtcttcttcttgcataatggccggagtgatggcgcaggttacgcttcggctgtggacaatctctagagaaatgacctggttctttgcagttgtaacaaatcaacgtcttctttactgagctgtccatctggggacgatcattttgacttggagttggaattggtggttggaaatccttgctaacattggcatcagtggtaccatagttgctatcaccattggagtctttctcagtgtcaaaattgctaaggttgtcattctgggttccaacattgatactatcgttgacatcttggtgaatgctactgacattgcacgctttattcgggtggtcactaatggggcaagaaccatggttgttggtggtatcatcatcattagtattgctagtgttgttgtctgcattgcgtccatcttcttcgggcaggaattcttgatgcacaacagaagatccggtgatctgaagtggctcagtgcgctgtctttggttaccacctggaaatactgggatgttgacaatccttctcttgcagttcgtcatccgattatgctcactttcaagttgcatggctttgtccacaagtttctcaaaatcttcataatcctctaggagtagttgcactgcaagctcatcttttaacccctggagaaacttctcttgtttgtcttcatccgtttccacatcttctggtgcatagtgagccaaacgatagaactcgtgcaggtactctgtgacggtcaaatctccttgcttcaggtagcgaaactctcgttttcttagtgcgatcattcctgcgggaacatgtgatctcttgaatacagatgaaaactcgttccaggtgatggtatgtccttctggccgtgatgcttcgtagctatcccaccactctgaagccggtccaaccaactgatgagttgcgaagccaacccgctcctggtcggtgcactgaatcaaccctagcttcttctcgactgtgcgcaaccaatcactggcttccataggatcgacggcaatggcaaaggttggaggctcagttttgagaaattctgataacttgcactgttgctggactgtaggtacttgaacgttggttgcccctgctgggttgttccaattctgtaatagttgaaaggctgttgccaacatgttggtttggttaaccacaatttggattagctctggtgaggtttcgtttatgcttttctcattcccattggcttgggttcttgagtcatcggatccatcattcccatagcctttgttaccagtgttatccatctgtcacaaggtagaggttgagaggggaagcatacaaggaaagaatcgaccagaactagggacaagaccttaaaggaactaactctttttgttgatgtgttgtttgttttgcttattctgcaggttgattaagcaaacaacctagcatggttacatcacaccccactgatgcaaaccacgcgctacacacacaagcaaggaaacacacaactaacgactctaccctagagggcggcttaggttctgcaactggttctccaagatcttcactccttcttcacagctggcttcactgcttcctacacttcgctagcggatcctgcagtcttccggagcttcggcaaacaattggcgacatcttcttcttcgcaaagctgaccatctagtactagttgaaatttgaagaaggaagaaaaaagtaaaccattttgcaaatagcattaggggaaggagaaaaaggaactttcgccaatagttttatttataaaatatgtccttaggttttatccacttggcttatcctaccgtcgagatggctctgataccagcttgtcgcgaccaggaaaattgccttttcccgaacgcttgtgtattaatccccgtcccaggaaaagccggggtacaccacacaaacatgatataaaagacacatctttattatatcgataatatttacattattacaaaggcgcttcaggcctgacaatcaaaaataaacagcagcggactagcgagcctacggctccaccttcacaggcgctcaactggggtataagccaggactccacctaagacatcttctccaaagcttctcttactgaagaggggaaagattgagcaagaatgagtacaaccacagtactcagcaagccacaccggagatgcataattaatgcaagggggtacaaggggataataatataggggttaagttttgcagtaaacagcatttaaaagtcacttagttgcccaaagccattttataaagacgatcctagagctacacaaaattattaatcaaggccgtgaaccctcacgaacctgccttaacccaaggcctacgatgattcagaccgaactggcaacccgaccctaggtcccagctcgtcccaagccaacccaggccaaccattccacattttagttgttgagcaaattttaagaattaaaacactgacttgggtacattgctcggcttgcccataaccgagggcgcggctattcgaatagattatactctgatcagaggtgtacatctttacccacaagacacatcttcctcacgtgcaaccacgtgccacataccaccacggtatacagacggaagacgtgacatagtttccaacccatcctagccatagacaagagtaccgacccaatcccacctacggccggaacctccgggacaggcaggcaggactgagcccctagcagcagggcaccaaccctgtgccatgacatctcgactaccgggccgcagctcgtgtagccttcatttgtcctagagaatgtccatcgacccccgacttcatccatctccatccgtgtacttttgtttatgaccagactgagccacaaactaagccttacccactagacatgtggaagtacggtagtgctttgcaacagaggcccgagcttaatccttatagtggccggggtgctacttcccacaactggcatgcacccaaaccccaccgaaaacaggttttaggggttttgaaagaggaagagaggtgtatgtccaattccaccataaaccaacaattccatagtgtccaggtgatatgagaattcccaaagtctaaagttataaaaccacctaatattgcctaattaatcagcgaagcatctacctaaattcatacttgtggaaccatgaatagagtgtccactagttggggttttgtttaatctagggtgaacaaggtaataatatcaataacaataatattaaggtcataacaaaggtaaataggcatggctaaataaaacagtgatcacgcgggaatttaaataaagcgttaatgcaataatttaaatcaaaataattttataaactgggattcaatatgttcaaggatgatgtgacttgccttgctcagagagaacggccttccgaaccttcggcgacgaccgcaaaccacgcttcgggaacctccggaatgacagaagctacgcgaagcacacaagcaaagctacaagcctataaagaagcaataacaatacataaaaagaaagcacagggttctttaggttataacaaacattaagagacttgaacgggtcgattcggagttcgtatgaccaagatatgatcatccgaagtttagtgctgttatatggagatttgcggattattataattaagctttgcaacaataaaacatgtgtaagcgctagcctggaaaagacaggaaggctgcgccgttgacatgcggaccccacatgtcaacctaaaggaccgcggtagaccgagtacacagagtcggtccatgggtcgacggaagcggatcccgtgtgtcaaccgaggcgagtggccgacaaacggactccactagacaccacacgggttgcacacgtggaaaccacgcggctaccgagcgggcacactaacacggacactacacggtcaccatccgcacacgtgaacgactaccgacaccggtacacgggtaccggggttgacgaccgcacaacgagcacggacgacaccgaaaggacgaggacggggcagcgagggagagggatccttaccaccacgcgacgaggcgcgggaacgacaacgacgaacgggcgcggcggagacagacgggcacaacggagacgaacggcgaggggacggcttcggcggcgatccttggacgaaggcgagacgcggccggcacgaggcttgacgacgcggagccgaggacgaagacgaggacggggctgccgcggctcgcttgacgaacgcggacgacgaacgagaacggctcgacggagggacgaacgccacgacgaccgagaacgacgagaggacgacgacgacgacgaccggggccggcgaggagacgatgagggcagccggcggcagctgcacggagacggggacgacgtggaacgcaccgctgcgaatccgacgacggaggcggcaccgcgagacgacgagccggcgaggatgaacggtgaagacgacgacggacaccggcggtgttcggtcggaggggaggcgaggccgagaacgacgtcgcggctgcgatgccgaagatggtggaggtgtggccgaccggtgcacggcgtggagggagaggttcgcggcgatgtgcggcggcttccgggcgaaaccgaggggtggacgaggtggagggctacgccaccatgccgagggagggacggcagcgccggctgatgcacgggcccggtggaagggggctgccggaggagacgtcgacgaggaggaaggagaggccgacgcgggcgacggcgttccggcgaaattcgggcgacgccgtggccttgccgggaaagaggacggcactccgatgccgggagaggtggtggcgacgtcggccggcgcaccggggacgcggcagaggcgaccggaggcggaatcgtggcggcaacaccacggttgccggcggggaggcacttccggaggtctccgcgggagacagagggtaggccggcgaagaggaggcggctgcgatgctagaggaggcgacggcgcgaccggacggcgctccggcgaggagggagaggcggctggaggcggccggcggcacgggagggaggggacgacggcggggaggtggctagggaccacgggagagcccgggaggagactaaaacggtagaacgcaaagagggggttctattttataggatgggggagggagccgggcacgggaggagcggggaacggcggcggaaaagccggccggcggcaatggaaggcggccgggaatggcgcggccgtttccggcgattgggggcaccattcaaggggaaattaagggggaaagagagaggagggaaaggggattaattccccctaatcaatttgggaatcccatgcttgaatcgcgcggatttgagggaggaatggcgctagggttcgcacgggagggagagagaggaaggggccgggcggttggaaggggacgaccggcctggcgcgtgggccccacgcggtcaggcggcggcgtcagcgcgcgcacgcgcgcggcacgggcgggaggcgcggctcggcttgggccgggcgaagccgaggcgacccaggaggagaggagggagaggaggcccgggagagagaggggaggggagggagctgggccgggaggggaggaggcccaagaggaggagggagagaaggagagggagagaaagagagggaggagagggagacttcggccgcgggccgaggggagagagggaggactttgggccagacttggcccaaaggaggaaggagggttatttttaggtttttctttttaaataaactttgataattgtttttgttgcttaataattatttccggtgctctgaaaattcaagtaaaatttgagggctccttttagaccaaggataatttaacaaaaattctccgggccacattcgaatttttcttgtacgtattttagtgtttgccaaattcttttcgaattttaattaactctattattccttttagcgaatgatttttaattcgggatgaatttatcaggacgtgacagtctcccccgaggaggaatgcgccgcagaatcggcgaagtgggcatcccatcggacccctcactgtccgaaaagccacagccaacttgcacaaccttccccttcttcttcttcttcctggcaacagctcccggcttcgccgcagagctagaaatcgccagaagggcattcgctccagcaatgtcttgcgggcgcacgggcgaaacatgagagcccaccccagatttcaccctagctgggctaggagtataaccatgcgatccatcatcctcagatccggcctccctatcgtcttcttcctcctccccaccatcgctttcggccgcgtccttagcggcgcgacgagttcgcacctggccaccctttgcaaccgctcgtttgcacttcttcgacgtaccgacatcctcgtcgccggccctagaggggattgatcaacctggcagttcgccaacataaactcggttcacccggccatcggtctgacgctgaagcaggcgggcgaatttggctgtggttaggacgccaaccattttcgatgcctccgttttggcgtcctctaaggtgtgaactgaaaaagagaggaaaaggaaaacgatgaattaggccgaagtatatttccgcaaaaagaagtatacgacacggagcaaaagcaaaaactcacgttcggccccggtggggagaacaaggcggggaagcccgagaacctctttgtcctcattgacggaaaccccccagacacgagcaaggggggagatcggaagaaggcaaaactcctcggaaaggtcacgggtacttagccgccgtgcgaccttgcgaaggagtatgagccgggactcgagggttccatcgacctctaggtttggcttcacgacaatggagacggcggagcactggaagcggagctagttcgccttgttgtctttagtagggtaggggttggcgatgtagagtcacttttgcatctagttcctttcccatttgcccatcgatgcaggcaccggccaggcgtccgaacattccagccgcagcatgaagttcacgcaaccgaaaacggtttttcttggtccggctggcgtatgcacgtctttggtcgtggcacatgctgtaaataggacggcgaacagctcggcggtgggagagaacctgcaggttcggcacatcctagcgaagacagccagcttcgggattgctgacggactgagctagggaagcctaacctcgtatgtcgccagcacggacgccaggaaatcgtcacacgggagacgaagcccggcggcaaagaaggtggcgaagacgaccgttcgcccatcgcctggcgaagggacaacggcttcgcccccacatgtcccttggccctccgcgagagtgccggaggagaccaattcggccaagtcggcctctttgacaagcgatttgccaagaaagcatgaccacccctccccgaggctgctagggtcttcgccagtcgacccggccttggtgggcttacgaggagccatcaggtccgtggcgaaggaggaattgagaagcgaaagaaagtgagagtacagaggtggcgaagagctgaagtgcaaacaaatgcagagagcacggagcgt

SEQ ID NO: 16018 - DNA, 5786 bp, Oryza sativa
cacccttgctcgtgaggggcttgttggaggtatactgcgaaaggccttcggccgggcctgccgaaaccgaaaacttgggcgacatgttcaaaccggaagcaagcggcgaaggtcgaagagggataccataagggcgaaagccatggctcgggaagtacgcgtgcttcgtcggacagggaccccgtcaggaggccacgcaggcgaagatggtgaggcgaaaagcttcagcccgaaggcatgggtttcgccaaggtaccataccccactgtgaggaagcccagcgggctgttgcgaccctgtggggattcgccaagatcaattggccgagccatttagcccaattggggccatacgtgtaaaggacactgtgtacccctaatcatctccctatcataagggtaaccatgtaaattctcctgtaaagcctaaaccctaaggggagagaacctgtaataaggttataaatagcccttctaggccatgtaatgggggatccccaaaaaaatttttactaagcaatacaattgccttacttttccaacaactgtttagagaaccacgcctttcggtgtgacgctgttgtctattcgacaacagacatgtcataaggaaaattggaacatcttcaatattgtaataccccaacctcggcgacgacataattacctactccctccgtttcacaatgtaagactttctagcattgctcacatacatattgatgttaatgaatctaaacacatgcatatatttagattaatttacatctaaattaatatgggtaatgctagaaagtcttacattataaaacggaggaagtttgtctcatttacccaaaagaattggattatttgtgtggctgtacacatataatctgaaaaactctttttcaatttcattcttgcaactaataataggattaatcaaatcctatactgtctcacatggtcacatggtcaattctagacaaaacagagccactgtgaactcttctgttaatatatgtattatttttatatgatatgctatcaaaaatattagctatacttaacaaagtagtctgataattccatacagagatatgaagtgccttcaatacacgagaatagatcgtggaacacaagccgtctaggagatggaaaaaatcgatgatcctatctgacccaagcctcgatcaatttgatctcgcttcgagaaaaaaaaggcccaagcaagacttgttttagatccacacatcagaacattccaggaacgctttggaaaaaccaaaccgatgaggtagatgatacaaaagattaaattctttttcatggaattggatgtttttttcctgaaaccgatgaggtagataaggtagatgttttttttcacattgcacagtgctaaaccggatttttttttataaacatgaggtttttaatgcattgggttagacagttttttccgagcgattttttttataaacgatgattttttctcgtatggagttggatggttttttttatctttttttcgcgtggattcggacggttttttcaatccatttttttatacacaatggattttatctcatgttgagttggacgtttttttgaacctgtatttttataaaagacttcttttcctcgtgttgagtcgacagattttttcgaacaggtttttttataaatggcgttttcttgcttttgagttaggttttttctctttttttacagacaacggaaacttggcttttttttctcaattgaaaagatgcccgtgcattgcaatgggaaaaggtgtttttttccattggtacaacagctattaggagttgaggaataaattgaaaaagcgttacctcctacctagggttgtcaacggggcgggtcaggggcgggttgggctggaacgcccccgcacccgctccccgacttctccccccaaccccggccccgcacaggtgatcgggtgggaaatatccccccgtccccgcccctgcaggggacccgtgggtgagcggggctccgtaccaccgacggcaaacgcgagatgaggaggaatgcagccgccgccacggtgcatgtgccgcccttgacgtcgatggcgacgccgacgcggttggccgcacccctggccgtcaacaccgctgccgctgcaagctccatggccgttgatgccgacgcagatggctgcgcttggcagccgccgccgccgcccgcgccttaaccgtcgacgccgtcgcccaccccttggccgccaccgctgcaagctccaaggccgtcgacaccgacgcggatggcggcgcttagcagtcgacgtggatggcggcgcttggcagccgacgccgccatggcccgcgcctggccaccgccgccgcctgcgccttggccgccaacgccatcgctctccttgtgatgggagaggatattcccaataggcaatatgacactgaaagagatgggttgttaattttgaccatgattcagttattagatttaacacgagtgctcacacttacagttaattagacacctgaggagacttcatcaatctcaagttatgccggtaaagagtttcaaatgtgttaatagaagtaggatgtgtgtatatacatacacaggggtatgtgcacgcactgtatccttttctaaaaaaaaaggaataagttcaccggaggtccctcaacttaacagcgagattttttgaaatcccctaaccataaaccagaaatgtgtgcccctaaatttacacaagccgtgcacacaaggacctatacagtatatatgggtggtttcactgacgtggcatcctagtcagaaaaaacattttaaaaaatacatgggacccatacactggtggagaaaccatctttcgtcggtcggccgatttccacagtagtcccggatgcaataaaaaccggggctaaagatgttctttagtcccggttcaaaagggtaacgggcatatttgatctttagtcccggtttgtgttaccaaccgggactaaagatgatctttagtcccggttcgaatgctgtcagggtctgtcaggccctcccggtatctttagtcccggttgataacaccaaccgggactaaagatggtaactttagtcccggttggtaataccaaccgggactaaagatcccggtgatctttagccccggttggtgctaccaaccgggactaaagtcccacccctatatatatgtcttcttcctcctccagctgcccgagcaagcttcaaaatttcttcaaaaaagaggggaggtcatgccaaaatttctattgaatttattttggtgattacatacaaatcggaggtgcctaaaaggtttgcaacttcatcctccaatgttttttttgtcatactacatttgcacctatgttttgcacactttttttgtctccaaaatgtagttgtaagttgatgagagagaaaatgtgtgtggggaagaaagaatatatagaaatttagttcatttgctaaacaaggttttataaaatagttgagaaggaaaactctagtgaaagttaatcttaaataatagaaaacaaactaaaatgaaaattaaaagaagtaaaacacattaaaattagtttattacttaacaaatagtttttaagaattatttggtgtaatattttatgatttttgtatgaataaagatatcttataattattgtatgactgtcattattgtaagaataattatttgtgtacggtttttttgactcatgtagatggatcggcaatggatgtacgctgaccggcggtccaaagagtttattgacggcgtgcactattttttgagagtggccgaagctaacaggaaaaggggttttatttgttgtccatgcaataagtgtaagaatcagaaggagtattctgcatccaggactattcatttccacttgtttgagtcggggttcatgccaagctataattgttggacatccccggagagcaaggtgttgaaatggaagaagatgaagtggaagacgacaatattccggactttgctcaatttgttggatttgaaggaaatcaaacgggcgaggaggaaatagctgctgatggtaacgacgttgcggatgatcttggtcaaatgttgcaggacgccagggaggactgcgaaagtgaaaaggaggcccataaatttgacaagatgttggaggaccacagaacttcgttgtacccaggttgcgagcaggggcacaaaaagttggataccactctggagttgttgcaatggaaggcaaaaaatggggttagtgacaaggcatttggcgatttattgaaactcgtcaagaacattcttccggggggaaacaaattgcccgagacaacgtacgaggctaagaagatagtctgcccgttaggactggaagttcataagattcacgcatgtccgaacgattgtatcctatatcgcggtgaggagtacgagaacctagaagcatgccctgtttgcaaagcactacgatacaagattagacgggacgatccaggagaagttgacgggcagctaacaaagaagagaattcctgctaaggtgatgtggtatttccctataataccacggctaaggcgtttgttcaggaacaaggggaatgctagaatgttgcgatggcacgctgaagagcgtcaacaggacgggatgctgagacaccccgccgatggttcgcagtggcgaaacatcgacagaaaatttaaagaatttggaaaggacgcacgaaacatacggtttggtttgagtacggatggcatgaatccttttggagagatgagcagcggccatagcacttggcccgttacgatgtgtatctacaacctccccccctggctatgcatgaagaggaagtacataatgatgccgattattattcaaggccccaagcaacctggtaacgacatcgacgtgtacctaagaccactggtcgaggattttaaacagttgtggaagaaggaaggtgtccccgtgtgggacgaggacaaacaggaggagtttaacctacgagcgctgctgttcgtaaccatcaacgattggcctgcacttagcaacctatccggacagtccaacaaggggtacaaggcttgcactcactgtatggatgaaacagaaagtacgtatcttaagcactgtaggaaggttgtatacatgggtcatcgtcgattccttgcagcaaaccacccggtacggaagaaaggcaagcacttcgaacataaggccgaccaccgtacgaagcctaaacatcgcagcgggaaaacagtgtttgctatggttaaagatcttaaagtagtgttcggaaaggggcctggaagccagcatatagagagcgaagatggtcacgcggcgatgtggaaaaagaactctatattttgggagttaccatattgggaattcttggacgtacgccacgcaatcgacgtgatgcacctcactaagaacctttgcgtaaaccttcttggcttcctaggtgtatacggaaagtcgaaagatacactggaagcacgtaatgatctgaagcatatggaacaacgcggcgaccttcacccggaaccaaaggagaaaggaagccattacttgagtccagccagctacactcttagcaaggcagagaaggaaagtatgtttgaatgcttggagagcataaaggtaccgtctggatactccacgaatatcaagcgaataataagcacgaaggagaagaagttcacaaacctaaagtctcatgactgtcacgtgttgatgacacaactgctaccagttgtaataaggggtatccttccagacaatgt

SEQ ID NO: 16019 - DNA, 1857 bp, Oryza sativa
ggtaccggaatcaccccataagggagactacggggaaagggaactcccggaaggaaagcaattatgacggtagacaacaatttattccgtaaagcccatttcactgttttgcaacactcttcattggtagctccttacatcgaggagcacttggctctagttcgcgccaggaacatcggtaagtccgatgtatggattacacggcatcacattgatactttccccgcgtggctacgacaacatctcatgggtaacgagtcgatcaaccaacaacttgccttcctggcgaggggaccgtctgggtcgatcgcgacattccagggatattaaatcaatgggtacacattctacacgagagcccaagacatgaagagcatgaaccaaaacagcgctgttcgtgtcgatgccatgggacatgatggaacaactgccacgtattacggtgccatccaggacatatgggaacttgactatggtcctctcaaggttcctctgttccggtgccaatgggttaggttgactggtgaggcgtaatgattgatgacagtgggaatgacaactgttgaccttaacaaggttggatactcggacgaaccttttgtccttgccaatgatgtaacgcaagtctttttcgtgaaggacatgtctagcaaaggaaagaagggcagagggcctgatgagccggaacgtcaagtggttctcccaggcaaaagaaaaattgcgggagttgaggacaagactgacgaggattacgatcagttggatgggcaaccccctttcacggtgacgattgaccctagcatcctcctatcaaatgaagacaccccttactcacgcagcgatcacaaggagggaacaatagtgaggagaaagtacgtgcggtcaaccgtcaccgccgatgtaatgctgtaattattgtgtacacgatgtaaactattttggatgtattgattatccatataaatcaattgatgtatggcatatgttaattacgcacgattattagaggtttcaacaagttcaaatcatgtatatgctagttatatgtgatacttacaatttttaaaagttttaaatcacaggtggcaatttcatatgtacgttaattagagtttttaacatttaatttactagcattcatatgctaattataattgactagaggatttttaaaagttttaaatcacgcaagtggcaattttatatgttaattagagtttttaacatttaatttactatcattcatatgctaattataattgactggagaatttttaaaagtattaaatttaatatatttttaaaactatcattcatatattagagtttttcacaatttaatttactatctttcatatgctacttatatatgactattcgaatttttaaaaggttttaaatcatgcatgtggcatttacatatgttaattagagtttttagcatttaatttaatataattcctacgctaagtatatatgatgattacaatttttattaattttaaatcatgcagtatgtacatacatatcttaattagagtttttaccaatataataatatcattcatatatatgctaagtatatatatatatattggaatttttattaattataagtcatatatttgcttattacgatttatccacttaatttattacagacaaaaataatttttcgaagtaattgtcattaatctttagtactttaaataatgttaatgcattaacttctattttataaacacatatgtaagcgaaaatcatatgcagtgctataatctttagtcccggttcttaaccctaaccgggtttaaaaagaatttcgaaatagcgggaaaagatatttactcccggttg

SEQ ID NO: 16020 - DNA, 3128 bp, Oryza sativa
atatacgcacgaaacacttagcagacatgactattttagtcttagcatgtaatattatttgagttttaatataagattactttatttgagattagacttagtatataattattgactacggaagtggtgcgacaagtagcaattgactattgcagtcttaattacacttagcatatacgcacgaaacacttagcagacatgactattttagtcttagcatgtaatattatttgagttttaatataagattactttatttgagattagacttagtatataattatttactacggaaatggtgcgacaagtagcaattgactattgttgtcttaattagacttagcatatatgcacgaaacacttagcatacatgactattttagtcttagcatgtaatattatttgagttttaatataagattactttatttgtaattagacttagtatataattatttactagctagggttgtataatatacgtcacctagacttagcttatatcacgatttgtatttagacttagcacgtaagtttgtgtagggttctaatgtacgacatttacacttagcatacatgacttagattgttaaaacataaatgtctcgtggcttagcagatgtttcttgtatcaacagatggctgaccgcgatgaggaacagatattgtacgatacaatcgcggagggaagcagccagtactggaatgaagaagaggggaacgaggatccaaaccagtacttgaacgaggaagggaacgtggagagggatgcggaggggaaccagcaggggcacgtggaaagggatgtggaggggaaccaggaggaggaggctagtggtagtcaaccctccgttggacagaagagggcacgcgggcaacgaggtgcagcgaagaagcttgagggtcggcacatcataacggaagtggaagaagatggacgtcctagtgccccggccgaagccgccaagaactatgtacgtcacagcggttgggttgtgcgggataacgtgcctgtcagtacggtgtactggcgaagaacaagggcacgaggagatcatgagagctttgtcccagattcggagaaagagatgctgtggaccacaatgctcgagacattcacccttcctgcgggtacagaggacaaagtgaaaaggtggactctgaagaaaatggcagaacagtttcagagcttcaagggagatctgtacaagaagtatatactgaaggggcagacaccgaacttcgacacattcccaaagctaagggatcactgggacgagttcgttgcatataagataggtgaacaagggcaggcgatgatggaaagaaacaaagaaaatgccgccaagaagaagtaccatcaccacttggggtcaggaggctatagcgtcgcgatgccgaagtgggaggagatggaggctagcttgattgagaggggtatcgaaccggcaacagccaattggccggaacgatcgaagttctggtactatgctcacggtggaacgctcaacccagctgatggctcactggtattcggcgttcagatacgagaggctgcgcaacgactaacagatgcagtggaagcctcctctcagggcacgttccgacccgacagagatagggacgagctgacactcgccctgcagactccagagcatccaggacgaacacgagggaaaggggtgattccttggaagattggtttcaaggaggacatccacacgtacaggagtcggatgaggagcaagagagataccgaggcgaagattgcagacctagagttccgggtatcgagctacgaactcaacatgcaagaggaggtggcaaggaaggttgatgaacgcatggccgcacatcggtcccatgatccccagccgaccattcctcctgcaatggtgagcccgtcaggaaaccgtagcagctgcgcctcaacggggcaggtaggatcgcagagcatggacgccatgcaaacacaggacgaatcgacctgtcccgttgatgacatcactcagcggacaccatgtgagctgcatattcctttcaagaacttatcaataaaggtaagatttagccattccgctagttcctgcttatatatgttgattactaataaataatctctcacaacatgaaggtggcgtcgggcatggccatcccaacggacccttcaggtacttaccactgcaggccgattccagcaggatactcgaaggtcgaagttgagttggtcgaaggcgcgtacgaggacctcgagctggattaccctggaggagacggtgagacgcatctacgagacacaagccatgccattattctatggcgcaggcggtacatcatcctccctgggcgacaagcggcgtctcgtgcaccatctcctccggctccgccatctcctcctcatgatcctgcaccgtctcctcctcatgctccgccagcaccgtctccacctcaggctccagcatcgactcctcctcaggatcctgcaccgactcctcctcgtgctcctacacctactcccccgcaagctcctcttccggcaccttcaaagtcaagggcccccccagctgcaccgcctgcccacacaagggcaacgaagaaggcgaaagttgacgccgccaagaacaaggacccggggtacgattgcacgcaagaggagctggacgcttacgttgcatcagaagtcaagagacaattcaagcctcgaagtccagaaaagaagattcctatagaccccagtgtcaggaacttcttcaggggtatgtctgcatctgtcaaggaggccatcaagctatcggactatgagcgaacgctgaagaaagcatcttctggaaagtccaaaccagtccctcagcttggagagcaaccaaaacagagatcgagccgttggttaccggtaaagaaatgacgatagaacaatttattactgacaccggtctaactacggatcaattgctaggagtcgcaccaatcgaaaaggcggaagtgaaatacatgtacgaactcggtaaaccgctcgtcaagcctgagctgctgtagtccctacccacacaaatgtacaagttccatcagctgtacatggagatgagcgccttcagtagagagatgatcggagcgaggatcagggacac

SEQ ID NO: 16021 - DNA, 7638 bp, Oryza sativa
  unsure (1)..(7638): unsure at all n locations
acgtctctattatgagttgctggattttgtaagtatatcgttcggttagatttcttactatacgtctcctttaataaattaggtccttgtatataagtagactatagaaaataatatactcccttttatcgttgtagaatggagattcaaagggcccgacggcggagggttttcgatactggattcatcgaccctcggagagtaaacgtcgcaatgctcgaccaatatccacaagaaacagaggacaatctcgtccatctcctgaaggcgcagcattacaagacgttcatactgttgccatacaacacagagttagtttaattttactgtcttcctacataccaaatttcattcccgtacgaacttgctaagtgtttcatatgtaatgcatcccacgcacattgcagattccactgggtgcttttactcatcgacctggaggcctgcaccgtcaacgtatatgactcaatggataaaaaagagtctacgtttgacaaggttttcgaacttatagacaggtaccgtcataagttcctttgttaattaagaaaatcttgttatgttaattgctactacgaatcatagctttaaactccatgtagggcttggtatcggttccgtcatttggtccgcggcaaatggagagaaagacttaggcggaagttcaaatttcctgtgagtacacatgctctacatttatatttctccgattcaaatacatacaagtgtatattaattagatctctcgttgtttgtcatttatttgtagtgcgcaaagcaaaagcagggaactaacttgtgcggctattatgtgtgcgagtattgccactgccttgcagaccaaatcatcaccacaagagagctcgatgtacgtacaaataaattcaaaatttcattacgtagcgatttcttgtttaattactaatcaatttcatacattcatatagtttattcgcatgagggataacctgaccacacacaaggaatttatcacggcggttcaagaacaactcatgggattcatcaacgaagaaatccttaatcccaagggtgaattctactacgacggaaacacaattcaccggtccttagcttctgagctagcagcgagtactactacgtcgaaatgatagctagctagctaggacatataatggattgtaattaatacatgactacatatgtttctatatgcatgtgtacacattttctataatgtaaatatattttggtcatatatatatatctatatacatatgcattaatttgcataacatatatatgtgtataaatacatatatattatgcatgtatatacatataatataatataatatatatatatatatatacatatatatatatgtatgcatatatatgtattgaaacatatatatgcatggtttatatatatatatatatatataaactatatatatatataaaccatgcagcaacagggccatgcaaaaaaaaaaatggtcagctcgatctttagtcccggttatttcacccgggactaaagatagcgatctttagtcccggattggtactcccggtttggaaaccgggactaaaggggggttacgaaccgggactacaaagggtttctccaccagtgatatatcatctgcacatcctttttccttctcttttctccttcttctcctctcttatctcgtttctctcttcccttctttgggccggcggcgggcggaatcggtgagcgcggatgagggcggcggtcgagcgttggggaggctgcggtgggcggtggcggtggggaggagccgttctacgtgccgtggtgcaaacggctgtcggtggacggcaaggcatccaccacgctacggatatgcatctgggagtgagacggtgagggcagggacaacacctgcgacattgtcgccgcgccgctccgccgcagctgcagcgccaaggcaatgccgctgccagccccgctcttccgaatgatgacgccgccgccgaggccgcagaaaggggacggggagtaggccagnaggcctggagaggccatccgcaaggggcaccggagctacagtctcatggtcaacctgcagcttggcgtaaggtgataccaattgctctatcccttcctgctcttcctcccactttctcaaatactctgtcccaatgtttggtttggttttggtccctgtggtgagctgcagctattcggtgggggaagtcgtcggcgctgccattccagaagctcgccacatcggactttgacccgtgggagaagctctgccgccacgctcacccaccgtccgctccgcccgcagcccgccaccgcgctcacccgccgtctgctccgagcacaacctgccgccgctctgctgccacactcacccaccgccgcgctcgcttgccgcccacgtccgggctcgccgattccgctcgctgctagcccgaagaaggcaagagagaagaaaaaaaaaagatgtgcagctgacatgtggaccccacctatttttttattttttttattgactaggatgccacatcagcgaaaccacccatatattgatatatacttgttaacgaccaaatttggtaattcaagtatgggggattgttggcgatatggcatgaggccttcgaccaaatctgctgaaaccagtaaggattcaagcccgaaacgtcaagtttagtcagggcgaagccccccatggcgtagactaagaagcaaggaccgcgagaggcagggaatcgcgcgggtaccttgccaggccagaggcctcctgggcgaaggatgcagggcgaagagtatacgcggaagggggacaacttcgccatagcaaattcgaccccgggaggaccaaagaagccatcctagcccatcaagcctaagggctaattgggtcgataatcgcttgacggcccgctaagggcccatggaccacaattacactatgtacccatgtaaatgtccctttcataagggcaaccatgtaaattcctctgtataaccaaaaccctagtagtaagaacctgtatgctataaatagccccataggaccatgtaatagggggatcctaagaaaaattctcaatttaatacactttacttctttcccaactactgttgagtgaccacgtgtttcgacgtatgcggttgtcgtttcgatcacagggatggagataaaaccgaagcggaatccaaggtagagatcgttccggaaacagagcaagaatcagctaaagtccgaatcggccgcgaccaggatcggcagagttcgagtcggacaagggtagtcgattgagtcgattccgacaatgtgatttggtacacgttgtcagattgggttaatgtgcttcatatggattgccacgcacggactaagtcctgaaaaggcaattgtatctattagttaggatattttatgtaatttccttagagataagtttgggcaaaagtctgccgcaaagacttatggtatcttagagtttgttagagataagagtcgtgtacgacaagaacatagtttgtatctcgggtataaatatgacccgaacccatgtaatcaaacaatctcggtgcatcgccacccttttacttttgtttactttcgacgagttcttgatttcgggttgagctgcatcggtttcgatcttcaactagaggtaaaatatgttatggcggcttgcgttctcaggattagtgcttctatctttatgatactctaatcttgtttatgtaattcgtcgagttatcatatatcttatgtaatctttgacaatattgctatctaaccctcaatcggcgaacatctatcattgaaaggcaaccgattaggttaaatatcaatattgactcagattatataggatatccaccaccctatgaaacatccaacggcttgatagtctagatattgtctttcttttcatacttatagctgcatcagttgagtttgaccttataagtcgtgattagaatcttaatctctagcctgtctttgcttgccgatttgggtagtatcgtggtttcagccgatcttacttgatttagccttatatcttatgtgctagattgatatgttaaatctaccctttatgctaagatcttgtcgcatctaggtatattaagcttcatgtttgatatattttgcccgatttaatatcttaatatagagtggtatcggagtattagccgatacatgttaaatctatctgatcggctatgctatgaatgctataatctcctttttaatatatatttcgatctaagtgatttatactgtctcggcatggcgaccgatctatcccaatcacatgatttaagtatatattgatggaagtattatatatcattaatatctttagccgatcgaatacatttagtcctttcttacctatttatgattgccgatcgacttaaatatgacatcggctcaaagataaataatacatcatcggcgactggccgatcggctatcgtttatggatttaaccgctatttttctatctttatttcttgttgattgcaggatcaaatcaactagcacgctcacgaacctaaaggtaagatttttggacttgcactgaagttaagcagatcttccaggccagtgtgtgtttttcgcatcaacaatactgccataggatgccctcccggacatagactcgggccccacgtgcggggccatcctggaggccctcgtcggggtgggaggcgaccgtgggagcggcgccgacgaggtcatggtggtcggcggcggagtcggaggctgcggggacgaggaggatagggttctggtggtcggggaggagcgggacgagaagcttggttctcacaatggctacgtcgaggggatcagggaaggaatcgctggttcggatcgcgcaaaaggcaatggagaagaggggaagaagatggaggtggtggtggttgctgtggagaagacgatcttggtggaagatttctcgtgtgagctcgattggtaactctagtactctactactacatcttcgcacaatgatgtgagtttttttttcttttccagtttgtttggttaaactagtctcttagaagttagatgtactacgatttactgtatttttttctcggttgttgtttgttagaatgtgatgcttggcttttagatcagatgagatcccatgaagtcatgtttcactgccgatggttgtgaatgtggctgttccgctgttcccctttcaggatatttgttcaacttaggtatatgtacaaatccatacaaagacccgtagaattatttgggacattccaactaatctagaataactttgttaaggtcaactacagccaattcgatgatgatttaatgttttattcacgtggacaaagaggctctaatcaacctctctaagcatagtgtgaatatcgtacacctaaaagagaaatccgtgctttattaatgtggccttggagaatgatttgttagttaaattcacaatcgctgatgcaaacatataccagaaacattcggtttgcagcttaggttgtctgttagatattgaagtgtcacataaaagtgacgaacaggcctcaagtattcattgacagtacgtaccatgatggtttaataaaaggaaattaacagggtctgaatgttaaaaatagaaataacaaaaagaaattacaatatctgagctgagcacagcatgtagctacatattttttcgaatcaaatattaattctggagagatatcacgtgaataatgattggcaactacaaatatagattaaatttcaaacttactacatacttttggtcatctctctgtctctctggtcgggtgcatctaatgacgactcatccatgtcttgtgtgcccatcttttgttgaaatcgctgcccagccaaagattatcacacagggccaatatgtaattagcgttcgaataagtagaatctgtgcaataactagcaatacccgattgcccctcctaacatatagtgctattgcaaaacgaacgccatttaaaggctccgtatataagcacagtgatgcaatcatcatcattgcacagattgcaattgcagtgcatcgagtcactggggccagcactaaatacatacctagtgcaaaggcagtacccaaacttgtcactgaactgaaggccaggagtagagatatgttaaagtgccgacggcgaagtggtagactaaccataggcattccagagtacatgaggttgatgatagccaagctcgagcaaatgaatgctattgtgttagccatgatgaatgcatcaaatatataacttccagcaagtgttggtgtgccaccattattgtgatcgtctgctttgtaacctcctggtatggcaaacattacgccaaacgtgacagtaacaatcagcactgaggcaatacccaaagtttgtgttgaatttgtcattttgtccgattccctcacttcatctacttgtttttgatgaataatatattgttcctgcaggtgatctacccgacgacaaccacctcttgcattgcaaaacgttagtgcccgcaatatcagtttgttagggttctgcaaagcaaacataatggatcagtaggtcagtactctttatttttcttgagtaaattacactcacggtacatgaatttgtgtggtgggtgcaaatagatataacagcttgcaaattgctcactttgatataataacttggctagtaggtgcgaaccgggccaaaatgatccatacaagtaaaattgttctaaattagtgcacaataatgacataacagcatatacgtacaactatgatttggagatcttatttcgaatccaaataaaaagaggaattagatgtccaaaagtttatttttcatgtataggatacaatatttatttcattttttggaaaaaattgatcatctatataactcgtctaatgtttatttatctattcaagaccaagataatttttatatgtacaattaactactaaaagaacattttaattttcattttcatgttccgacactttcattgaaagtgtattttaatgattaggtatttttaattattttgtttttttttctaaatcttgaaagtatcatgcgaataatagtaataatatgtgtcagtataaaattttgatgtgtaacaacaattacaccagtagtatgtatcatattagatcaattttacttttgcggatcggtttggcctatgtttgcatgaactagccaagttattgtacccgaataagcaatttgtaagttattgtacctatttgcacccaccatacaagtttgtgtaccatgaacgtaatttactcatttttctttgttaatcaaaaagggttaaaagtgtaatcttacccatccatagaaatatcctgcaagaatcttactctgcgatatatctaaagcagtttgccccttattatttgatatatttaagtttacctccttattcatcagtagagaacagaagatagccttattcccatgcttcactgctatgtgcaatgcagtgtttccatcgttgtcttgcatattcaaaatcctagccaacgattgagtatggcaagcatacacaactacattccatctttccctttcaacggcaacatgaaggaaagtcctccccttagaatcgcgtaaaccagcgatct

SEQ ID NO: 16022 - DNA, 7844 bp, Oryza sativa
ccacccattttacccctttattttagtttttaattttattttagcagcaatttcatattagtccctgtgttttatttaatttagtacaagcagttcatcagttgtacaaattacaatgtaagaccactggtgttatatgttacttaacataggtgtttattcaaataccctgcttcactaaatttcatgttgtcttaattaaatgccttttgcatattattttgagacatgctctacttcctcgcttcattaatttacaaaattctttaaattttgtactttaatttagcaaattctcttaattatgtacaacatgattaatggaggatttaatgcatgttccactacacattttgactcggaaattaatcacatgtagctggagtcctatattttggtcatcgtgaccataacctaggtagcaagtatgttgcccatcattaagtgttctacattttgagatgattacccggtggagtcctacaaattggccacactggtcataacctaggcagcgagtatctcgcctatcacacagaggtctacatctcacgatgattacccacatgtggtattttccgagaatatgttttgaaaaatgagattatttgaaatttggataaacacaaggtagtggagtcctaaacattggctgcggtatattcaccagaatatatttgcctagagatcatgttttaggcagcaagtataacttgcccactattaagagatctactccactgtttaattacttggagattatccacattgtgccacctaatttcgaattctaactcaaattatcaggtctataacctacatcttttcgaaacattacaaaatatgaagtcttacatttcgcattgagattacaacctcaatgtcatgtttttattaatttacctctgtaaataaataatgttaatcatgattatagggacatgacaactatagagttcgacgaactcgccctcgatgggagtaactacccaatttgggcttccgatatcaaaataaatttttgttctcgtgggatttcaaatacaatttaggaacccaatgattgggatccactagttgagaacagaaagctatatattgccattttccttctaaggctctacatctataaagatctcaaacatgagtacatgttggagacgagccctctcaacctatagaaagctctaaaagagcgttatgatcagcaaaaggaactcatttggcctgaggctaattatgagtggattcatttacgcctacaggattttgcgaaaaagagccaacggaagcagagaagatagagaaaactctatcaactatgtttccaaaggacaggatactgaaccaatagtatcgcactaaaaggattcaagagaaattcctcgaataaccctaagaatctaactggacaacgcaaacgcaacaacaggcgcaaatccaatggtcgacagaaaggaaaagggaaaggtcaggcaccacaacctcgtggcaaatagcaacaggcattacaacaagtgtggatctgactatcatgtcactaaagattgccgcatcccaaaaacatcttgttctcatgtatcagaaatccctaaaggagaaaaataaatcttctaaagaactaagatttgaagctcactttaatcttacaaaagaaagacctgagattgaaagttctcaccaggttgaagctcacttcaatcttacaaaagaaaaacctgagattgaaagttctcaccaggctcctattgaaccagagaacaacctcgctcttctcctagaggataccgcggcactttctgcaatggatgacatgctcatcgagtactgctcaacggacccagttggagatttactatgatcgcagtgcaccccacttagagataaagctgctttaatctcagtgtgtttgagacattatattgatatcctatagtttgtcaaaacaatattggttgtaataagtagataagtacaaactcccttatattataaggttgtaagacttgctagtcattagagtatgtacttataacatttgtaaacatcatactatgtatttgatgttttaattattgtatgtatgtatatattgtggataaagaattcttcactaagcaattcttctttcactatagatgtctaaggatatgactccgattggagatgaattatgtcttgtggacagtggtaccacaaactctatacttagggagatcaaatactttcaagctctcaaaaagagagaaggcaaagttttgactatcgctgggcgcgatactgtgatatttggctcaggacgagcaactattacactcccaatggatacacaaattacaatcgaggatgctttattgtatcctgattcaacccataccctactaagttatagagatatccgtcaaattgggtttcacattgaaacccatatgcataatcgagaagaatttcttctcttaaccaaacaaaagggatatggcaaacgcatttgcgagaaaattccatctctcacattgggattgtactatacatacattaagcccattgcacatgttgtgtacaaagtgattttttaaaatgttgatgcattccacacttggcatgatcgacttgagcacccggtatcgggatggtgagaaaaattattgacaattctattggtcatcatttgatcactgacaaatttcccaaatactctgatttcgtatgcacagcatgtgctactgggaaactgattttgagaccatcttatctcaaaattagagccgaaccacttaaattccttgaacgcattcaaggagatatctgtggccctatggtgccaagatctagaccgttcaggtactttatggttttgattgacgcatctactagatggtctcatgtgtgtcttctatcgacacgaaaccatgcctttgccaaactaatgtctcaaattataaggctgaagggaaattatcctgaacataggattcaatcaatccgtatagacaacgctgccgaatttacatctcatgctttcgatgattattgtatggcattgggaattcaggttcaacactctgttccatatgtccacacacaaaatggtttggctgaatcattgatctaaagaattaagcttattgcccgaccattattgataaactgcaaattaccttcgttgtgttgtggtcatgtagttctgcacactgctgaccttgtccaactacgaccaactgcattgaggaaactgcatatcgtgaaacttccccaatgcagttagtacgtggaaatcctccaagtatttcccatttgtgtaagttcggttgtattgtatacatactgatctcaccaccacatcgtaccgctatgggcccacacaggaaagtggggatctatgtgggatttaaatctccgtcgatcataaagtatttaaaacccttaataggtgatctatttactgcccggttcgctgactctatctttgatgaggaaaatttcccggcattagcgggagacttcaagtaccagaaagaatgacaggaaattgattgggatgcccagggtattccagcctcacacccacgcactactgaaactgaacttcaagtttaggaaattatacatttgcaaagcctgacaaataccttgccaaaggccatttcctattaataaaggtgtacttaaatctttcattcctgctcagaatgcgctagaaagagtggaggtaccaaataaaaccactcaacttccactcactaaaaagagaggaagaagtttggccactcagcgagatacagttgctagcaagaaaagaaagacaataaagcaaaccaaccttaagttggtacacaccaaattgatactatgtatcaagcagatcgtgataatctgcaacctagcccagttgtgcataatgctgagactaggaattcagaagaccatagacacattgttttgggaaatcacaatgagtctataagggttgatgaaattgccatcaactactcggaaactggagaatcttttgatagaagagctacaattgttgacattaatttttctgaataaattgctgattgcctgcaagttgatccagaacctaggtctataaaagagtgccaaaagcgctctgactggaacaaatggaaggacgcaactgacgcagaattagcctcgctttacaaaagagatgtattctcggctgtaatgcctactcctcgtggtatctttcctgtgggatacaaatgggttttcgtctggaaacggaatgaaaacaatgaggtggtgagatataaagcaaggcttgtagcacaaagttttacgcaaaaacatggcgttgatttcaactaaacttactctccagttatgggtggtataactttccgatatttaatatcattgatagtacaaaatcgtctatttatgcagttgatggacgtagtgacagcatacctttatggatcacttgattctaatatttacatgaaggttcctgacggaatcgacatgccgaatcagaaggtaaatcgtaacatgtattgtgttaagttgcagaagtcactttgtggcttaaaacaatcgggcaggatgtggtacaaccgattaagtaaattcctttcactaaagagatacactaaaaatgatgattgcccatgtgtccttatcaaaaagtcccccacaggattttgtattatctcggtatatgtcgatgatcttaacatcattggcaatacacaagatattaatgaagcacgtcatcatttaaagacggaatttgagatgaagaatttgggtcaaaccaaattttgcttaggtatacaacttgagcatttaccttctggaatccttgtgcaccaaagtgcatatacctagaaaattttggagaaattcaatatatggacaagtcatatctttccaaaacccttatggtggttcgatctctagacgtggagaaagtcccatttagaccaaaggaagatggtgaggatgtgcttggacctgattttccatatcttagtgctattggcgcacttatgtatcttgcaaatagtacgaggccaaatattgctttctcggtaaatctattagcaagatatatcgctgctcctaccaaacgccattcgactagagttaagaatgtctttcgatatcttaatagcacaagagatcttagacttttctttaaaaagaaccaagattcgaccttaattgggtatactgatgctggctatctatctgatccctacaatgccaaatcacaaacaggattcgtacttttacaaggtggaactgctatttcatggaagtcttctaaacagacactggtagccacttccacaaatcattttgaaataattgcattatatgaggcatcacgtgaatgtttatggcttcacagaatgattaaccacatattaacatcttgtggtattggttcattagaatcacctaccattatctatgaagataatgccgcttgtgttgtttagatggaaactggttatattaagagcaacatcactaagaatattgctcctaaattattttatcctcatgagcttcagcaacatggagagataaacatcttgcaaactaagtcatgtgataatctcgctgatttattcataaaatctctgccatactccatattttttaaatgtgtcgaaggaattggtatgagatgacttaaaaatttgcaggattgagggggagtaactctctctgggaaataacctattttcgtcatattatactatttttcctttgtatgagttttaccctttatattttctcatccaaagtttttaacgaggtaatatcaacataagttatatgtcttatcattttgcttttccccactagggtttttactaaatgataactatagacattatactaattttggaccatactatgagctttactcataaagtctaaaaatagttaactatatatcacggttcttctccttattttcccaatgggtttttgaggagtttacctgatgtatctaatacaataaattataattatttctaagattatgtttacaaatattctggaacaatgaaagagcaatgatcaaagctggattcgatcaagggagagtattatgaaacaatagggtgatctcatccatataaaaggattgatcgcaaccgaaggcaaccacgcctcttccctacggaattgctactaggcgattgctcgctcagggcgatcagatccgatccccctccccctcctccacgtgggttccttttttggcaccgcattactttcctattttagtaaatttatgcacctaaagtttgtacacctcaagtttacacatctaaagtttatacacttaaagtttagagacccaaagtttataagtcaaaagtttatacatcagattcaaatttgaatttgaattcaaatatattttatatataatatttctgtacatctaaagtttatagacctaaagtttataattcaaaagtttatatacccgattcaaatttgaatttaaattatatccgattcaaatttgaacttgaattcaaatattttttatatatagtatttctttacatctaaagtttatacacctaaagtttatagacccaaagtttatgagtcaaaagtttacatacccgattcaaatttgaatttgaattcaaatattagtttatagacccaaagtttataagtcaaaagtttacatacccatttcaaatttgaatttaaattcaaatatttttatatatagtattttctatacataaatttttccaactttatttttttattttttttaaatttatggtgtagtaggaagagaagaaggggaggaggaagggaaagagtagagtatagggggacggagagcgatcacccgcccattagcacccccctcttccctaggcactccttagcacccatttcctatctataaattgtaccgcattgatcaataaaggacatccgctcattcgctctattgcgttcaattctctctctcgctcaatctctctcgctcaatcaatcttatatactttcaacgaaattgacacgatagcaaaccattttatttttattagaaagctacaaatatttcccactatatatgtgcgtatgacttgcattgtgggccccaacttgcaaaagcatgagttttgcatttgtgtatgacatattgacctataaacttataaaacaaattaagttgtcgctttatgataaaagcaaatatatgattcaaaataagtatggaatatagctagaatgaaattcaaaacagcaaatataaattgcacacgtaccttggtcttgtagaacggctgcgtgcaatgcattttgtctatttgggccagagtacgaaagattcccgtctgtcatttgatgcaataactttgcaatgtcgacctgttgatgcaagacagctaggtacaacggtgaagtacctgttgcatccataaggaagccggccaattctgaataatatttaagaaggttggtgattatatccttatttccaatgcagacggcatcatgaaaggccgtctccttacggcagttttcctttctcaggagttcctccagtctcgcgctgctaggggagttgtccttagtttcaaccagatcaattagatgatcaaccattttggaatggccagcccggacagcgcagtgcagaggtgtgtcaccgttgttgttctgcactaacatgagatgttgggacctgctgtagatgacgcctgcactcctcaagtagcccgggccatcaccgcaggtggccacaacatggagtgcagtgttcccttcagtggtgaccccgtccagatccatgcccgactctgcatctgcaccag

SEQ ID NO: 16023 - DNA, 1393 bp, Oryza sativa
taggtggagtcctgcttataccccagttgagcgcctgtgaagatggagccgtaggccgctagtccgctgctgtttattttttttgattgtcaggccttaagtgcctttgtaataatgtaaatattatcgatataataaagatgtgtcttttatatcatgtttgtgtggtgtaccccggcttttcctgggacggggattaatacactagcgttcgggaaaaggcaattttcccggtcgcgacaagctggtatcagagccatctcgactgtaggataagccaagtggataaaacctaaggacatattttataaataaaaattatttgcgaaagttcctttttctccttcccctaatgctatttgcaaaaggtttactccgttcttccttcttcggattttcaactagtactagatggtcaggtcagtgaagaagaagacatcgtcagttgtttgccgaagctccggaagactgcaggatccgctagcgaaatggaggaagtagtgaagccagctgtgtaggagtgaagatcttgggaacccatcgcagaacctaagccgccctctagggtagagttgttagtcgtgtgtttcattgcttgtgtgtgtagcgcgtggtttgcatcagtggggtgtgatgtaaccatgctaggttgtttgcttaatcaacttgcagaataagcctaacatacatcataacagcaaaagacttagatctgttaaggtcctatccttagtttctaatctgtctctcccctttgttttccctctctccctctccaaacctttgcaacagatggctgacaatgagaaaggcaataaggtcagaagtcaggacattggtacttcaagctcccgagtgaatgaagcaccagacaccagttgtgtgacactagtccaacacctggttaaccagaaccgattgcttatagagatactacagcagcaccagacgccaattctgaacttgagtcaaatacaacctcaagtgcagttggaggcagtccaagcactcacaccacaagtcagcgcaccgccaacatcccagaaggcccctcatgccatgccacatgttgacccaaaagaagcaagtatcatctgttttatgtgtgatgagcaagggcactacgcaaggaactgtcctcagcagaaaagaaaagcaccaatgcgaaccgaagatgaagtccgtaagatgatcattaccagcacagaatggcctccaccaggaatgacaagacgtcagagaagaaataccttccgaggtgcaacacagttgacagagcatcttttagctaatggaggtagagtgtctggtagtgaagattcagatcaagtctcctccgatgatgaagatgagaagtctccccaaggttttaaccagtgatgagctactgtac

SEQ ID NO: 16024 - DNA, 505 bp, Oryza sativa
gacgccgccgtatttcgccgtcgtctcgagctcgtcgtcatagccgccgcctccgcctcctccgctgccgccgcatctctggggtgagagccgccgccgccagatctccctttatctctcgatctctccgatctcagctcgatctctctccgtctctctccgtcgccgccgccacgccacgccgccgccgccacggccccgcaacgccacgccgccgccgccgccgtcgccacgccaccgtcgccacgccgtcaccacgccgccgccgtcgccacgccgccgtcgccacgccgtcgccacgccgccgccgtcgccacgccgccgccgtcgccacggcgccaaccgccgccccgatgccgccacggccccgcaacgccacgccgccgccgccgccgtcgccacgccaccgtcgccacgccgtcaccacgccgccgccgtcgccacgccgccgtcgccacgccgtcgccacgccgccgccgtcgccacgccgtcgccacgccgccgc

SEQ ID NO: 16025 - DNA, 8136 bp, Oryza sativa
gcagccttttcagccttcatattgtccaaaaccctcttataatctcttgggaataccttgacaaattttggaagaagagtatcaaaattagagagtatatctctagcaacaacactcccagtgttaagtcgatgttgttctatcatcattttcaatgtggtaatgtcttcctcttcctccacatgatagagatcaactaactcatggttacagcggacgctgaatttcccatcaatatcataaacataagcaatgcctccactcatcccagcagcaaagtttcttcctgttttaccaaggataaccacagtaccccctgtcatgtactcacacccatgatcaccaattccttcaaccacagcttgagcacctgaattgcgcacgcaaaacctttctgcagccattccattgaaatatgcctctcctatagtagcaccatatagagccacattaccaattacaatattgtcttctggaataaatgtactatctcttggtgggtagacaacaatttttccgccagacaatcctttgccaacataatcattgctgtctccttcaagctcaagggtgattccaggacagagaaaagcgccaagactttgaccagcacttccagtgagcttcacatgaatcgtacctgcaggtaatcccttcatgtgataacgctttgtgacttcatgactaagcatagtgcctactgctcggttagtattctggattggagtctcaatgaaaacacgaacttccttctcaagtgcagcttttgataaagctatgagtttgttatctaatgccatgtcaagaccatgatcttgcttttcaacacagtactgagcagccccagggcgaatctctgcagctggtttcaaaatcaatgagagatcaatgttctcaagtttctcgttgctcttcactacttctggatcaacctcaagcatgtcagagcgcccaaccatttcagtaatggtacggaagccaagctgagacatgatttctcttagctcctcagcaagcatgaagaagaagttgataacatgctctggttctccagcaaacttttctcgtagcactggatcttgagtagctataccaacagggcaagtgttggtatgacatttccgcatcatgatgcaaccaagtgtgatcaacggagcagtactgaaaccaaattcttctgcgccaagtaagcaagcaacagctacatctttgccagtttttaactgcccgtcagtttgcagaatagctcggccacgaagcccatttgccactagagtttgatgtgtctcagccaatccaagttcccatggaaggccagcatttttaatacctgtccacctagaagctcccgtccctccatcatggccagatataaggacatggtctgcatgtccttttacaacaccactagcaacaactcctacaccagcctcagaaactagcttgacgcttatgcgagctctaggatttgaattctgaagagtacaagcaacaagaatgtcaccatatatcaggaagcaacatttgcaaattgcatgcatgtgttcaagttcaattgtaaaatgttgcatggcaaatgagcgatcatgagttggtatgatatctcagaaataaatctagtactaacaactatacaaaaataacaacaaatcgcttggtttcaagaaatagcaatgcagtatcacattaagttaccttaaggtcgtggataagttgtgcaagatcctcaatagaatatatgtcatggtgaggaggtgggctaatcagtcctacaccagcagtagagtgtcttgtaaccgcaatgtcaccaataaccttgtggcctggaagctcaccaccttcaccaggcttagcaccctacatacataaagaagttataacaaaaggtaaatttctgcaacatggtaggtgctttcaatagactgctgcaatcattttaatgattttgtagtgcacaatgttgacaagtacctgagccatttttatctgcagttcatcagcgttagtcagataatagcttgaaactccaaatcttccactggcaacttgcttgattgcacttctttttggattcattgaaccattagcaagtggttccatacgagaaggctgttcccctccctcaccttcacagatgtattagagttagtgcataatggtttagaggttatggattctactcaaaatagcaaaagggtaaaaggagatattttagacctgggaataaaagtaatattaagttctagaaatatgttaaacaagaaagaaacagttaaataaaataaaacacaaaaaataaagtctcaaatagtgcaatatgcttcttgcaggaaagaattttctgtatagcaaggaaaaaactcaatcccactaaaaatagtgatattttgtcttcagaaggcactctccacaccaacagaagattttttaaaaaaaatagcaaggtaccgtataagtttctttgagtgaaatgcagtaaatacctttttgtttgatagaatcaaaataagttcatttgtaagtacaagtatgtctaaaatagtggctcagaacagaaggcttgttttgaaaggtaattccataaagtgttcttactgcagattgtgcaaatggtagcaacaaagggacaaatgctacatagtatttcagtgtacctgtattagatttccctccaagtttgttcatggccatagcaagggcagtatgtgcttccaaagaaatggatccataactcattgcaccagtaacaaagcgtttaacgatctcacttgcaggttcaacctcgtccacagaaatcatgtcagcagtgtctttaaatttaagcataccacgcaggttgcaggttttgttgagctcctgaatacgcctagaatattctttgtatgctgcccggctgtttactctagcagcttcttgtagttttgccattgcaaggggatcattgaggtggacttcaccatttttcctccagtggtagtcccctggattgggaagggcctttgcatctgcacttcctggtggaggtgctcttgatggaaatgccaactcatgaagacgtagagcatctcgtgcaagcatttcaaaagtggcgccttcaattcggctaggtgtaccatcaaaacacttacggatgacttcagaggaaaggccaagagcttcaaaaatctgtgcacctttgtaagatgcaagggtggaaattcccatctttgcaagaactttcatcattccatagttagaagcatagaaatatttcttgacaagttcttcctttgagtagggtttcccatcaccattaggaggaatcttcccatcattctgcaagcaccaaattgcttcgatagccaaataagggcatacagcatcagcaccaaacccaacaagggtgcagaagtggtgcacttcacgaggttcagcagactccaccaacaaacctacgcgcgtcctctcaagattggccacaagatgctgatgtaccgcgccaactgctaagagcgaactgacagcaacacggtctgaggaaaatcctgcatcaagaatttaaacaaaacagtaagtttcatgcgagaaaggtcaaatgttgaagaatgtcgtagacacggaaatgcataaggtaaacgaatgttataactttgttgataataacagcgctacacctacttaattgataatattcgacctattatattccaaaattatatgcttggagctacatttaaataaaaataaatttgttgaatgcgtttgactaccgcaggaatgattacaaaattatgagtaatgagtaatgaaacatcagtagtatatattgaatatttcactgacctctatctgagagaactaaaacagtgtagcccttctttatagctccccgagcttctgtgcaaattctgtccaaagtttcttccaagcccttccttccagacttctttggataagttatgtcgagcaccttgcttcgccaaccacggtagttcatcttcttaatagcctccatttcatcaatcgacaccaaaggaccctcaagtgcaaggcggttgcattgcttttcagttgtttccaacaagtcaccttctggcccaatcatacactccatagatgtaacaattttctccctaattgggtcgattggcgggtttgtaacttgtgcaaacatctgtttgaagtactcaaaagtcaacttctctctgtttgacatgactgccaagggtgtgtcatttcccatggatccaagagcttcaactccatctttagccatcgggagaagcagcatttcaagggcttcaactgtgtatctgcagtaaaaataaatttgataaataaaccaaaaaggaactcaaaacagcaaagatagtcaacaaagtcgaaaccttgcttacccaaaggcttttagtggagtcacaatcccattgacgcctgcatgttcctttttctcattcttttgctacaccaaagtgtaaaaaaaaagataagtaattatagtgtaaccaaattctcataaataccagctaaaattgtagccagtgaaaaaataaaataaaatgttaaaacactgtaacagacttactgtgagtgaaccagaaattccaggagcaactctctcagtttctggcacagattctacaatgtctttgaggtatattttttgtctcttgagccactccccatatgggtgagctttcgagtactgtgccttcaatgcttcatcatccactacagtatggttctcaaaatcaaccaacagcatcattccagggtttagtctaccctttctcaatacatctttggaaggaacatcaacaacaccaacttcacttcccatgactacacgtccactgtgtgtcacataaaatcgaccaggcctcaacccattgcgatccagggtggctccaaggtaacggccatcagtaactgcagatgaaagcaaagtaaccacaaatagtacatgggaaatgtgtgatcaggaaggaaaaggtcttccgtatcttcttacaagatattagagcaggtccatcccaaggctccataagggcagacaagaactcatagagagctttcttctcaggttccatgttcacatcgttctgccatgcctcaggtatcatcatcatcacagcttctggcaggcttcttccaccacggataagaagttcaagaacaccatcgaaagcacctagaattgaaatgattctatctaattaacaaatctctaaaaataaggaaaatcccattttctaagtgtacttgatgtttcactgcatgaaacaattagctcttacctgaatcagacgaggtagcatccacaattggtagaatttttgaaaactgatcctttgttaggccaagcttctcacactctaagagaccttctcgtgctttcatcctgccatgcatgcaaaagcagttataaaaccaagaatcataaacaaaaatggcatagccatgtggagatgattacatacaacctagaaatggacattgtatggagcattccaaaaaaaaaaagcaagattaccaattcttgttccctttgagggtattgatctctccattatgacctaatacacgcatcggctgtgcacggtcccagctggggaaggtgttcgtggagaaccttgagtgaacctgtttggatgcatgaaacttagtaactgtattatactcaactcttgtaattttacaatgttgaacaaaacttctaaatgaaacaccaacacactgaaaaaactgaagcatcagttgcatagaatttcatgcaaaacagttggaagccctaagctacctcaaaccaaacacaatttcttcccaccacctaattggaggtcacatccagaagagtcggcatagcagtcggccatagcagaactgcagctggactctgcaacatggttatcgggtatcaactaataaagatttctaatacttcacttaaaggcatcaagaaccaggactgaaatatcatatgaatagagcagtgatggtaagacaattcaaagtttgatgcctgcacaggagtcttgatcttacaactgccttgctattattggttcccatccgccgactatggtcatgactttttttgtataagaggatcaaggtattgtatttaccagagccatataacttgtgaagttttcatgacctagatctgcatagtagtaccccttaagttggcatggcttaagctggcccttgtagacaatagtcctggaaatcacaagaaagcaaacattgaattactcacatgaatagaacacaattagaaagttattacactacaggatccttaagagagagctcattgttttttctttctttagtcccatttgaaatagaaaatatttgctgatgatccccccccccaaaaaaaaaaaagaaatgtgaacttgattgggatttgggtatcatcatcgctttcatccttcaacgtaatcaaacacaggaaacatgaaatttggaaaatatttgctgatgatctcttccaaaaaatgaaatgtgtacttgattgggatttgggaatcatcatcctttccatccttcaactcaatcaaacatagagaacttgaaatatggaagaagagagaaaagaggaagaagtaccttgaggagagagaacacatgtagaagtccctctttcctccacgacggagattcagagctgcacggatagatagaatcgagagcctcctcaggatatacaactgtaataattcattacaaatgagttaaatacacagtctactacatacgcattcataaattcaaaatgtaaactcgtggaatgacctgctgctcaaaatcagcctccgaacttgaacttttggtgaggaaaacctgctcaataactggctcagtctggagcgcagattcacctaagtctgagttgtcagtgggaacccggcgccacccaagtattacatgtcccagcgattccgctacctggataaatgaaagtaacagaaaacattagtgtaaatatcacggccatgaattgaaaaaacaaaagaaatgaaaacaactaaccttctgaaactcagctttgctccgctcacggcgcttctcatcgattggcaggaagaccataccgacagcatactcgcctggctgcggtagctcaaacccagcatcctttgtcacctgcaggagtacaaacggtaacagctaagatgaattaactgttaaaacgagctgcctttgccttaaaattttattgagtttctagctcgcctctctgaaaaagttatgcggtagagccacaaggatgccggcaccatcgccagtgttcttctcacagccgcaggcaccacggtgcgccattctctcaagcatctcgagggcgtcattgacctgcagagaagtgaaatcagatcgatatcgcaaaggtgatgttcagaagagagaacctgcagagctaccacctaccgtcgcgcgcttgtaatcgcccgacagctcggcgacgaaaccaacgccgcacgagtcgcgctcgcgcgaggggtcgtacagcccaatgctgctctcggggagcgtcgaaagtggcctgaccggctcggcgtcgcgcgcggcggcgcggggcggccgtgcggcgacgcgctcctcggtgagctggcatccgccgaccaaaccgccctcgatggacacgccgccctgtaccagcctagccgcgcggtaaggcgccgccacggaggagtggctgcgccgagccctgcggccagcgcccgtgggcgccgcgtcggtgcggagcttgtaggccatcccttgcgccgccgacatggctgcacctcacgactctccctctgctacctgtcacgcggcatcaaacgacgagcattagaccgtacttctaccaccaggaagaagaaaacgaacaaaatcccatcacaaaaatacagagcagggaagagaaaaaaaaagtagacaaacgaacagaaaatcctcaaagcaatctccctttcccacatgtcaccaccaaaagcaacgggagggaactcgtgtcatgctgcgatggaacacagcacagcacttgcaatttgcaaaacgagaaaaatacacgcacacagggcaaacggcgacacacgcgggggatgaacagatctaccaacccccacacggcgacgcagattccatccgcccccacacgac

SEQ ID NO: 16026 - DNA, 8288 bp, Oryza sativa
ccaccaccaaccacaacgcacaacccaaccaaacaaagccaaaccgaaccccaaaagccgagcaacttgttttttttttcttttttggaaaaccgtctcccgatcctgtcaagttgggaggacgacgatgaggaagggtgcgtgcggccgagcgggtacctctcgctcttgtagcccggaggtgagaccgacgccgacgccgcgtcccgatcctccccacaccttcgcctcgcggctctcgtccccgagcgcggtttgtgcttcccccttctctcccgcacgcacggcggccttctctaccggcgacgcggcggacggcgtggttggcgaatgaatggatcggttttggggacgaaacggggcgccgcctctctcgcgggtctcttcccgtttcctcctccgagttgagcggcgactagggcactcggcgcctctgcatttatagacaggggaggggggggcaggccaacccatcctctctcctctttcgtcgctcgcgtcgcgtccccacacccgcactatattttagccaccgttttttctcctccgaattcgcctctttttttttccctttgttttcttaacattcgttggttgtaggttgtgacggtatctgcatctctacgggagtattttcgtacgggtccccgacaagatcagaatttggggtccaaagcttaagcccattgtgctgtgctagctggagtacgattgtaagtacaatggaatgaaagaaacacaagattgacgacaaccctactgtaccatggatcagttattacttcaaacattttcttttgttgtctactggagtaataaattggataggagtacttcaaacatttttttgtttggttatatatgcacgtatgactagcaaaagaaaagagaacgtctacatgagaatggtatatcgtaattagttttgtggttcattttactcatggtatattcttactgcatatacactagtagtacaaagaaaaaattaaggagattatcttttacaagcaaggacctacgcgcaatacaacaatggcacggggaccccgacgaaagaatctttttgatcccgaattaaaaacaggaaagcagttgcaattttgcaatcttccgtttccgctgtttttgcaatctctgcccccgcgggccgcggcccccgctactgtccaccgagagaaagagagtgaaaaaaaaaaaacaccgcgagcacgggaccaccgccaggtcagccgcgaccgcgacctgtggtggtggccatggtgggcccaccccgctccgaggagcaaacgacagccgcccgtggcgcgtggggcccaggacgacgcccgatccgacggccagggttcggccggcgcgccgccgccgcgccgacgccgacgcggggagccacagccgattcggagataaccacgccgcgccgttagcttttttaactcgatctccttatctggtactcctacgtaattaaattaaatcaaattaaatctctaatgcgggatttggtttgtaacaaaattccaaaaatcgcgatggattttttgtgtttggcgagtcctacgtgtcgctatcacgtcgggcggccgcggcggaggcggagagagaggcgcgaggcggcgagcgggtgggggcgtgacagtgtgcagaaggcggacgggcccaggcgcagcgagggtagggccccgcgtgccagtctgccagacggcgaggcggtgaggtgctttctggggaaagcttcttctgcacgtgttcgtcgcccacgccaacgagggacggattcgatagatcctggattaaaatgctacacgcacaggtttaacttttaacggtagagaaggaatactattatcggtaaggattactcttatttctttttacattcttatccttgcaatacccttctttacctatatcaaaatttcatatattagaggactactccctccatctacttttgatagtcatatttccaaatctgaaaattttatttttgatagacatatttcaatccaacaacttatcatcttaatgactttcttggatttaatgcatgactcttcattcttctacacatgattggctacatgggcattgagaaatataaatattaatgaatcgcttgtttacgaggaatgactagtagcatatttaaatagatgataagtagaattacttatcattggcctgtgtgccaagatgaaatatgattatcaaaagtagatggagggagtagtacattagtattactttagtacaactgttacagtatgtgcagcaacttatattttgtaataaagggaatattaattagttgttttgtttctatactaatgtgttactgatattataataatcattttattttgagataaagaaactatatcagtatatcaatctttaattaacatgttttatataaaagacacgaacattagaaaaggacctaatatcaaataactagaaggtgtggggcttcgaacctaagtcatttagcacaccaccttgtgaagctagctggaagacccctgggtgtttctcattaacatgttttattatagtttgttattatcggtccatgttttatttaccgaggacatttttagttattttatatgaacaatatttatagctagtattgtcatgagaattatacacaccccaccacctaagttagaggtatttattgaactcaaactattaaacttgcccagccatcgtactccttctgtcccataaaaagttaaattctaaggatgaatctagacatatacaatatccatattcatcctaaagatttgttttctatgggagagggagtgtatatgataataaaactactactcgtagtcaatatgaccatgctatgtcatgcgatcagaaacattatgttatagctagcatgctcatatccacttctaaaatggtgaaagtcaaatgatagttttccaccatcagcgtttgatggatcaagagaagttatagtatattcaaggtaaactagtgaatatggatgtgaagaccatataaataagttactagtgctagtaatatatttaacatcactggcctcgtcgccatggccaaaagaaatctgagaaaccaatcgttgaagtgttgcgcactgcatacctcatcaattaagattagaatcttgtccaccatccctattttagtggattacttctcgttcaaaattagcttatcctgacaagctgtaaaccaagattagcaccgctaaaagtaaaagatccaagtggaaagctgtcccaagttaaaaggacaacatattaatgcaagtgtggaaattggtgcatatatattctattgcaaaatactcctagtactccctccatatccctaatcatcttcattttttcgagccatcgaaaccagtactccctccatctacttttaatagtcatattttatctcggcacacagaccaaggataagtaattttacttatcatctatttaaacatgctactagtcattccttgtaaacaagcgatttattaatatttacatttctcaatgctcatatagtcaatcatgtgtagaagaatggagagtcatgcattaaattcgagaaagtcattaagatgataggttgttgaattgaaatatgcctatcaaaaataaaattttcagatttggaaatatgactatcaaaagtagacggagggagtactacttagtgttattcttcttttttttctgtattaataaaaaataaaagtagctttgtacaagataggactataggagtgtcttgcttaatttgccttttgctagtactcctatttttttaggactgtaggagtagttcccttgtctgtattttcatagaagtttaattttcgatgaatctgcttgaactgttgaacatgaatcccgttgctaacatccaaggtttccttgggagatgtatcacatggtcgtcgtatattagttgcatgactctttagagcaggtataatagtactgactcagccggcgatagtaatcaccacatcagcattatcatacgttgaggagggaaaaagcatgagagagagagaagcgagcgcttctccaagcaccagacgatagcacgataaattaggcaagataaaatattttattcgctttgtgggtctatagttcagttacttgatcttatgtgcatatgcatactgtgtggtttcaagtactaatttagtttcatgctgaagcaggacgggctacagagatggagtttagttttgatcacctgtacatgcaacaattaaacctattcttgtatccgtaaagaccatctagaaccaatcttttatataaacaatctacaatattaactttagatgacctagacatatactaccgccgactactactttcactattagccttgctcttatcagaccgtccaaaactttacactactgtatctgattggctcttgagctgtgacttgggggcgttggcaaggggaacatggcatggcatggacctcctgggcccacaaatagctgggtcccacgtagtaacgcggcagcttgctgcattgccacggatttgcacttccctgcagtcctccaccaccatggggcccatgccgacgcgacgcatgagcattttgggaaaaaagggcacatagttgaccacggaagcgatgcgcacagtggcaccgggagatgcgctcacacgtgacgccctcctgccttgtctgatccccttttcccttcttcctctcggtttcttcacgaggctctgtccatctgcctacaagcccaggcgccacgtccagatgcaaatatactcatgtcgtattaatcatttatttcttttacccaaactgaactacagttctaaccatcccttatttaattgaaatacatataggacctgttctgctatgtttagcagctgcgcagttgcagctagctaaaaaaaatactctagatgttggctgcaacacagtaaaaatgagtgcagtcgaatctatatagactatttgccctctctactaatttatgttttatgtgctaaaaatatactaaaagagtaaatgatttcaacgctatctaaaactaaccagagtagattggactgatgaaaaaatgaattcgaaagatggagtagggttggagccattccgcaactctccttgagacttcgctagttagattcaagtgtttgagttattggtggaaaatatttttcgttttactttgtgaagctctcgtcgaaattttcataggagtacgttttctcggggaactccaaacaaacggggctgaacacttgttcgacagatccaatgagcagtttgtagatttatttgtagggaggtgtcattactgattgagcattcccatgcttatcaagcaattctctaattcctcgggtatttccaaagtttgccgattttcaaggcgagtgctcagcctaggcttcacatggcatcgtggggcatcccgcatcccattagccaaatggagcggccatcaaactattttaactccacggtcggagtaacacatgttgcgtggcacgcttggtgaatactacgtccatctcgtatctaccacacgggttagaaaaatgtattgtaccggctcatgtctaacaagttaaaataagtaactctactcattctttttcaagtaaaattatgtgtaaaaagctctaacattggtcgctaattttagtaatacacttttatattttttttaactatcgtggtaaagaaaaaattacgaatacataaaacataataatacttccttacacacccacaattatttatatttttaaaatagagagagtatatgacatggagtaaattttgaagttatgactggttttatataaggcaaattttgctataggacactcaaaatttgtttattttgatggtagagatcgtaaaaatatgctagagatcgtaaaaatatgcgacggctgaaagatactctagaaaattggtaatttgctgaaggacacttctagctcaatcggagagacaaattcttcaaaaagacgggaatgacatttgggtctaaagctttttgagcccagactatagtgaaaatgaaacatgatgtatgctaatgatgtacttgaggctataacaaatttagagttgcataatttctaaattgttttactctaacaccatgctttaagcatgtggtcagaggggcattatcgtcttttttaagaatttatctctccaatagagtcgaaagtgtcctctatcaaattaccacctttttaaatgttttttagccgtgacacatttttcaatgtttgtcggcaaattacataaattttactcactccatctacttttgatagtcatatttcatcttgacacacagaccaagaataagtgattctacttattctccatttaaatatgctactagttattctacgtaaacaagcgatttattaatatttacatttctcgatgcccatgtagccaatctagtatagaagaatagagagtcacgcattaaatccaagattgttggattgaaatatgcctatcaaaaataaatttttcagatttagaaatatgactgaagaatagagagtcacacattaaatccaaaaaaaccattaagatgataatttgttggattaaaatatgcctatcaaaaataaatttttcagatttagaaatattactatcaaaagtaatcaaaagtaaatagtaaatagagggagtatgtgtcatgtaacaaaacttaacgtatactccacccactgtagtagtgggggacaaccgggaattcttgatggacccaccacagcacgtccaatcgcctccctccacatgcacctggggggaccaatcattgcgccctacaagttggtgagaaaaaaagaaatgcgaaaaagaaagcaaacacgcagcgtggggcccaggtgcttactcctacccctccctacgtgcttatataagcacacgtgtttatcagtatatatgccccccgctttatctatcctagtggaatcttatttcccgcgattacttatatatgcacaggaaaagagagaaattgatgcaggaaggaaggaaatacaggtttttgtttcattcatttgctgctgcatctgcctgcacggttgttcgttgcggagatggccgtgataaagattcttcaaacacctgtcactcccaccgcccgtgacgtgcaccgctgcacgtggtctgcagttgttgctctagacccacttggcaattttgctggggacaccccggaatggggtcaagtgaggactggccgagagaacatggagtcgtcttatccttctgtacatttttatatgcaagttattttagatcctcttgatttgaaaatgccgtaattaggcaaagtcatttacttttttttaaaattacatggtacaacacagacactcacaacgcacgcacactcatccctataaacacacgcacgcaaaaaccctacccctataagcatcttcgaagactgggacaataaatcctggagattgacgaagtcaccacagcatcttgctgtcgatgggtacgttgcctaccactaaaagcacaataccgataaattctaaaaaattcgctacttcttcttcttacttaatggtataattaaattatttatatttaaaatcagagaagatattgacatcttctacgtcttgccgcgaggccatgtatagctgccatgtctgtttaaaagctcaatattttataccactagtctttgtgttttttaaacgtgtgttagaagcacaatataaaaaaactaaaaagtttcataatcttatatggagtactatatgagtaaataaggtagtttgtgggtatttgggctatttgagaaaatgggataccgcatcatatatagctgatgcttgccaccaaattagactagctagtacaaatgtttgacaaaaggtaggtttgatttcagcattgcaaccacttggggctaccttggcggcctcaatcatatgttaggtggtcgacaactaacgcgccatgtatggtcgatcagttcgttggttctttgagaaaacattgaagaagttcaattgtggggtcaagaggtatcccacctaccgcgaagagggaaacatcaaaccattcgttgctactacctctagcccccccacaaaaaaggacaaaataagtagagataaattatttggcacgatatctttgtgaagtccaaagtttcattggatacataaaaactgaacggcatttaaataatggatgcgagtacaggctgcgcttcatgcaagtatgca

SEQ ID NO: 16027 - DNA, 87139 bp, Oryza sativa
aacatttgatcaatgtgcagaccagccacattgtcagatcactcatcgttgtacatctggttgttatcatgtcactttccgttaagaggttttggctgaatcaatgccacctgccatccatgatctccaggcatgtcatggtgtgtgggggaatctcgagctaggcaagataccatgtcgtcatcccaccgatcaacaatctagaatcttcattttaggctacaaggcgaaaaccacaaaaattgtataggtaactatacaatattttaccacagtaacttttttttctgcgaaaaaaagagactaagataccatatatcccccataaaacaattaatttaagtgctatgttcataacaaagtacatttatcataattgcttaaatcttactcctaaaatggtgggagtaatttttttcggtccctcttcaagtaactatgagtaaaactagaaattttttcccagaaaatgtcaagaatgggaaacggacctcaaatcaaatcaagtgtggtccttgacatgcatgttccctgttcattagtgaggacaccgaccctacgacggaaaggagtaggtagaagaaaacaacatcccgagaaaatgcctccccggagactccccaaaagcaatgcgcactttagcgctttgagagtccccacatgataaggagatctacgaattgatgcttgatcgatctctctttgccttaaattagcttcatttaactcgccacctctcgtgtttcaggcttccggttattattcccgacaccatcacacaaaaaggctaaagcactcgccagatttcaggagtagtagaatttaataattttttgctgcatgatttggagaattagtcccctagcatctttgtgttttgtatacttgtgtggccagagagtaatcgccatgaaagcagtaagattttttgcattactacttttaattattcagtccttgccttgcaagtctggatcttctttttgtaccgcatcatttttttttattttttttgctttccgctgatgctttgatgttgatgcctatcaacccacttgacacttgaaaatgcgccttgctatctttgagctcctaaagaaacgtgcaatcgagaaagaatcttgaagaagaaatgatcgagttgcctggccaaaattttacataaaacaattcaattcgtgtaagaaccagggaaaaaaaaggtgtatgctctacatttattcaagacagtgaaagtacatgcctctacatggggcataatattgttttctgtcgcggttagaatactggaatttgaataattatgtcctcgatcttgtacttacataggagaagcaagattcgaaatgaccacccagactaaacatcatatgtccctttgtgctttgcattatttttgctagtattggattggtcagaagtggataggtaggatgggtttatcagcttctgagatgtgatgcagctgatctcttcatgacttggcccagttacattgtactactgtgatgtaggagtactgtgtgataagggagtggaccaactgacagtaacatgatgataatccattgcctgtatcgtttccgggatgaaacagaacaccttgtatcttctgctgcagctatggatgctctctttcaggaaggaatcgtgctagtgtttgtgtgttggacatagcaggagaatttatgatatcaggttgctcaagttgggatcggcaagtggcaacagctagagcaatcagagttacaggtgcaaggcaagaagctagtagtacctaactttgctagaccatttgggacattgactgggatcagattaagcaaaagaactactataatttttttcaaaaaggagctgaaagtttgcttgtcaagcatggaagccattgctttctgcagttttctttcgttttcccaatggttcagagctctgttcccttcttgccttgattaagaaataaagcatactactccatattataaggagcaaggtttctcgcatgtcttgattaagaacagtaaaatttctgggaaactgtagagaagactccaaattgttgaggtcagatatagctgtggccttgcagcaaagtcgcaccaacagtagtagaagactattacaaatcatatactacaccactagtgtggttcagtcatgcatgtgactgttgcattcactggattgaaaggaggagagcaacacaagccatttttaatcttaagagccagaagtaaaccctccttctggctgacatttttattttgccatggaacagctaggcttagctgcaaggttgcagttctcatatatttttgtaaactatatattaatgcctgagccgtttgccttagaatattttgtaatgctaactgtcaaccaggtgataaattatacaatattctctgagattctactaaatgattatgcaagatgagattctgtttgattttttaatgtacagtttaggaagggtctgcatcctttggaggcagccaaggtacaacaagcagcaagacagaagcaaacaatttcttctttcacattaataaaaaagcagtactaccttccaacttcatgacatacaacttgagagaaaaaaaaatctaaatagaagagagttggaaactgcctatgacctcatgaactgctacatgcattacaaaaacaaaaacaaaaggcaagtcagacttagcaagccatgagataaagataccctgaatcctctctgttttcttcagattattgagcaaacaaacaagtccatattctctttaagccctgatttattattgcctcacggcctcgacttgcctcatctagaacaagaaattaaaaagaggctattactttaagccgaaaccaaacggcaaatcgatcacgaaaccaccaattatacaacggaccctgcagctggttcggagctaggccccccaagaaaaattcaaagaaaacatgcatgcagcctcatcctcacatgccactcgaccaaagatccaaatgaaaaatccaacttgatttggcgcattgccatgcattttcttatactgccaaggccggtcaagagcgagctagccatgcgagcgtgaggtccagtcatccagcattagccggccggccggccgctttcctttatcgtttctctaaatacgtcgtcgaattgcctcatcccaataaacatttgcacggttgcggcgtcgtttctgccacaaaaccaaaaaaggaaaaaaaaagaaagaagttttcaaaaaggaaatggagtcgtcgtcggcgttggaattatattttctttgggagcaggagaacttagagaggtgtgcaataccacccctcagttgcttacgacttattataaaccgtaatggttttttagcgaaaaaaaattacaagtaaaatttttatatatgtattcttaacgacttaaaaatccaatgtttaaaagaatacgttgaaaaaaaatcaaaatcaatggcatcttttttatatatgttcttaacttcaaaaacaatgttttaaattttaaattttagtattgatttgtaagtcacagggcacatattaaggcccgcaaaatggcttctttttgcttttgatttctggtgcgtggtcagcttcgcatgcagaatcatgggcaggcagcacgcaggacggggatgttttccggtgtgctgcgattaattcagtgtgcgtggcgtacagagaagtcagggtcagaacgaactcggagtctggaaggcagaaggcgtttgcttttcaacttctgcttgagctgtttagcctcttttccgttccttgcaactagaacacctcatttccacgcgctgatgcacgcagccacctacggtagggccgttgcccatatcttctccaggggacatgacaggccaggggacatgccatctacaggagcagagtgatgatgttttctgttattatctgctctagatgcaatgcaagaattgtcttcccggtgatgtatatattcagagaatgatttcatttgaggtactctatccgtttcaaaatataacaacctatatcgtaaatctaaacatttcataggatagttctaggggaaaaaaatcaatttcaagcttcaatccatcagggttaagaacaggagatttttttttctgtgtttggatatttgatttctggttatctagagaagttgactttgctctagagaaaagctcacacattttcgcgaggatatacggcgctgtggaccagggcgatgggaattttgatcttgacataaccaacgtgagaacgactcttctgttttccattggataaataaatgcctgcactcagtgtccatttcaagatatgtcactgtacacgaataaattacaatgtggcaatcgaattgaccgatcaacatgtactacagctatgtttagtttagcgcaaagtttaaattttggttaaaattggagatgatatgactgaaaagttgtgtgtgtatgacaggttgatgtgatgaaaaaggactgaagtttggatccaaactttggatttaaacacagcctacatatgtgcgtactgtagctataccatactgtatctgcgcccatacacagcttgtggctgtgtttagttcagcgtaagattttggttaaaattagagatgatgtgactgaaaaattgtgtgtatgacaggttgatgtgatgaaaaatgactgaagtttggaccccaaactttgaatctaaacagagtctgtgtataaatcggagcgaggcacaacttcgtatgctcgtaactggtgggcaccaaaataaaagctagaagccgtgcattttacctaacttcacaccagtgattgattccaatgtcaacttcaagagatgtcacgttgctattcgcatgacggagtggggggcagtagtaggcttttactgctgaaccgacacaattgagttctggtgaggtgcaatttaactgtgatcaatgatcgatcagagttcggggtttctacaaagccaaacgccaagggtccacgctagaaagaggttcagcgccggacaaaaacagttcgatccaacagctctcagtttggaagctgtagcacttgcagtcgtaaaataggtgaaatatcagtgtgtgcaataataacactgcctgtctctgccccctgaacctgacgtgcttgcactgcaggcagtaccactatagtgtactaggagtacgtttcttgaattgatttcctcggatcaagagacgcacatatcgcaggtttcaaggtggtacggtgagagtacgcgtatatctttcgctgatgcgatgattgcagcggaagatctcaagataagaaatcaacaagcgttctatctcgatcgcctggaaaactgctactgacaactcctccacgggtgagtgagaaacggagaatgtgagatccgagggcgagatttgtttaagttgtacacttggcaaattaacaacaaacaaacaaacaaggtggggtcaaagttttctcaaccctcacacgctcctactcgatctcttccatcgcgttccactgggaatttgggatggatatataatgacgtcgtcgcggctcggcaatggccacgaggccaaccaacgcataagttccaagcttccaatttcccgctgcattcctgcagccgccgcccacgggaacagccgagccggtcccgttcgcccatccgtacgtcaccccgtcgcgctcgcgcatcgcacgcacccacccgtcgtcgcgcgcgtcaccgtacgccgcttctgtcgccatggcctcctgtgagcgaggcgtcaaacgtggtacacgcccaggtagggagcagaggagaggagaggaggggacaccaacattggccgcggccgcagcggcgagtggagggatgagcgacccgcggcgtcgcccaaggggcgcgcgtcccctccgcatgcatggcggccgccgggcgaggcgatcgcgcatgcacgtccttgcatggcggacggggcctaccgccactagcggggaggacacaataatgcgagctcgatctatcgctatagattacggactagtggtaggataggtgaattctgttgcagattaatctactatagtatagtccttggcacaatttgagttcatgataggctattaggctgtgacgatgtgttccttttagattcgacgtagatggacaaaaaggtctgtcaggtgttgaccatttacgtcacgactatgaaaatggcttctggcgagcggagagagcatttggcctgagatatttttagcctagcaatctagcatggtgccaaacggagttgatgagcctagcgaactgtacgagactgacgccccttttcttcacaggaaagacatgtcaaggaaaaaaaacaaaacaaaacaagaaagagtaggataatcgaggtatcaaactaaaccgagcccactagcccaccaagcccaagccgggcccagccttgcttgggctcacccgtaatcctttccccagtcccagacggaccaggccgcctggcccaccccactgctttggtctggtctgtgcttcaatcatcgtgcacatgtctagcacacttcatatgcacttcaagcacataatattcacatttccaaccaaaaggcctatgcacggagcacattcaacctgaatggcatcacctatcaacctgtggcattccaagccactgcatgtccacaagaaaggatgtatgtagtagtagtaaatactggagtggtacaaaatggccacattcacgttccaccagcttttctacaactagccaagagcccgtagacaaactaagtttctaacttattaaatcaattaataagcatatatttagtctaagtagtattatgattttccttattgaacaagtaggtagattagggaagttctattgattgctgctttctccagaccgccggaaaaagcatgaaagaaaaggctcgaattgtacgatccctccgtcacttagattgaaaggggtgatctttttttccgaatgagaaagcctttggccttgcaaatccgtttttgccgggcacaatagacatatctgctcagtcacaacataaggaacccccaatgttccgataagcctacccggcctgacagctttagttgaatgatctgatcccgaagctaatttgagaaggagtcaatagtttcgttcaaagaagagtcaatagtgaaacaggaaaggacacgttaaagggtatagattatgggtactaaatgtcagtggtttgagtagtgtgacacaacaaacaccaccactatagtatacataagcaggctttactatcccatccgtgcttcttccaaaagaaacatcaaaaatacatcgatgtttctaagctgctagtcctgcatacaaaactaagttgctgctttcaagatgttggcaaccaaagcacacccaaaatcaggaatatctattacagacttgcagtgttctctaacctcaaagcaatgcgtgaccaaacaaacgctactcctgcttcatctttgattcaggctggtagcatggatgcagcaacacatggatgcacaagagccagcagggaagatggacaagaaatacatacagatatgtcgcgctgctccattcccacaagaactccatccacagccagaaatcaccaacaatgtctactgtccatgatcccttggatagacctttcatgataagaaatgcagctggagggaaacccaagacggtgagaagtatgtttgaggccaacaatactgtgcgaggtaggaaattcatctcgagctgtgccctcagcggtcgagaaaacaagcacattgggatcaatatcagagccccaagctgagcagtagcaaaatttatgatcgacataagccccattcctatggtgatggaagtgatcatcgtagcttttagaagcttccattccacaccagcacgggatggagagccaaacattgcatacaggatgatcaatatagtgatggagagaacggcccaaatcactgcatactgtattggcatagcaccaggaatttggctaatgtagtatgggagtaaagaaacaagtactgcccaaaattggatgataagtagtactcttgcagatttaagccatttccacgatccaccctccatttgcaggtcatcagcattaccctttgttttacattcatcctccaatttccccttggttttactaccaccagcaagagcagcagcaactattgggaggggtgccaggagtaatgcaaacggaatcatatatacaccaactgaaatgaacttgcttggggctgtaaggaaatacaggaaaaacgattgatggaacttctcgagcaggttatttacagagcgcaccaccccttcagttaacctgaacaaaaggcattctcaaacatgtttagataatcttgtggtgagatcaacataaatgctgtgctaagcatctgctctacaaaatgcagcaggtgtattttactcaaaaataaagtgaaccctttaatatgataagtcagaggtcttgtgatcctgctcctttgttaagttcagtccaaaacttcatcaatttgggggaaacgccaatataccattgcccgcccccttatcgccctatatgaaaataccgtgtgttgcgacaatgacaggtgatgtcgggtatggcatgtcattgacacacactggtgtttttggcaaacttggattcaggcaaaggcaacagtacccttcccttatcgtttccattttttttcttgaaataagttaaattgtatgttctatcattggataagatcacagtatgctaatgccattagcaaatcctactatggaataatccagacacacatactgacataaggacagacctagcaaatttttgactgttatgaggctgacatgcaatcagacctctcaccagaataattccgcacaagaatatgcaaggttaacaggccaaggcagttacagaattattttataatcagccttttgttgcctgagattatacagctttagcatcgaacatgtgctttaatgctcactaatagtatattttgacaataaaattaattgagcatcacaaagcaattagatatatgaaattaggtaatgtttgacaaagctgaattactttggttatcagagagaaatacatacatacaaatggcacaagctagagtttgtttaaaaccttcagtatgtattcagttttctggtatctgacaatcaaacacttttgaataggtaaacatgcactctaattaagtaatgaactgcttaatgcatgtcaacaatacctacttggcaacatatcctatgcacacaggccctcacgtgtacacacgtgtataccaactaaaaaatgtcaccaaaaaatctagaaaaaatcatacccatactttcaattgtattacacctagggttaaaatcttaacgtcaaattcattatattttagccgtaacaaaaaatctgacagttttaaggttgtaattttgtcagaattttatcttttttgttattctctatgtagaatgaatttgaagatgcgactttgcacgtagatgtaatactattgaaagtacatgtatgaattttcctagaattttttgtgataatttttagttggtgtacacggtgtgtacacgcgagggcctgtgtgcataggatacgctccctacctacttgctctaaaaaagagcagcttaaaataacacaaccgtaacacaatagaaactgaccttccacccctgagaagaaatgaagatttagcattctcgtttttaagatgaaatgctggtgcaaattctaaagaaactgcatcaacttgatagtcacggaaagcaccatgagaacctgtgggcactccaagagcctgcagttgcaaagccaaacaagaagggattaacagagttgaaaaaacttatatttttatagaccaaatggaaatgaatgaacaatatatatttcaattacctggttatacatagaactagcaaggtttgcagtaccctccacataatcaggaacggtcacgtcaagcttccagtcaggatttatttttctcaacaaactcccaagattttgaaatacttcagcaataaccctaagccatgaagagctcaacaaggaattaaatgtctcgacattcacgcgaaaaccttgtctatgaacagctaaatagtgcaccacattcagaaggtccaagtttggcatttggccattagatgcctctgcatacatcgtgacactatctctatcaccatatttcctggtttctccaactttaaatatgagtgcagcagccattgttccagcacgtttgaaagccataagttctgccttttctgcagtgccatcaggtttatataaaatttgatttgcaccatagatcttggtatccaaattcactgggtgactcagaaacataggattatgatactgatttaaccatgaagagaccgcagagtactctccaaattgtgagtctgcagacagccagacaatatcctttgatagccatgcagctcgacttaggagggagaagacagagaatccaagtgcaagtgataataattcatttggtgtaactttctgagaattataaggagtaaccagtacaattgcttctttgccatcacctcgtggagcccgtataatgccaactgtgttaatgccaaagttggtgtaggttccattgggtttggctgccatattatttgtcatggatgtaaagaacttcagaggatgaaaacatttgctgtcagggaggaactcatggtaatacacttctgctcccagattttttgtttgttgtgctatgaattttgggatctccctacaataatgcataaaattagacattgagaaaatcatataaacttacaagctatggaaaacataggattataccacttgttccttcacttcttgtaatttattatcacttattcaatgtgcagagtatcatcatcattgcacaaacttataatttacttttagattaatatttcataagcaaaaatgtagaagttatatttacatgtgtgtctcaataggaaaggacatgacggtgcttgatgatgctctgaacttatgcgcagcatccaccattctactcatgtgctagggtttccactcaagtgcatgtatggtgtgcgcttgtgcatctacattgttttctcataaaaaacctgaactttgtatatctctgacttttattttatcattcgtttgttactacccatgaaaaaacttctttgcgtttagagttatgtggataccatgtctatgctcaatagtataactaaaatgcggtattaaggatgtatttcatcagaggaagccccttaacagtagactcaaaatagagcatcacatgataattaaacattatgtacacagtgcaatttttgttaaagcccattgtctatgaaggaagcagaatatgaaccaagggaactctatacagaataacatacgttgttccacctcttgattccccaattgcagcttcaattcccttcgcaaatctgtttgcttcctggacatcctcagtagaaaataatgtattcgcagagcctacattttaaaacaacttaatttgcagctaataccaatgagaaagaagcgtctgacaatcagcatcggagatgattgtttcatggaatagcagtataagaaaaaagcttaccgggtataagagcgttctctgataggtacgtgttcttggcaagcgaagggaggaagaggagcgcgattatgcccgccgtacaacacacagcgctggtcacagagggtgaacaatgtcaatgtctcagacagaaagaaacaggagaatcaagattggatcaaagacgaagagatgagagcgaacctgaagagtatgtggtgcgacgcgaggaataccccgaggcggacaatgaggcgcggcttcggttttgcctcctccttagctgacgacgccatggcagcaacttggttcaggtctggagaccgggagactaatcttggagcggcacagatcctgtctaccctcgccgcgcggggcaggatcccatcaaaaactgccacagagctggacctccgcctccgcgtgagcttccacaagtagatatgccgatggagagcagcgggagcgggagccaccagcggttctcccggctggggaagggatgcggctccggcgaagtggcttggtgggcaagacgagcggatgcggcgtggccagggctccgcggcggcggaggcggaggaggagagaaggcgagcgaagcgggcggcgaggggaagctgctccgtcctacctgctcgccggaggtgggcggggggtgccggcgagtggtcgccggtgggtcgccgcctcgctggagatcgcggcgaaccggcgagtgaaggagatgggggaggggcaggcctggccgcgggccgtcagaagtaaatgggtccagagagaaaccggctcgtggacgggcagctcggcccacctaaggcccacgagtcaagcgaaatatttatccttcttttttctaaaattaaagttttcatgactggcaaaaacccacaaaataattttgggtactaatatttatcgactgaaaatttttcacctgctgtattgtttttccacgcttgtaatggttacctctcgttcacgattgctcgttgttggattttcgttaatgatggagaagaggtgcaaagtagaggaggataaggagtacacacgactccgtggtggccaaggaggccggccttgttgagctatcggagaccttgaagagtttgtgtcacctcatcgacacttgctctctctattgtcaatgtgtcacgctggactttcccacagaaagccaaaagagtcaggacatctttccctcctaactgattggcttatttctcctcttcttttaacccatcgtctcataattatgtctctcaatttcgaagggaggagtgctgtagctactctctccatctaattttgatagtcatatttcatcttggtgcacagaccaacgataagtgattctacttatcatccatttaaatatgctactagtcattcctcataaacaagcgatttattaatatttactccctccgtactcgtaaaggaagtcgtttaggacagcgacacggtcttcaaaacacaactttgacttcttgtttctataaaaatatttattgaaaagtgatatatgtatacttttatgaaagtatttttcaagtcaaatctattcatataatttttgtattttcaaaatcaacaacttgagagttattaatgatttatatttccaaggtttgacttaaacattgtcctaaacgacttactttatgagtatggagggagtacatttctcgatacccatgtagccaatcttgtgtggatgaatggagagtcacgcattaaattcaaaaaaatcattaagatgataagttgttagattgaaatatgcctatcaaaaataaatttttcagatttggaaatatgactatcacaaatagatggagggagtattaattatagataaatgaaacgggtaggatgcatggattgttaatcaatgggtgcattatattggctcctcgaattttgctatagctagctcaaattttgaacacagatcaattaaaaaaactaaatggtgaaaaagaatattgtgcctagtcgtactcatcgtgatgaagtttgtccgttgtgttttgtacgtgcctatgacatttttgttcgtttgtccgttgtttggttgcataggagatcaaataaattttactccgtgttagatccctcgtctcttgatatttgacaatttcatccatgaactgagatacagatatgtttttttttcgaggtttagataatatatacaacaagattccccccaaaaaaaaagatatacgactagattggccaataataattttccaagcacgagaaaacaaacgtgactacacagctagtggctaccactctatttataaagagaccatatccacctatacttcaaataaaattttatcttaaattactcatacgatctacgatccgattacaccgttgtgttcgtaacaattaaatctttataacaagatctcacatgattatattttgaggaaaaattataaattacttttataatatatctaaattacttttagatttcactaaattacttcttcgatatacaaaagtaaattcaataaagcttaaaagtaatttacatatattatagaagtaacttataaaaaaagaaagtaactttaatgcatgtattttttcattggatatgactgcttgtttgtactccaatagtatatatcttttttaatctctttaataacttatatcttttaaatcacatattgtttttaagatctatttgcatcattgtactccactcaaaatatgtgacaaaataatattcatattgaatatattctcattttattaatttaaaagtaatttattacatgttagaaagtaacttccatgttataagattatatcttatacatggttaattcttatgatttattctatcagtgttatttacaatccatcaaaggtttttatcttcttttttcatcctacatgaaaaacaaaaataaaaggaaaaaaacaatcggtgattaaacatatgtatagagagttacttctaaaccagaactatgcaaaagttaattccaattaacattgaagttactttttaaaattgttaaacttacgtgtgttgatctgtgctgattaaatttaatatctagataaagtcatatttttatccctacaacgaatctacttctaatgtcgtgacaaagttacttccgttttgtttttagatatttttataatatatatgtaaattatttttagactttattaaatttacttttatatgtctaagaagtaacttagtcaaatataaaagtaacttatatatacgataaaagtaacttacacatataataaaagtaatttacaaatataaatattttttcattgtaatataatcgtgtaagatcttattgtgaagatttaattgtaacgaagacaatagtgtaattggattgtagatcggataggtaatttgagataaaactttataaaaaggaagaaaaagacatgcatgtctaagaggaaaaacagcatatacgctaacacgtgtagcagtactttttctcataattgtttcgtcgctggttagcactaaatcgagagactactcggtttagattttgctgaaaacaaaaggcaaagaagactgggatgaacatgggcctttttacgctttgacttcaaaggtagcccaggagaagcccgataatagtcaggcgaactgccgattgccgaagggtctctcacactctcacagcagcatcgcacggtcgcgcagaatgggcagaagagaagatgtcgtcgaagtcgaagccaaccaaaactgtgccgccggctgctcggctgcgtacgtgcacggcgcacctgcgaatgatctggccaccgccaccgagcggcgcgcggtttgacccttgacagcctcagcccgcgtctcggctctcgagcctcgcgaggagaaagcgaccggccgcgtgccgccgtgcaggagctgcatcgagaggctccctgcactccgcgcccaatcctgaaaaatcccctccgcccgccccgcctccaccccacgtcctcctcctccccagcagtcccacccgcgcacgcacgtcgatccgggagagagagagagagcgcgatgacgccgctccacgccgccccgcaccatgccgcggccgcggccgcggtcgtctcctcgccctcatccgcgccgctcctcctccgcgccaagccttaccaccccaaggcggcggcttgctccttcaccgtgaccgccaccactccgtcgaggaaaggttagcaactcagacatcattagaaaaaaaaaaaaccatctaatatctgcgtgcgtgcgtacgacgagaggtcacggcggcgcactgtggcaaccaactaggagtactttggctcgtctgcgctggtctgtgccgctgtgcgcgcactgtttctcttctcttgtttattgcttgcttggccttttccgtgctcgcgtaagcggataagggtcgtgtgccatggtgttttgcaagcgtacacctgcccctgcgtctgactcgacgagccgtttctttatcctttttttttttagctgcagagagcaatgtttgatcatccatataaaactctcgcgcatccgtttttctctctcttgctggggtcaagaggtcaatacacagttcggtccttcaaagatttggtcctttttgctatagtttagatcgtcgatttctcaggttcttgacaccgcatggatggtaggatcaagaaaggcatcgccgcgcaagtcacgattcctctcgccattttaactgatcgccctgtttctttctttgcgccagctttcctgtcgtgcccggatcacggccaggcggcggcgggggcggcgccgccgcgctccgccccggcgtcgtcgccggcgctcatctcctccgtccaggacctgtacgacttcatctgcagcggcccgctcgtggacaggatcgggtacaccaaggagaagatcgccggctccatcgaccggtggctgcgctgcggtgtgcaggtggcccggctgttccgcctcaacgagctccacctctcggaggcggagaaggccaggatataccacttctacatccccgtcttcctctggtgcgaggaccaggtcacggagcacagggccaagtacaaggacggcgacgagatccctccattagtggtatgcacatgaaacatttttctctttatcatagaagaagctgatgaaatctgacatgtagctttgtccactagtgcctgatagcatccattccaaacctctcatggcatgttccatcaggtggacatagcagaacatattcctctgcattatgagtacatcgcacaaaatatttcatcatgaagcatctattgctttaatcagcatgacacgcactcatggatcgttttatcacgaagggatatattaattataccgaaatgggaactgtgaatatcaagtcacaagaacggacaagtctttatctgattctaattcacattttgtaaatgaatcgtctttgtgtgatgtagattggggtcagcgctccccaaggcagtggaaagacaactcttgttttcgcacttgattatctttttcgggttgctggtaggtgagttcttcttgtcattctagtcatgttatgtttacccgtatcaatgaaatttaaaagacaagacttttccgtgccttaggaatgccgctacattatctatcgatgacttctacttgacggcagcagaacaggtgtgagtcttcaaatattgtgcaattatccgttctgttttactactccaagtacttggcaaattagtgaaaacaattaatgaatatttccagggtaaattgagggaaagaaatcctggaaatgctcttttggaggtacaaagaacaccccagatccaatatacactgttttggttcaagtattgtattgtgaactgagagtaaataaccaaaactttacagcttcgtggaaatgctggaagccatgatctcccgttctcagttgaaacacttgaatcgctgcttaaactaactaaagaaggtactgatttttgacaagtatatatatcctcttcagaccaattttattatatttgaacagccttgcacatagtatattttttattttggagaatttattgaaatgatatgcatcctagtttcaatgtaaaatagtttgtcactgatattacaatatatttaggtttgaagatgaagcttccacggtatgacaaggtaaaaggttgcagttatcgtcgcctagatgatttttataattgagtagctgcatgatacatgtcacatgtccatgtagtctgcttttggtggaagaggtgatcgggctgatccttcaacatggccagaggttgaagggcccttagaggtaagctcatgttgagctgtagggctttttgagatgagaaaattgtaatttttgaacattttctatgtctgttttctctgtcctaggttgttctttttgaaggatggatgcttggattcaaacctcttccaaatgaagttgtaaaagcagtggaccctcaggcgggtttccgatattaccacattatctgatttctttgtttctcttttacttaatatgacttgccttttttcatcttcagcttgaggtggttaataagaaccttgaggcatactacgatgcatgggacaggttcattgggtcatggatggtcataaaaataaaggaacctagttgcgtgtaccagtggagactgcaggtcattaccagatttatctaagtaactaatggtgtcagaaaatgcacaaccatgaattgcaattttcttatgttatttggatttacaggcagagatagctatgagagcagatgggaaaccaggaatgtctgatgaggaggtttgtttctcacatagctatgcattcattataacatcctattggcttcctttccgtcctagtttgataatttgctaatgccttgctgttactaaccgtcaagtaaagtagacaaattgccaccaattaggaatagctcccactgaattcagttgtggccaaactgagtaagtacaccactcacatcagtacatttgagtaaaatcttcagggacgcaaaagtacttgctactcagtgaatcacctctaaaaacctattcatgtaacagactggttttccgtgttgaaaattgaaagaaaacagggaattcccgtgattggaaaaagaaaaaaactgcatcacttcacctgaaagttgagcaacaagaactgttactagtattgaattatctgatgtattcttcagtgaacaattttatgctattcactgaagctcattcgagtcttggattctctttctaatgcatttgatgagctaggttaacatgcttctggtaattcttgcaggtcatggattttgtgtcgcgctacctaccagcataccacgcatatttgcccactctatataaagagggaccaaacggctcgaacccagaccacctgctggtcgttgacatagacgaaaagaggaatcctatgtggggtagatgagccctgaatgtacattgctgaaagaaaatggatcttctgacccaatggtggagtttgggatatctgatctttctgagaccacatattccaagcaagcaccactggcctcttgtttcttgtggcttgaacaagtactaaacgtgtaaaactttgatgtatacgaaatcttgctattacttataaggaaatcggaatcccaattcattttgctgagtgcatctgtgataccgtgatgtgatgttgcatttgggtgttttggaatttggacatgaggttggtgtatactatcgacaggaatatatataattttataatcttatagtatgcatgatccgttgtagtctagctggttaggatactcggctctcacccgagagacccgggtttgagtcccggcaacggaattttttttgttcagagggcgaacagatttttgatttttttttttttgttcagcttgagggcttattcgatttgtaggattttcaaaccgtaggaatagaaaatacataggaataatgtgggaatacatgtgcaaacctatagattaaaaaacatatgaaattttcctatggttaagttgcaaacaatccaaaggattgaaaacattgggttgttgtcacaccccaatctttttttttttggttcagcttgagggcttattcgatttgtaggattttcaaaccgtaggaatagaaaatacataggaataatgtgggaatacatgtgcaaacctatagattaaaaaacatatgaaattttcctatggttaagttgcaaacaatccaaaggattgaaaacattgggttgttgtcacaccccaatctggcaccgccgtacaacggcacctgacaggagcgtgtcgtaggaaaacggcatgaaccgtgtcctacgaaaccgcgatctcagtaccagtcccaggacatagcgctggtacccacggtgacaaacatgaatcattacaaatccttataattaatagaagacttatttaccttaacttagattgcagctcaaacagcccgagaatgcaaccgacgacacggacgaggcaaacaccaacaacagcagcagcggaaccaaccaacggactaacacccaacgccacaggcaacggcagggaactaggacgaaatcctaatattcacttcacttcaacttcatcttcagagctggcagaactatatttatatagagagcaagggtgagtacttacgtactcagcaagctaggggaacttaggtggttaatgcaagcttcaagggaaggctgttattttgcaaacagttttgttttcaagttttcaacaatctaagtgtgtgctttccacaaccagagcgagacaagtctcagctcggtcgggaggtgagaagtaacaaatttatttatcaagatttgcacaactcccagagttggcttcaaatctggttttcccaaaccaaaccaattttccaaacttcccgataatagtggtccccaaacgaccaatcacttccagggactcccggtcccactgtcccccggatagctaaatgcttcccaagcattaggtttccaaaacttaacaccttttcataaaacagggtaaaacaaaaactacgctaaggaatcacctcacatccgcccatgaccgtgggcacggctgtttgaacagtttgttaacctctgcagagggggtacactttacccacacgacgttactaacccgggtcacccaacccgtgcagaacagccacgtctggcgactttgaggctttcacgacaaggcatttccaaagccgacacagggttgccatatgccaacgagaggggtcccagaccaacaacaggttaggtcccagaccatactgtgccaggaagcccgggggttctccccgacaccaccccgttgaatccacatgtctcttggcatcaaggcacccctgattagctacttactcagccaggggcgtcccattccacccatgtggtcgcactattgtatgctcggatgtaattccaaaggaatcggtccttagatgagaccgcacaagtattccgcccaggaatggccttgtgtcgcgagttttatttttaaaactcattttctttcacaaggcaccgacccaggcgtcgggttttccaaagcttttgtaaaccaagttttacccaagatgtttctcagattttaagtttgaaggcaaccgtcgatactcgtgcagagtgcacgaataccgaggcgcaactaggtggttacaagggaacatgatataacaattaacaatggaaggatcagatgcaacaagttaggtaggcccaccggtctgccttgcagacggggcaaacagattaagtgcaatcctatcaatgcataatattttgcaagcaatataattaagttcaaatataggctcaatatgttcaaaggtggcttgccttgctcagggtcttcacgaagcttcacaaatcttcgagaaatccgcttgaagaaaaatatccgataaccgcaactaggcgcaaacaatcaaaaacctaagcaaagaccaaataaaatgtcctatttaggctaattaatagtgccattagatagatcacaatttaatggaattactggaagtggaacggaggcaatcggacgaacggattaagggatatgaattttggaagtttaaatgaatttttctggacaaggagatgatttgtcggaattttctggaatacgagaaatggtttatggaatttatagaaataatattctcaataatattattgacatccactgacatgcgggctcgaggggacgaattattggaatctctggattaagaggatgggtttatggaatttgcaatataggaaatgatttattgaatttctagaaaagagaaatatgtgtggagtattgaaaaagatattcccaagaatatctttgactcattgacacgtggggccaacaagaaggtgagagagagaggagcaattggagggagtaattgtggacttttagctcttgggtgtgtgggcactggactcggaggagggactaaaagtgaactttttccgtgtcatcaggcctaaggggaggttggctgatgggccaagcccgcgagcgagaggaagaggaggcggctgaccgagtcaagcggggccgggtggctgaggtggcggccacgtggtcgtcacgctggcaggagacagggggagaggaggagcgcgtccggagatcggacggctcacggcggcacaacggcgccggcgagcggcggcgagccggagggaggggacggcgccggaggcaaaaggaggagaagttgaactcattccacggctcggattagggcgccggggtcggagggggggcggcgacggcgtcaggcggcggcggcgggagcggcacggcgcgggcgcagaggccgaggctagcgactgcggcgacgcttctgggaggtccgaggggtcacggggcggtgcgcgaccgtgcgcacgacggcggtggaaaggacagcacggcgcaggagcaaaagaggaggccagcgggcggagcgacggttttggggtggctcaaggggactcaaggagggtggcggcgcgaggtacggcgagaggggagagaggccgacggcggcggaaaacagagccacggcgaggcgagcagctagacgatgtaggggaaggatttaggctcggggctcaccggcaagaggaaatgacgtcgacggcgattttgtggtgggagagggaaggccgacgggggagtgcggccgggatttccgaaggcggtggcgaatcgggaccggcgcggcatccggaaatacggggacagggcagggcggcacggacgggttttgcggcgaggtggcaacgaccgtcgttcggccaaggaaggagaaggacgcggcgaggatggaacgactcgacggcgagatgcctccggacatggagctcgacgcggcggccaggagttcccatggcggcagagcttcgccgcttgggggaaacgaagcaaggggggaggaagcacgggggtgggttttatagagggggtgtgggagcgtcaaggtcggttcgggggagcatgcgagctggcgctcggccggcgttcacgggcgacgtcggcgttttcgtgggcggcacgaaacggcggatggcgcggatgcgatgggcggtggaggcggtggatcgtgcggtgggaatcgaaccgcgagcgcgggctggcgcggctcggcgtggtcaaggtggggcatggcgagctggcgcgcggcgtcaggggcgctcgctgccatggcgctaggtgccaagcggtggaggtagggcgtcggttcgagagaggaaaaagggagaaaggagggggaaaagggaagcttgctccatgtcgcttcgggaaaaaaggcgaaggaggaagaggggcgagaccgagtgctggctctcgcccttggacgcatgcgtgcagagcagcagggccgggcggcagcgcgggcacgggcggcgtcggggctgacgcggcggcgaccgagcggcgagcgcgcgcgcgggaaaccgacgggcgaattcaaacggcagcggcggaaatcggcgccggggagaggagttcgacgagaacgagagatggagagagagagagagagagagaggaaggagacgagagaggcgctccctctcttgctcggcgcgtgcagcgcacgtgcggggaggaggaggagcgaccgagaggagaagatgggccggaaaagggaaaaacggcccaacgaccgagagggaggtgaaatatactttttttgaggaatttcttcaaggaatttaaggagcatttgacattggatttgaattcaaattggatatttgaactcaacaaaatatggagaagccaaggaggggattcaaatagcgaattcgatactttcggaaatgggaaggaatttcgatgaggcgtgattttcgatgtcgatgagtggttgaagttcaaagcgagaattgatattttaggaatatgtttgtatttggcagctcaaggattatttgagagggaaacaaaatgagaaatcaatgttcgggggtgaatcaaaggatgtggcggtagaatgcgatagatagatagatagatagatagatagatagatagatagatagatagatagatagatagatagatagatagatagatagatggatggatggatagatagagcgatggagacgaggagagggggaagcttggatgttagagctagctcaaggagggaatttgatcggagaggctttagggttggagtctggttttggattccggaattaggcgatatttgtgctttagggttggagtctggttttggattccggaattaggcgatatttgtggttatggtttctggagtgaaatccgaatagaaggattcgaacttcgagattattttggaacagaaattttgaggaggcgatctttgatatcagggtattgagacaagggagggattttaatttgagatatatggcacaacttagactcaacactcaaagaatgaaattttcgcaattaggatttttgtaaattagctttttaatgccacgcgaaaagcggagcgttacagttggagtggattattttttttcctttgttttccccctaagggcttattcggattacagggtaggaaaaaatgcaggataggaaaatcgtaggaatatgaaaggaaatcacatagaaaacagaggattgaaaaacacaggaatgtagaagctaagagcattcggtttacaggatagggagagaacaagagcttggagtggatggaattttcctccgtttttcctgtggaatcggcagcaaaggatttttccctacagttttcccacaaccactttttaccatctgaatgataagataggaaaaatatccaagtgaatagtattccaatgaaattcccgtaaaaaacctacaatccgaatgagccctaaaagtggagggatatgaatttttcctttgatgcattcctttgaaacgaatgatagtatagtgctcattccaaaggattagatatttctatacttttcctttacaaatcctttgaaacgaataagccctgaagttgaattcccgaccttttttgttcagctattgaaaatttgaaatcactaccatccacgcgcgatcgtgtggtctacatcgcacagccagatgaatccggattacgcatggacgcagccggtgggcctgcatgacaagtgggcccagtgacactgacaatggctgctcgagtgtcagtgtcaccgtcgtgggcctgattgtgagaagtgagaacacgtcggtgcggtgagccaccaacaggcaggcagcgcctcatccacctttttctcccaaaaaaattcgaatcaggcggagccacctcacctcgccgcggctgtttctcacgccgccttcccccgtcgacgcgcctcgccggaaccctaccacccggatctccgcggcggcggcggagatggtgagcgcgctcgcggggctgcaggaccacctcaagctcgcgcgggactacgcgctcgagggactctacgacacctccatcatcttcttcgacggcgccatcgcccagatcaacaagtgagctccctaccatcccccccccctccgcgaagccgccttccctactacccttctccctctctctcgattcagtcgcggttggggcgtgtgcggtgacccccgatttcgtgtgattcgcggcgtcctcccgcccccctgcggatctgcgcgtttggacgcacggctgtagatttgtgcgtggctgagccgtttgactgccgtagcttagtggattctattaaaatgtgctctgcggaaagaattgggggttgtggttgtgtcataagtttgtcgctagttcgctactttggggttgggggaaattgtcgccagttctcgttggtgaggtgtcatatgacttaggtaaaatcgagcggtttaactgggtttggtacattttgatgtacaagtgcccaaagcgacacagttaaactggggattatgattgggtgttagatatcatcaggcaatgtatgtaataacgttgaagttaggtgctccacatttgagtatctttggactttcttaagaaaaagcatccttgtttcttcaaaacatcaacaatgttcgcatcattgaacctattggacattgatgctttattcgtaggcatgtgctcacatcagaactcatacattgatgtgtaaatgtattttttaacaaaaaaaaaactgtgctgaagaaagatattcacatgcttgttcatttagtggttaaataaatgtttgaaggtaaaacactgagtatgacaaaatttgaacataacaaaaatgcatttatccttatattgatccatattatgatagataagattcgattgtgcaggcatctaactactttggatgacgctctgattcgcacaaaatggctgaactgtaagaaagctatctgtgatgaagtagaaatcgtgaaacagctggatgctcaattaaaggcgtttaaagaagctcctggggcaaggcggtcctcgtcaccccccattcgctctaataataaatcctttgttttccaaccactggatgagtatccaacatcatcaccagcgccctttgatgatcctgatgtctgggcgccaccaagagatacaccaaatcgtagaccaacacgaggtcaatctagtacaagaaaatcctcccaagatggagcttgggcccggggtccatcaaagactggaacacctagtcgtggtgcaaaacctaatggaagtaaaggaaactctggggcaagatcatccactgcctctagcactggtgggaggaaagggaagtcaagttcaagcaaggctgattcagtggtaatttctgtcaaacagttgttcttctcagttttcatttgagcaaatatgttgtgttcgtgttcttagttttctcctgtaaatgataggcaaaacacaactgttttttcttttggaatcatcaccgacttatctgcctagtgcaaaattatagattcgcaccaactagcatacaaacttcttttgtaatcagtacttctatgtatttatattgccaaacatgactgtattgttcgtttgagcatacttcttagtgtatacaaagtagagttaaccgtttttatgagatgcaagcacttgatgcaacttagtccaacttatctttctttgttcatagcacctattgttaaattgtaatttcgagttgtccctaaatctagtctagagatgttctattttaacttcaatgtaggaatattatcatgaccatctatccttagttcctactgtgctattgtattcatattgaactagcatggtggcccgcgcagattgcgcggctagcatcgttatattgtctctcatataatagcatatttgttttctcattatattattcaaatatattaaaatgacaatataattttaaattttgcagtaactttataaaactactaatgtgtaatattcatattgtattttatatacgtgttagttattaattatttttaatatcaaattttagttatttgtaaattataaatattcctatatggactctaaactcgtcttttaatatttcttttttttaattccgaattttttgtaaattatatttctatatagactctaggctctttttccaatattatttatttttatttctgaatttttattatttctaactgtatttctatgtggactctaaactcatctttcaatattctttaatttttaatttcgaatttcagttacttctaaattgtattcctatattgactttaaactcttcttcccatgtttttcttaatttcgaattttatttatttgtaaattgtatttttatacggactctaaactctacttttaattttattatgtttatttcaaattttagttagttttaaattcctatatggactttatactctacttctaatattccttactccctccgtcccaaaaaaagacaaatcctggtttccgtgtccaacgtttgaccgtccgtcttatttggaaaaattatgaaaaaaaattaaaaagacaagtcacgcataaaatattaatcatgttttatcatctaacaacaatgaaaatacgaattataaaaaaatttcatataagacggacagtcaaagttgaacacggaaacccaggatttgtctttttttgggacggagggagtattttttaatttcgaatttctattttttttcttaattcttaattgtatttctatatggattctatactctacttctaatattccttatttttaatttcaaatttctattatttcctaattgtatttctaacctggactatatactctacttctaatattccttatttttaattccgaatttcagttatttcctaattatatttctatatagactctatactctacttctaatattccttatttttaattccgaatttcagttatttcctaattatatttctatagcaattttacggtccttgaggagataccatgaggtaccatttttttctattgtaaatttggtatctcttggtacctaggtactatgaggtaccatgaggtaccaaattttacactaaaattttggtacctcatcaaggaccgtagaattgctcatatttctatatggactctatactctacttctaatattccttatttttaattccaaatttcagttattttctatttgtatttctatatggactctagtctcctcttctaatattccttgttttaaattccgaatttcagttatttcctaattgtatttctatatggactctagtctcctcttctaatattccttattttttaatttcgaatttcaactatttctaaattgtatttctatatggactctagtctcctcttttaatatttcttattttttaattccgaatttcatctatttctaaattgtatttctatatggactctgctttttctttttctccgattaatgtgagaatttctaggccattagaacgaatgtggaggctcctttttctattactttaataatataatagataggtacaaaatatgatgtactaatgataatggcattttcttaaaattaaccttctactgaagagggggaacctagagcctctatctgtttatcttcatattccaaatacaaataagggcattgaaagctttagttacataccatatacaattctttgcttatcttgtctcatccttctggataggttctacagtatgttcttctatatggtggtcaagtttcttgaaaaccatgtattttcttattattttcttacagagtagcgatgctgaagaaggcaagtccaagaaggggcaatatgaaggaccagatatggacttggctgccatgcttgaaagggatgtcctggattctaccccaggtgttagatgggatgatgtcgcaggtcttagtgaggccaaaagacttcttgaagaagcagttgtacttcctctctggatgcctgaatatttccaggtaatgatttttactgtgctattctatcagattctgtaaccttgcctgaatttatttttgatgctagccaatgttatggccatgcacatgatctggcatgtgcttgttgctgccttttacttggtagcttgaaagttagctggacttgcatacatgttatggccatggacatgatctggcatgttttggactcattcaaaacatgccactcaaatcaacatgcacccaaatcaccgtaccctcaattcagccttcaagttttgatcgtattcatttcagtcttttcttcttgcatgtgaccttgttattcagtttaaatttgttttgatcctcatcctatccatgctcactctatttctgaccagggtattcgccgaccttggaaaggggttctaatgtttggtccacctggtactggaaagactcttttagcgaaggcagtagctacagaatgtggcacaacatttttcaatgtttcttcagcaactctggcttctaaatggcggggagagagtgagcgcatggtccgctgtttatttgatcttgcaaggttctatgctccaagtacaatcttcattgatgaaattgactccctctgcacatctcgtgggtatgtgaatgctatctgtccatacatgttcatcttgtttaatgtctccaaagacaatcaaagttttctcaatactttttagcataatcatgggtgcattgttctgcccagtatataaattctttttgtttgcaagagaagctgagaagcaacatacttgtgcttctgtttctatttttctgaaaaacaaagctcaccaagaaaataaagtagagacctcattacttgcattttttaaagctactatcatcatagaagtactatgtcatcatttagaaaatactatgaccagatgtatgagctaatgtatttaccaagttttttaccaactttcagagcttctggtgagcatgagtcatcaaggagggtgaagtctgaacttctagttcaaatagacggtgtaaataatagttctaccactgaagatggtcaaccaaaaatagttatggttctggcagctaccaactttccatgggatattgatgaagcactgaggttgggaaaccctttccattcacatttgctttagaaatttattgagtctactaaataattggaaatttataagataaatcacataaattcaattatatttagtattggagcttgtttgcttgaggtgctgctattggaattagaatatcgatttcctcaaaaaaaaaaactgtggtttgggtccggtttaattttttttttgcatcacttcttatgggttaagagcgtagaatatttgaacttatggacaggcctcaaaagccttgttccaaatgtaaactccttttggggctagagtcatttatagtcaatagcacttaaacccattggtaccatcagaagtggcatgcaattatctgttactcctattagacttgacctggccatttctttatccgtcaatgcactagctacatgacattactgttaccacatactcccttcgtcccagaatatactatgtatctggacagggactaggtagctatgttttgggacagaggaagcacttttgttcttacttttaatcttccgaacggtgtccgtatacaacctctaactcttacattcttgattcactcagacggaggctggagaagcgtatttatattccacttccaaattttgaaagcagaaaggcactcatcaatattaaccttaaaactgttgaggtatgatattacttatcttttctgtgttgtaattccatcctagttccctttctgtttactccttcagcgttttatgattgcctccttaatcaaacagtgcagttcctgcacacaccataactgttgcacagcataggcagttatgtctctgaattgtgtttgctatgcatgcagtgcacatacctgtgtgatcgcatgcatatgtaatttctgtaaatgacaccttttgaccataagcttcatgcctactgtacaccataacctgttgactatcgaagttttctactcagagttgtaccttatacgtgaaaatgaccaaatactgttcgctacttgtcatctttgatgaaaaagtactgtgccatatcttctgttgtttgttaacgcctcttttatatcggcaggttgctaccgatgttgacatagatgaagttgcacggaggacagaaggctatagtggtgacgaccttacaaatgtttgccgtgatgcttcaatgaatggcatgagacgaaagattgcaggcaagacccgcgatgagattaagaacatgtcaaaagatgagatctcaaaagacccagtggccatgtgtgactttgaggaagctctggccaaggttcagaagagtgtatcacccgctgatatagaaaagcacgagaagtggcaggccgagtttgggtccgcttgaaatctccattctgttcccgttcaaatttctcagatcattgtttctccttggttgcttgtgttcgcaagtatttcattcatttgtaccgctgttatgttgtttcaacggccttatgttgatcggttgtattgcctgcgccggtgttgtatcatagagacaaaccagacagtaaactaggaagtgagaggtctctgcccgtggaactgctttgttgatttagtttcagtgtcactggcactgccgaagccaaaggttgcgtcactctgtaaccatttcgaacagttgatatccagcttccatgtttcgcacgggcagttgcgacgtgcgcgttttaacagtatgcttcttgactcattgatctgctttacggagtacatcactgaatcaggctctgttcaggcttctgaacagagaaaaacaggtgcccagagctgaaacggtgcctgacgttctcaggtctgatgctggaagacccagatgccgtggcttttttacccatctggtgccatagccagaaaacctacttgtcctacacgcaatctggatgaaggcctgctgcagatgccagtcgtggacttgactttctttcatgtgacgtctcatggtactatgcatcaatagcttccgtggatctgaacttatacagtgatgctatccctgtactactatacttcgttaaaaaaaagtcagcaaaaactgagccatcggacatttggactgtccagatttatgtaaaaagaaaagtgaactaattttgagatgaaaaggaacatgcaatcgagctgctcgaggagatgtaactttagttgccaaaattttggtaggatttctaatatagttaccaaaatttggcagcatactaaatgtagccacttttttggcaactttaccaaaatttggtatgtttgaaaatggcatcaaagtgaatagacccataatgttaatgcaaaaaaaaggtacatatatcgccgttgccgttaaaatgatatgtaaaaataaaagtgaactaattttgggatgaaaagaacatgcaatcgagctgctcgaggagaggtaatgcaaaaaaaaaaattgatatgtaaaaataaaagtgaactaattttgggatgaaaaggaacatgcaatcgagctgctcgaggagatgtaatgcaaaaaaaaaaaagaagaagaaagagcaaaaatatttttgggatgaaaaggaacatgcaatcgagctgctcgaggagatgtaatgcaaaaaaaagaagaagaagaaagagtaaaaatatttttgggatgaaaaggaacatgcaatcgagctgctcgaggagatgtaatgcaaaacaaaaaaagaaaaagaagaagaagaagaaatgtaatgcaaaaaaaaaagaagaagaagaagaagaagaaaaaagagcaaaaatatttttgggatgaaaaggaacatgcaatcgagctgctcgaggagatgtaatgcaaaaaaagaagaagaagaagaagaagaagaagaagaagaaaaagaagaaaaaagagcaaaaatttcgccgttgccggggatcgaacccgggtcacccgcgtgacaggcgggaatactcaccactatactacaacgacttggttgttttcgggaaaacacaattttatctttatagagttagccctcttttgaatcgcatgcaagatagagttcagtcgcgcatacatccgtatatgtataatctagttatataagcacaagttacatcactcctaatacatgcatcaactgtacagaacgtagcccgtgttggcctgtacgtacacaacaacggcacattgccttgtcgcctctaggcctggtcgcgcgctgcaccaccagccccagcgaagtcaaaagcagcagcaaatgtagtagtaggaggaggaggaggagggtatacccctacctacgctcgcacagtagcaagtaacgtgtgcgctttacacgcctcacgcgcgccaggatcgatcgatcgagagagcgagcatgcatgcatgcccaagcccaaccaccgcgtggcgcgcattaaccagctgcagatgctttgccgttgcatgcagcgccgcgccgcgccggggcaacagcgcaacacagtagagagggcacgggagaaagcgctggtgtgaacagtgcagcggtcggagagatgagatgagatcgacgacccgatcgatgtcggggtagatgtactgtatacatagaaaggacagtggacagatcgacgtacatgcacacattgacacatactactgcgtatactagtctagttgctgtacgtagtagccgtagccacaaccagccaaccacgcctctgcccctgcactgcgcacgattgatctgtcgcatggattgatcgatcgtgtgtaccgctgcatcgataattcggtatacgactagtagcatgctctactactactccatccatccaaaaatatagcaatctagaatcggatggaatatatcctagtactagaatctagacgtgcccccgtctagattcatagtactataatacatctcatctgattttagattgttatattctagaacagacgatgtactatcttattaaatatgcgtgtcgatggatcgacctatcaatcgccaaaatacctgtgcgatcctctggtagtagtaatagctagcctgcgtaagtgcgtatgcttgcttgcttcaggcctgcagctgtggcatgcgttcgtgtaccggtcaccgcctcaccggtgtacgtacgtgcatttgcatccctctgtcaaaaaagaacgtgggcccttttgaatcaaaggatttatgtaggaattttataggatttaaatcctataggaaattttcctatttggccatttaattcaaaggattgaagctttccaaatcctatgaaatttctatggaatggcacattgcatgtggattttggaggaaatttagcaagagctccaacctcttgaaaaatttcgtttgagtctatctctctcatccgattcctgcgtttttcctgcgctccaattaaacgatcattcctgtgtttttcctatgttttgcaatcatctgttttacactttaattcctatcagaatactgtatttttactattcttctgttttttctgccctacgattcaaagggtccattaacatgtgatcctaagctgataagcattcaggccgcctgcttgccgcaccggtatgggtacgtgtttggggtctctttttatcgctttggagtttgcgcagagtcttcaaaagttggatgcttggagcagagcctatctatacacgcagagctagtttacgatttgtctcccacagccaagctagaggcattgccgatcgagccgtctagctagctgctagaggccaggataccctatactcgggtatagtctgggcttcagctggatgcacacagtgctagagagcccagcagcgtgcaagaaagattgtgctgtcagcgatggaattgaaatggtgcttcaccaacccattcttcattcttcaacctccctaaagacaaaacgaaaggcatgcttcaacggcagggaggataacatgcacggttaaagcatctcaaacaaccccttcaaatataactctccaaatatttatttgatcaactaaccaaaaaaattaggtagtgaaatatatccttcactccaatagtttttccattatacactccaatctaacagtggatcccacatatcaggctccctacttcctgtacactcccccctctttttctcttctctttcttcttctctaacgaactatcatttgaatccgcacaaggaaagaggcggtagagtggaggctggaatgtgatggtggaggccttcgatcgcgctcccacgcggtacccggcttgacatcccacgcaatgaaggcggtggcagatcgacgatgacgacgggcgcaggggatggggaactctagacaacagcaacgatgacgagtttacttgatttaggagagtgcagagagtcagggatggagagagttggggagagcctctctaggcgtgggcccatggttgacaagctaattttggcttgccaagtttgaccaacgagggagccagcttagctagtgagatggcttggtcatttagttgtgaggtagttggagcctgtttttattcataattgctaatttttatgtgaagagtgggatagtcgtactgttggatacgctcatacatatctatatatagctcatctacggttttagctatgaattaagagttcaaaccagcaggaatagtagccaacaacggaaataatcaggtgagatgcccggagcagatttagagtgggattgtagataagagcaaggataataatatagctcactttctactattagtccatcttaaaatcaacacatataatagattagctataaggttggctataatttttttctcctctctctatctctcacctatatattcaatgtatttgtcttggagcttgtgttaagctagctcttacatgagagccaacacccttctcttttgtttacctctctcctccacataggggggcctaatgggcgatcgtgcccagcgatcggtttgcccccccccttccccctatactcctccctcttctccccctttctcctccccttcttctctttctactacagtacactacacaattttttttaaaaaaacaaaagttaaaaaaatttatgtatagaaatactattatataaaaaatttgaattcaaattcaaatttgaatcgggtatgtaaacttttgacttataaactttgggtctataaactttagatgtatagaaatactatatatagaaaatatttgaattcaaattcaaatttgaatcgggtatgtaaacttttgacttataaacttttgatctaaaactttaggtgtataaactttagatgtatagaaatactatatatagaaaatatttgaattcaaattcaaatttgaatcagatataattcaaattcaaatttgaaatgggtatataaacttttaacttataaactttagatgtatagaaatactatatataaaaaaatatttgaattcaaattcaaatttgaatcagatatataaacttttgacttataaacttttggtctctaaactttagatgtgtaaacttaatgtgtataaactttaggtgtataaatttactaaaataggaaagtaatgcggtgccaaaaaaggaaaccaggtggagggagggaggggggaggggatcgatcgctgctccatccctagggcgatcgatcgccgaacagcatttccgctccacataagcttataatagatttatagctcactattatacttgctctaaggtgtctataattcagtgactcgctctgttcacgaaatggtgttttttcaatgcgcatccaaacttgcattaattactttgggtagctattattgatcgatgagcgtgcatctcttttctcactactccatgtatgtgggggtagctgcattacacgtaataattgtcattatgtacactgacaaattagtagtagtcctgccattttagtttaagattgggaaaaaaaacatgcatgcagccgagctaaaatttacgcacgcatgtgtaatgtacgtgccccatagctcttgtacccgggaatccggatcttggtgccagggaaggtagcccaacatttgttcgcttcctcccagacactgcgtcgcaataaaatcgattaggtagtacgagttcttccctgacaaaatggaagtagtggtagcagaagtagtaaaaggggaaaatatgcaaatacaaaaaacctctggttgttgtctgctgctactacttcacatgaaaaacatatgccgatcgatgtgatccatcagtgaagaagcagcagcatggccacaactccctcctctccaattcgtcaccagtgccattatggtcaaaaataacaaggcatcatcgtatccgctgtccccctcttgctcaatctctgcatgcgcacacagttcagtcacactgtatcacctaacctttccagtagctccattgtactgtgttacagtagcatatgtaatcagtttaaacggcaaagcagattaaactcagctaagcccaaaatataacagagtgaccgtgcaagcaaaagagaggttaaaagaaaaacagagagagacaaggaattacagctggggccggcctggcccagaatgaattgatgagccgtggtgtcgtggtgtcgcgttgcgcgcccgacaagcgcagatccgccggacgagccgtcgtaggggggtgagagagcgcgaggtgcgcgtatgcatctgccgctgcacgtttctgccggcgcgctgccgcgttcgcgcgcgcgcgcgccctcgatctctatcggctaagggtgtgtcagttaacgctaaaattaaaagtttagttaaaattaaaataatgtaataaaaaagttagaagtttatgtgtataggaaagttttaacgtgatagaaaaattaaaagtttaaagaaaaagtttagaactagcctaagctggagctctcaacctagtgtctgcccccgtgacatttcggcctttcggggccatttggttgttgtgtaattttgccgcagctaatcttgaagcaaacaaaattatataattagccgacaaatgtttgaatgacatgcatatctaaagtttttctttttaaataaaacaggtggtaaaattaaggtgtgacagtgaaacaaatgcctaactaataaactatgacacgactaaagcatgtcgtggcaagatgaggcgaccaaccaaataccgccatctttctcctaagcttgcagcttaattactcccgcaatcatgtttagtttatgctgactagatataactataacgatttatcagcaataaaaaaataatttgtaacaaaccttttatacatgtgttctaagaaataaaaaaaaagcaaatgttaaaaaataaactgcaataggaaaaccaaattaacttcaatatcaacttttaaaatttaaattttacttgtagcttataagatgaagagtaaatgatgggattcctttttttcccttgttacgtcccctaaacttttggatatataaccctccaaactttacaataccatctacataataacaccctctaaagtggttttggttggtgctttttgtatattttgatgtttaaactagttgttttggctaattaaaatgatatattttcattgcgtcgatgctcagtccttaagctattgtgatatcatactaacatgcatgccatgttgatctatattggtctgattaattatcagtgagagaaaggtaataaaagagatacattcaagtgaagattttgacatatatcttcaatatgcatgccatgttgcaaaaattttccattgtacctgcaaaattagacactactttaggggcttatatgaacgatattgtatatttaaggtgttggatgtctggttccaaatttcagggaatagtgttatatggacaggggggaaccacaaaaaattaagttaggtttcgacgtggaacaagagcaaattttgaggcaactttcaaatggttcttgatatattcaaatttaaattagtaaatttgagcgaaatttagtcaaaatttgctaaaaactattatgccaccgggggtcaagatcccacggtccatcgtaaaagctaacatagatagactttcagtcaaagcttaagggagtatgtatatacggacttcttcctctcctttttttcccattagataatcagagaaataatgagcagcatataatatatgtgcactatggcctggtttatttcctaactttttcttcaaacttcaaacttttccattacatcaaaactttcctgcacacataaactttcaacttttccgttacatcgttccaatttcaatcaaactttcaattttagcgtgaactaaacacaccctacgtgccatgtttaaaaatgctaggataataaccacttaatttgttgcttgtcttactaagccgatttagaattagaaaccgcttgataaaccgactaaatatgaaaggattttttgttttaaaaaactgtccaaataaaaaattactggttttcgttgttaaccgtggttatgaatgaaacctagggagctcgtgtttagtaaccttgtcacatttgaaatagaaaagttttttttctttttttctttgtggggcacctgagtgctagaaacagtataactgtagtctattaattcagagcagagagttaatctgccctgtcggaagagcaatatatacagtacttgctactctctactatatataaatcagaaatggaaatgtgtgtagccaccagttgatcatccgcgtcttgttgtatatgtcacatatatgacgcaccactaaccttccaatacatttacagtgatgactactgatgactatagcaggggcatgcacagatagctgtgcgagagactatttactctggcgttgttactgtcaagccaaggcgtggtcacaaagctcacaactcacgtctcacagtatagctggattgtcggcattgtagcctactacagcccactgttcaacgacgaaatggacaaagcacaagcaacaaaaacgctatctcgcgtggttgcgttgcctaatcgcctgtgatctactactactagctgcttctgtccttattgcatgcatggcctttaaggctactactaacaactctagagcatattacgtgtgtagtacttcctcacaaagctacaaattaatctggatacgtacaaccacacgcaggtgcttaacctcttcttggccattaattaaacacacacacattctcttctcacgtacgttgtgtcgctctctctggtctgtcttctcctgcatgagcactcacatgagatagatgagatgagagggccaagcacaagatgccaacgcaggagtaagaggcaagcatgcaagatgttgatcgatgttgcagccctgcagtgtggggatatgctagttggagtagtatagcatgttggttgtgccaagcctttgctaatttagctctctcttcttgtacctctagccatctaatgcatgcagcagaagccagcggcggcagcttgtttcagtggcccaagggaggggagggccagtagtaccatggatggactatggagtactctcaccgctcttgaataaacaaatgtaacaacgcattctaatattacaaatttgaataatacttcctccgttttatattataagactttctagtattgtccgcattcatatatatgttaatgaatctaggcacatatacatatatatgaatgcggtcaatgctagaaagtcttataacctaaaacggagagaatagttatttagatatgtagtaataagatgtatcacttcttatattaaatttatttatcatagtaccaatggagtatatgaacttttctctgtcccaaaataaatcaactttatactataatgtgacacattctagtacggatttagacaataataaatttggatatagagtatttttaaattcgttatattaaaatatgacacattctaatatgaaaggttggtttatttttagatggagaggagtatgcatggatcagtctggtgcaggaagtgctgccactctaattaaaagcaaaggagaggaggtccccataaatgaggtagtacagtggttgcatgcattaggctcctgcacagccgctgaatattccctgcaacaagcattaacagccagagttttgaatggttgtggagaggagacgagcagcatactatctgagcgccactgtgcagctcagccgcagctgcctcggacagtagtagctcagccggccagccggccagcccattctgttgcttctgcattgcaaaattgcaaatgcagcaaaggcgaagaccacgctagctactactatagtaggagtagtagcccacatcacaggcggcacaaggagctggtctatcgcactgcacaccgcccctgcatgcatgtacacgcatgcagcgccaatgcagcgtagtagtatatgaccaatcagatcagggcaggccactgcgccaaccacacaaggcggtagcagatgtagaacggtgaaacgcattcaaggccacccctgtatgctatctagaacacagcaggttagtgtaagttgtgtgtgtgtggatggagatggaatggatctctctctcatccacttgaagagagagagagagagggggggagggaggtgtcatagatgcagtgccctgcactcatctcgtctcttgctctggcctcactgtgtgtgtggtaccacctacaattcctcgatctttattctccctgcagctagctggtttggaagaagaatgttcataatgctaattgattgtgggtgtaattaaacagatgcattaaacacttctgaggtagcctacatttaggatagggagtgcttgtggggatagggaatttgggcatgtacttatcatttatcaaagggagctttcttgatgtatatcagtatatgggccgagcacatgaatacatgcatgttaaatttgaggtagcaataagtaataaattttcaagagaaacataacatgttttctcgtgatgggaataatatagaaacgaagaacatcagtttcctgcgacgacgaccctacaattacaatacacattacagatttacagtactatggctagctagactatttctcagggcctcacgcattggatgtagtcatgtagagaaaaattgatacagaagatgggtattattcagtaagttcaaatataaaatcggcatatatagatacagattcaagttcctactaagtaacaatactagtagaatacaataggcagagacagaaacgaggaaatcgggggaaaaaaggaagattacatgcattacaaagtgtaaatgatgcattctaggcttaaagactctctccaactcttcacactatgttactcaagaaggctgttaagatgtctgaacatcacaaacaagctccataccaagaatgcgtcacttacagcctctcaatacaccagaaaaaaaaacagaaacaaaagaaaacatcgagagtaatctagaactaataataataagctaattaattaagatacctagagatatttatatatctcggaccatgacgcctcaattccccacacgctcacaccggccgtttgcccccatcatgctccaaatgtagctagagcagaaggagagatcgtggtgagagctcgaatacaagatgctcgccagctcttctcctatctgtgaggctcatttccctccaacgtttcctctcttggattctcagatgctagccaggaggtcgtagcagcagcagcagtggctgcaccggcgccgagctccattggggcaggaagaaaagcagcaagatgaggcatttccatgagacgaaaggaggtctcactttgcaaagtttagtgtaagggggtgatgagaagtagaagaagaagacaatagagaaaagctagggcgatgtgtttatatactcacatggctacaagggagagagaaagaaaggggcttaaagagagaaggggtaaaattgctacagctacagaagagcctgacaaagtgtgtacacctttccgagcaaccgcaaagaattcattgtattgtaccattgcacagtacatatatgcctacatggtcatgttatgtgcattatggtcttgtcttagcttggtccatacgcggagacatattcattttatagcactcattatgtgggactggtagtattttttgtagaattgaattcacagcaattaattttggtgtctttctttgtgagctttggcattgcttgagcaattatataccgtgcatatagagtactaagattcacccggcctaatataaatgtggggacaggatgggacaagtttagtgttttaccagtaaatggaatgtttgttgtgtgagtgtgtgtgcagatatgcagattgataggcctaacattaaacaaagtatgatgggaggcatgtttgtggggaacgcgaaacgcacctacacggactccaaggcaccttggggtgagcaaggaaaataaacagctcattgttcgtatgatatactcttactatgatgcaagactggcatggggtggaccatttatcagtgagacgaaattatctaaggtacagtttattttcacctgttaattaacaacccacttgatcatctaggagaataacaaaattggtagcgttgttagtggatcattcaaccctaaaccagtctggaaactctcttactgatgtatcggtagaataaactgcctagatggatggagttaacaataagtaattaatcataagctttgtctagccagaaaaggaacttaaagagcaagtacaatatatagtatcttataaatcggctgtaaacacatgtaaaaaaagataattaaaagagaaaagaaaacagagatggactacaactttatagtcggttgcagtactgattataaaacgttttgtgtgttaaaggtatgactaggtattgtggtattgatgagtgtagtatatatttataggcaactattatataaattgagtattaaaatatgtatagataatttaattaggtcctttttgttggcccatattttttaataagccaaatcaacttattaaggaataaaaattagttagtaggtaaaatatacatgtgttcgtagcaacttaacaatcaatataaaaaagaaatcatgttgaaaatatcttaaattaactttaaaaacaagtttgcaattttgaattttgactttttcttttgtttattaaagcaaccaatggagcttttggagctggtagctaactgaactactccctccgtctcacaatataagggattttgagtttttgattgcaacgtttgaccactcgtcttattaaaaaaaatttataaatataaaaaatgaaaagttgtgcttaaagtactatagataataaagtaagtcacaaataaattaaataataattttaaaaaaaatttgaataagatgggtggtcaaacgttgtaagtaaaaactcaaaatcccttatattatatgacggagggagtatgtatatattaaacttgctgtaattaagatattaccatgcactgttttgtgtagtgggagctatagccatgaggtttgtcagttagtgtgattaggactagtttaattaagaacggtgttacggctagacaatcctttgcgtgtgcatgccactcactcacttaggaagtgatggaagcttcacccgttccttttatttgtctacatctctctctcctctttctgctttcagactgcacatagagggggggggggggtaatagtaatactctatcatatagctagatgccgatcagaggaacggtgtctcttgctttcctaaaggcgaacaatgtttcggtgtgtgtagaaaaagattcaccccatgatagaagagaaagctgcggtggtttgtttatcaccggtgattcaaatcatgtttgttatcattggaggtagcacccgtcatgtaattctactagtctactagtgttagaatagctaggttcgaatatactagttcaattataagttaaactcgttgaagttagaatatgtataggatagaattagagttgaactttatcattggctctctcttaaacagagagcatcataatataaccataacgactacaattaaacgtaaacacataggaagatgatgacggcgagaccataagactcgtaaagactagatgctatgttattggggagaagcgctcataatcagagcttcagagatgtaggcttcggttcaatttcattaacaaatatcgtgggctcccgtattgtcttctgatgtgtcttgggtgatcgatgattgaaacgatcggaaaagttagtcattatttcgctatatctactaaattttataacaaccaacgtgtactacagctctgcattttgcagtgttcaactgttcatcccatacatggtttaaagaaaagaagctagatagaaacgaacgcattgggcattgtgaatgaatccagtttacatttccttcccctatgaagcacgtgcattacattgcttgcagagcataattccatgcatactacatgatgctgcacaaacattcagctagcatatgggtaattcacaggacaaatgaacaatagacagcaacgcgatcgaacagcgaaaggagaagaatttttctggcaatgcacacacaagacgcacgtacggcgcgcggcccagtagtgtcgactactagcgaatattctcggagacaaacgttacagaaggcaaagcaaagcgaaggcacacacacgagctagtggagattcaggtgcagggccatgtcacttcgcagcaatcggccgggcaacaggaggggccgatgcatccatgcatgcaaccacaaacaaagcacacgcgcacgcacgcgcacacatgctctcgcaggcggcagctagctagctagcgcatcgatgctcctatacttgcagctcgctgccgccggtcgcgccgtacgtgctgcacgcacgcagcacaattgcacatatatatggagctttgctttgctcagggattcccttgcacagttgcatctcgaactctcgacgcgacgaacatatatgcccaggcacgcacaatctcagcagtcagcaacgtgcatgcatgcatggatatatacagcacggcatgccatgcattgtgccaaaacgtacaggatcagtctgcgtctagcgtgcatgcctatgcacggatgcatctactctcgcgcaaaagcggtcaaaacgggcagattctctcgcgggggctccctctttgggaggcctctcttgctcgggcgcgcgcttggctggttggttggcgcatgcggatgccggccggctgcgcctgcgcgcgcgggcgcgtacgtgctcgcgaccgcgcgcgcagtgtgcccagtggtttgtgcgtgttttgggcagcgccgcgcgtgtgctgggctaagagcggtacaatagtaagctataagcgagctataactatatatcgagaaaaaaagagaagagagagaagaaaacgggctacagatttatagctgactgcaatacgaactccaagacgttatgtgtatatgagaggtgggaccggatattaatagtgtagtatatttttatagttaactattgtataaatggactgttagattagctataggtgttttatagccaacaattgactatactattaaacttgctctaatgcaaggacggtaggcgggcgagcgggcatcccggccggtctgttggatcatgagaatgatggccgctttaggacgaaggggaggagtcaaaaataaacgcagggcgcttttgcagcacaaaggccccatttcggaatatatgcgtacgtacttcctgtgtgtccagcttacctagccggagctcccttttctccttaccttttctgttgtaatttcttgttttgtgtggccaagcaatgcaatgcatgcatgcgacgccctccctctttaatcgtagactggaaacgagcaaacgatcgggtacgttcgcgacaaactcgcaagaaaataatgctgaagcgatgcatttcgtaagctctctcgttgaatcgtccggccgtgaatttcacgacaatatatatctatatctatatctataatattataaaaattgaagatgttttgccgatactttggtatactatccgtgtatgagtcggtttttaaattcgttcgcttttgaaaatacatatctatatttaagtcggtttttaaattcgttcgtttttaaaaatacagaaggagtcatataaaaaaatctcttttaaaaaaagaactcgcatgctaatttgagacgatcagactcctaaccacagctcatgacttaaaaaaaaaacatccaagcgaattgccacattgaatttcatcttagctaaaccatataataataataatattaaaataacctttacccattacaatgcacggatattttttctagtatgtatataaaagcaaaaataagccaagatcctacgattcgcgcgtcacgggagaaaaggtgaaaggcgcgcacggccggccggccattaacaccaaaagatcgcgcaagttgcttctaatccaagtactaaatgattgagcactcaaaccccctcatcgccaacggctcgtcgacacgacggctcagcgtgcggaatcacctggacccgcgcgagcggcgtgggggcaagctagcggagtagtaggcgctcctcccgcccttctttccccggccggcccattctccccttccctgttttggtaggcgtgcgcgccatgcgtcggcgtccacacgcccatgcgtggcccggctgcgctcgaccgcgcgcctcgttctcctcgcctctctcctcgtggtggccggtgggggcgttgccgttgccgtgcacaagggcggccgcgcgcccggtcgcgcgatcgattgccaacaaccgccgcgcgatgtgctgcgctagcaaactttacaacccagagacatcacgcacgcacatcgtaccggcgcgagcacgctgtaattatctcccccagcaacttattcatataagcaaagacaaggcatgcagttagtcagctagcgcgagacagggtccaaacaagcgccacagacggctcacagtagcgagttacatcagtcacaggagcagcagctagccgcgtgcgtgtaggccctgtgagctactacggcataaacagcagggatctatcgatacaatgagtcaaatccaagcgcatatgatctttccgcctgcgctgcgctgccctgccgcgcgtgactggtgtgacaaagcccccctccttgccttgccggctcagctcgcctttcctcgttggccgcaaagatgcagcaaaagcctcgaccgctgtcgatttacacgatgagacgaaactggctcgtgtcgtgtcgtgctcgtatcgtgctcgtggcccatgggaggcttggaaggggaatttaactatttgccacttgtccaaataagtgtcttaaattcacgcttaataatttatcaatgaagggaggggtcatttcttaactatttgtcacttttgcttacgtgacgagccatcatagcgtgcccacgtgaaaaacgacgtggacccacccgtcagcccctccactttccttcttctccacctcgccggagcttgaattgagcgtagccattacacggacacatctaaagcggagattttcgccctgagttggcctagctcggccacgagcgccgccgccaccatggtctcctcaagcgccacgtccccaagccccgcgtcctacgccaccaccgccccgacgacgagcgtgaacaacagcagcagcgccgccacggtagcgcgtctcgtgatctgcatcccgagatccgtgcgaacctgtctccctcgatccgtgcatcgccggagccactcccactcccccttcttcatctatcgttgaagccgctcccactccccgttccgcacatggctatcaccattctcatcgtctgttccggtgcacgcaagcctctgggcccgaggaagccgtagcggccctgtcaacatcgcggtcgtcgttgttctccgcttcctcattgtcgtcaagaaactcgcgcaagtggaggttctcgaaggatctcctccatcggagcaactccgaaagcggcaagaacccgtggccgcctttgcccaccccgcagcctcggtcgccagcgcctgtaagtggcgaggcgagccgaggtggaggagatacagcagccgtaggtggagaaaaaaagagaggggagggcctgacggggagggggtccatgtcgctttccacgcgagcacaccacaatggctcgccacgtagaaaaaatgataaataattaagcacgaatctagaagaggcatttgaataagagcaagataataatagagctcacttcctactattagccaatcttaaagccaacacatataacagattagctataaggttggctacaattttcttctcatctctcaatctctcacttatacattaagagcaagttcaatagtatagtcaaatactagctccaattcatctatagccaatctaatagctcattcatacaatagttacatactacattattaatacctagtcccacctgtcatagacacactgcgtcttggagtccgtgctacagctggctacaaatctgtagctcgctgctcttctctctcctgatttatctccttaaaatatgtttgcagttaacttatagcctgctattgtacctgctctaattgtatttgtcttagagtttgtgttaagctagttcttgcatgagagccaacaccttaactttttattacatctcttctccacataagtttatagtaggcttacagcttactattatacttgctctaagtgatgtacttaacagtggtaaatagttaaattccccaggctggacccctccacccagagtccaatctccaaagcggtggaacaccagcccagccgctcagcctcgcagagtcgccccgcgcggctcggccgctcacccacccgtaacgccgtcacgagacggcgctagcccggtggggaggtggcgcgaatccgaggcgccgcctcctaatttttcccgcgccccaccccgcgctgtggcggctgttcctcctcctccttcccccgatccccaactccttccaactcacatggcggcggcggcggcggctgcgtccgtggcgagtcaagcgcaggccgtgctccgcggcaggctctgcgaccaggccgtcgtccactccgccctcaggtcctcgccggacaccaactacaggtcagccagagtcgctccccctcccgcgaaatcagcccgggagtcctcgcgactgacgcgctttgttctgggttgggcacagtaagctgaagtacctcgtcgccagctccgtctccgaagcctgcaacaactccgtcctactcctcggcccccgcggctgcggaaaagccgcggtgaggttttccttcctagtatactcttctgccccactttcagcggttttctcggatgcgggggtggtgttcgacgaaatgtgccagtgggcgatctacgactttacgctatgggttgtttcggcatggactgaggtggtgtttggatcagggacttaactttagtccatgtatttagatactaatttagagtattaaatatagactacttataaaactaattacataaatgaaagctaattcgcgagacaaattttttaagcctaattaatccataattagagaatgtttactgtagcatcacataggctaatcatggattaattaggctcaatagattcgtctcacgaattagtccaagattatagatgggttttattaatagtctacatttaatatttataattagtgtccaaacatccgatgtgatagggacttaaaagttttagtcccatctaaacagggtctgagatttcaattcttcgcaggtggtcgacatggttctagatgatctgaagaaggatcatcctgatgcaatatcagtggtatgtataaacgttatattttacttgttgctagaaatgtatccatgtatttgcgtaatacacgatcgatgatttacctacgttggccgtgaaataaacatacatgttacgagaaaatagtttgtttcagggcgctttagggcggaaggggacaaggataaatgtagaaactccttgcatatttttatgttctcaaatgcatggcctagccaaaaggacaatatatcataatgcacaattagttagactttgttaacttgtagttcagttggattattgtgcaaacttttttcagatcaggctgaatgggatgctacatagtgatgacaactgtgccacgaaggttagagctttctgatgccagcttttttggttcaatttccgtattccacatgccctccgaaccaaatctccctctctcttaactcctgtccaccaattcagttaacttcatagttgtttctatgctttatcaactccaatgcagccatgctaatgcttttgttactttgcttttaaggaaattgcgaggcaactttgtttggaacatcagttatcattttccaaaatggtgtgtggtgtctactctagccttcacctcactcaattattgttctctctaccattttaaaagatcttatctcttttaggcttcttcagatgacaacacggaattcatgattgacatgttacggtaagtgaagtgttaagatgatgagcatctgtacatcatagagacatactccttgattcttgaaatttatgtccagtcatctgtatcctctcttctgcagggagtgtggactagctcacaagacaataatttttgtcctagaagagtttgacctctttgctcaggttgaaacaaatacatgcattctggtttaactatacttaattcatgctgaatgttagatgcatagaattgtagcacgtcatggtttatgggacatttgtcttacaggaatagcttgctttctacaattgctgctggcaattattagataacaggataacagatgattctatttatggtttcctattacaggggaagcagaggttactctatagcttacttgatgcaatgcaatctctcacctcacaagctgttgttattggtgtgagttgccgattggtatgaaatatatcctctcccatgtttctgcatcttagccgtttgtaatttgtgtgctagtacactgtcataagatcaccatctcccatgtttcagatgaccctcttaatcgtgtggtagttgatacacaatatgcattagtgcagtagcatgtcacatgcattgtggtaattaatgataccaacgctgtacttgggattgaagtggctaataactttagacattgatagttctacgaaaaatctactgtttcctttgtgagctgttttgtaatatcaattcatttttaggatgcagaccaactcctagagaaaagggttagatcccggttctctcataggaagcttctgtttgttccttcttcagtggatagtttacagaggttagccttgtgcatttttttttttcaggctaaaacattcactgtttctcaagatctctattcaatccatcttttgacatttgaatgattgcaggttaatggagcacttgctagcacttcctgaagattctcccttaccaacaaagtatgtcagggagtacaatgcacggattactgtatcctttgctcaatgtgacatgtcactttatgtgcttacaaaacctgcaggtcactgttcttgctttataatcctcacggcaatcatatttgaataggctgacaaatacccacagagtgttttgttaatgggcagtttttctgtttcttattccaagaatggatgctgaatgtgttcttttctatgctaaaaagaagccatggtggcaaactggcaatggcactgtttcttaggctaaatggaactgtatgtgatcatcccatcaagttctataatattgtttgtgttattgtgcaaaacaaaattgtaatccatataatcaactaggtaaggtagtgcagaaaattgcattaaaagcttgggatttccttgtatgctgctgaaagttcacattctcatgccactcattgtctcagtgacatgggcttggatccacctttgtcataacgacaatgagggattttagagttcaatgcaatataaggaactaatcccccccaaggtttatgttatcctatacacttcagagcattttcaatgacaaaaagttcaaaggaattctcagctccctcactgatgctgacgcaacaacaagccacatccttagatttctgtaagtatttcagcagcttcttttttttatcctcccttttcttcacatttccacactttttagtactcagttaaatataggagaacgaaaccttcagtttcagagtggtgtcatacatggacatagattctggacttctgtcaatgcaaagcttcatgaatgcgctatcttcgatgcagaggcagcctaagatggacagtttgcaaggtctattttgtttgttgtccctcatttacttatgtaggatggaattgttcgctgtattgatttatatgctaaaacaaagctaccttcattactccacaccataaaacagtggacatgaatggcaccatatttctgacactgaaatttcgatagcagatctctccattttggaactatacattcttgtatgcatgaacaggctagaagataaggagaaaagttcatacaactttatcactattatgaaaggtagaatctgttcctctccatttgtgttcagtcataggaaagactaagtaagttgatgaactggttgtctgtcagagtacaaatctgtgcaggatgcctacaaaacgtcggacaaatattcacacactgtttgttttagagtaagtattagcacaatcaagaattcatgaaccttccattatattgaaatttcaatataaaaaaattacaacttttttttccccttcgatataggcttttgagcatcttttggatcgcgagttgattagctttgcagacaacaaagggagaaatcaggcgcttgaatatcgtcctgtcaaacttctgatatcttcacgtgagcttgctgagtccctcaagttgaacacgacctgccctgtgagttaaacgtccacctgttttccaatttaacgatcatctgatccttaccccttttgtggcttgccgttctatctcaatacgctaacaggttgtcatgctttgtgaatgatggtgctctggtttactattgcaggctgttttgcagaagcttcttgaccgtgaaagatacatgtaaaagtttctatatgtttgctaagttgatactggttcaagtgctggcatacttctttcttctttgttactccctaacaccgtgttggaacatcctatctactgcaaagagatttaccttgaagatgaaaaaggtatatcggtctctggcaaggtaacaaactaacaacacaccatttcactcgatgccctccctcttgtgtgcatggatgatacttgagaagttcaacgcaaggtaaacgcactagtgcactactgtgctagtaaaactttaactggattaccatggaaaattgacaccatcagttttgtgctcatgacaagcgtcctaggacgaacatttgttgtcctcagttctgtagatcatacacattcaaccaatcctgtcatcctatgcatgcgttgataccgagaatctagctcaggtttcataagtagctcaaacacatgttgcatagcaatgctattgtttttctcaaataaaattgttccaaatattataattatcttgaaactctcgcaatctcaggcctgtaatggcggaactattgtcaagtaaaatttgcctaccttaaggtctagttaaagagactagctatgtatagttatcttgaaaacaaacaaatacaaggtaatagaaggtttggagcagaaacactgcgatgaagctattacagctgctttattgagcgtaagtgatcccttcgtgaccattccagcaagaaaagcgcaagagaaatccccacacaaatccaaagagtaatcaaccaagtaggcattggatcttgaaacaaacctggttatgttgattcatgttagcacaaagactgaccaagcatgtatcgacataaactgtatgcccttgttaatttgccaagaatatgctacatactataaaataactcaccgtgtccaaacttcatgcatataagcagctctaccatgcatatagctaacgaaagccaacaaaaagctcccaccttcttcactggttttctgagataattgatatattgaaaaaaatatttagttatccatcaatagaaagattgcacgcccataaacaaaagccgggatgggaactcatgattctagaaaaggtgtaggaggatattataatctatatgtcaagaagacctgtcttgcaagtaggtgttgtactcacgaattgccgggatagcaattaaccaccaaaggatcagccgatacacaaccaaggggttcctgggaggaatccagagacaaaatttcaggaagaaggtgttaagttccactgtcatgaaaccgacgcagagacagaacacttggatgaatctccttggctccatgaaaggatgccattgatccttatcccatttagcgggtgtgaactgacataatgacctttttacctgccacaatggaagtggttaaccaatgaacttaaagtgaacttgactagcttgcgcaggataaaccagctgataccaaaatcataattttgaggtcatgataaacatgcatatgctctggtttacgaatttgtctgtccaattcataaaatatcctaccaaatcagttccagactcctattcttatcctaatgtttctattctactccttccgtcccaaaatatagcaacttctggctagtatccctgtgcgtatggttggaggtattttgattagccaataccttccatgcagcccatagttcaattgctcaactctcaccctttaggcaggtagctttagcttggagccttagaagtgatcaattgtttttcataatctacgaggctttcttttttcttgaaaaaaaaacttatgagactatatatgaatatgacccacatgtagtcagagtatttaagtgatgtatattgtatagagaatggtataaagtggaataattacttgcttagaaattcagggattaaggataccaaactgcagacaagacagcctgacttctgcggcaacagaaattcattgtacagtcccactgggaaaatcccagattctgcctgggatctcccatgtatggagttaagatctttacacttgcatagtacatgcagttataggatgacttatcttttgttaatactctgccaagtccactagaggttgtctaacttgaacagtcttttgttgacaatgggaaaaaaacaacaacctctatatcaagatatacacagccttctaactcaacactcgaacagtctgcataacgtcaatcttatggcagcagcataatcaaacaaaaaatcttatggcagcagcattggcgcacataatcaagcattggtgaaagtatttgtgtcaggatgataaaatagcaggacaaaacagcaaaaacttggaccactggtcattttttttaggtatgcaataaccaaattaagagattaaaactgaaaaaaaaaaggaatatgccttctattaatgtgttttcgttgagcaattgagcataccttacccataatgcttggctgacggctcagtccaacccattcgtatgttttgccatcaaagtaacggactgtgtgcatccccgcccaaatacctgtatcaagattcaaaatactagttgaatggaaacatttcgatggaacaacagtaaaacttctgatgttcatacactgaattacgaccgtacatattcgttatttaaaaaagaaaatgataataacaaaacacagtgaaccttttcaaaggttctacatactcaggccaagacaaaacagtatcaaggcaatgacatcctagttagtgcattctgctacacatatcaaaagggaagttccgattgagaattgaaaatcacgaaaaatttatcttgcagacaagctgtcctaatcaaccaagcaagtctacatatgaaataacatgagaaacatcgacataacaaagcccatattcactgctaatctgtaccagtacctctaatgttttgcactgacaactcgatatccttaaatctagcactctatcagcatccagaaaagaaacagctatgtgagaacttttgatacttttaacttgtatgactataataacatttttttattcagaaatataacaaccagatggatgaattgtaaatttagatactgccttgaaagacagagatctcaccaaaccaattacatatcatgatatccaatataatactgtcccaccaacactcgttaaaatttggcagcatgtgcctaaatgtaagctgcagaagatatcaagtgtgcattgttacaatagttcatgaaaatttactaaatgaacatatgctaaaataaaaggaaataatatttcactagtcaaggcagcttttctaacctccatgagctcaaaaccaactgacaagacccataggagaagttggttccgtatcattactgccttaccccaccaacccaagacatgggcaataacaaattcatcaaacaatgtctcctataggtgcatcgtattaccaattttgatgaaatagcattaaaaataaatgagtgttgtgaatagtgatgctcatatggaaaatcatacttgaatattaataaatctgttggtagggttttctggaacatacatacggcagtcagaaccatatgatctctctggtagttctgcattttgatataaacaaatgatcagaatatatatatctatagatgatattgtgatttttcccttgtgaatgtattgcataaatattctaccaactccgagaccagggtgaaggtgcttcataaactgcctggcatcatcacgtttctaaaagaaaacggtatatagattagacagcagactaaatttgaacacataattacaatatctaccttgagcatcaagtttaaatggtccaagtgaaaggctaatgagtaaattttaagaatagcatgttagtgaatacaataaactgtagacatagccaacctggaaaagaagaaaagttagagcaacaaggtacacaacagccatgccatgcaccaaacgccacacagcaggatgaggcctaataagtatcctgtacaaaagattattagcctgatcaattagcatcctcataagtatttatagttctttacagagcaaaattagataagactctcacaaaggtatatctactcataatggccaaacatcaggtgcttctccttgcatcagaaaatcagcataatctaagtagtaaatggtccaatcaattatgtactatgagaatctggttttgtgagatcaagaacatagatgccttttgtggtgctggtaaaatgaaaaacatgtaatatcgccagagcgagttttctttgctaaatcataaacatatcatatatgaaaagaatagcgtatttcatttgatatctgaccaatggatgcctgctgacaagatgatgtgatttaactcatttactagaaagcatatatgcggggcttttggtaggatagaacatttcaccttcaatgtcaatcttttaatactttaccagaaaaaaattacctaaataatgcacccagtgccaataataaaatgtatgactgtaacaatctccctagccaataggggaccataatgcagaagaattggtcatgaaagatccacaaggacacaataatgcaaaaaacatttatttaactaccattggaatacagcaaagatttggagacagacaaaaaacaattattacactgataattgttaacatatggtttacctaacaagggataattcacttacgttgaaggtgcttggagagtgcagtatgctaggaaaactgcgatcatagcccagacacccctgagaaaatgtcagtgagtgaatcagtttcctggcattgttgcttactagtacataccatcaacagaagtccagtaaaacaataatattggaaatcatcctacaaattcttatcatttagagtaaatgtgtttcacagtgtaataccttttaataggtatgaccttatcatgagagcttgtaatctctggatgaaggaccccacttgcccagctgtgagaacaataaaagtgaaccaactgccagactgatgagaaagtaaagaaaggtgttcagatctagctacaacattttttactaataatacaactgttaaattgtcaattcttgtatacgaatagaataggttggcacccaagttagatgactggtaacaggcagcagcagccaatacgagctcgtgtttatatatgattgtttatgaatttttcaagcataaactagtacttttcatgccatgatgcaactgtccttaaataaatcgtagccattcatttcgtgtcattactctgaaaccagttcaaagaatgggctggattcttcatacttccaattaccatgaattgttccctattccaagcgcttgagggttataacttataggtaactagtatgagagtggtccaagtccagcaagactaaaacacatggtttgtttcagagtttgagtatcccagccacatctcacacagaaaagctaaaaaccagaatctgcgcagaatctcagtggatgttatggatttatagttgtttgcctgtattgcgaatactgaatttccaactgaaccatgaaatgtttggtgaagtggcattgaacatcagaaagtatcccatacaagacacaataccttgtactatttacttttgaagacaaatggcacacaaactatgcatatatggatcactgagaagtccaaaagccacaccagttaaaaataccagaggctgcagtaacagttctctgccatttttcagcatagcgtaccaaaaaacgttagggatcaaatatggtttccatattaagttcccaattggagcagcaagtacagtcttaatatcttttactaccatctagcaaacttaattagtatatcaatttaatctgcacattgagaaataattttactggttataaactctattaagctccaaagaactaacagaaactaacccattttctacatccctaagagccttacgctcagacaattcttgcaaaagcagatactagcaatccttgcacatgtatttgagaatttagactacttacatcaggaggcatgcgccggcaaggagaaccgagaccgtgtgtggcttgtaaagccaagccgtccacgggtcgtattcctccacgccgccgccgtccgacggccatatttccatgtcctgcatcctctgatcgttactagatccatattccatcacctcaccgctggcatcaatggagttgattactcgtctacctgcatggccagttagagaattcggatggagagatcaatatatataaaaaaaaaaccaggatcgcaatcagtaatcagaacgaacgctcgcttgtaatgagggtaagaattagaaccaggatcaatcaaattatcagagacatgatagagagtagcaaatgcattggggttcacagggttgatcaattcgacggagaatcgcagaaggatcgcaagaagcagatagaagcttacggtgatggatgggagccgaatgctgtggaagcgacggcggtctctgctgtcgagaagatgggcaggcgtcggcgtcatctgtgtttacatcgcctccatctgggctgggctgggctgcggtggagctcggggggtaccacctccgacgcactggcatctggcagtggcagatcaggtagtcaggtccccggcgggcctcccgagctggcactcaatgtgcatgcatttatctgtcaagtgtcaagtgtgtttataacatggtaaggattttcactttgagatgtttgcaaagaaattctggacaaaatacccacatgaatactatgaaattctttatcatatgcgggtaactcagcgtagaaaacgtcaggtacacctacaaaatgctctttaggctggtggagacttctcaatgcgcacgtaaaattgaacgataaaatagtacatagttaattaaatattaactaaaattaaaaaaatatattaatatggtttttttaaaggaaacttttctatagatttatttaaaaaatatatcgtttagtagtttaaataacatgcacgtagaaaaagagaaagtaaaagttaaagcgtgcacgtgaaaaataagagtagaagttaggaaaatgttcaaaagagggagtagaagttaggaaatttactcttgggtccatttttctctagcatattctttcgtataaattgacatcagacaatcatatctacttgaaggccactacaagtagagtagcaggcaagtaataaaaaagtataagggtaatattcatatataattagtaaaaataaataaaaatagatttttcacagttttttttaagatatatcaattataaaatattgataagattagaccattgtcatagtaagagaccatgattccttatcgaactcatgtgaagaggacatgaaagcattattcattgtcgtcgcatctacccttgcgatgccactccttcccttgtgtgcacctgacgtgactatgtgtgcgtctctgattgctctcaacttgctcacaccacccaagagttcgcaccgaggacgctcgtgaactcgcacaacattatgagtttgcacggtgaactcaaaaactcccacaatctcaaccgccgatgacatcacgaatttgtgtgttttggtggtatgaactcgtgcgcttctattgccatgtcaatgattgcgtatctttgcggatgcgatgaccgtataatgttactgttggttttgaaacgagtatatttctgtcacgccgataaaaaaaatatattttcactttttttcttttctataattgtcccgttttctttaagaaaaaaaaaggtaatgaaaggctaggtctcgtgttagtagaaaacgaaacatactggagggtatatatgcaaaatccacaatactggtttgtagcctgggagtctgggacgacttcgatttctgtcgcacatccgtctcccacctgactcgttctaatcggcgaagagaaacccacacaagaggaagatggcggcgccggcgaccggcggcgggatctccgccgacgtccccatcctccactcggagaacctcaccagcaacgtcaaatccatctactacaggttccgctcgttctcttccccccccccccccccaaccaaagtttagaattcgatctgatctgataagtagggtcatgcttatgtctgttcgattggatctgggatttatgcgacgacatggtttgatctgctcagattagccctaattctttcgattcaatccggaaccgtgcgacctggtagtttcactgtaggcatgcttccgctcttcttgcggcaatttcgaaatctcggggtgcagtttaggatcaaaatctaagtactatgaataataagaaaaggatcaagtaattctgtgggccagttcatactgccagaaactgtgggtcaaattgcacacttacactaggatctactaaaattagagtaatcaggcttcatgaatcaactgaaagttttcaatgtttacatgcttttctacttcatgctcagatagatgctagatacctcccattaactattaactcttttcgtaaccctttcagcaattctagtcattgatgattatttttgactgcttcacttttataccaagatggcaaggtgatatgtcttaaccgtgaggattgattttgcgttgcagtcggacattcttgtcaattatcagtggagttgttgccggaatctggggattcacaggcttgatgggattcgtgttctaccttcttgtaatgatggtggcatcccttgggcttttgctgaaggccaaattttcaattcatacatactttgacagctggaacaggattttgattgaaggagtttttggtggccttatggtaagccatactggagctgtaacattgtgatgcacacctttatttccataaaacttgaatgtccagatcattcaacatgatttacatgaacttgtatctttcatgtttaatctatattctatgttattatgaagcatgggatgatgggaagattgatcattttagaaagttgatgaatgtggaacatcccttaacaatctgttcgggtttggcattttaaccaaattgttagaaacctcctagttaggaatagtgtgacattatcatggatcttcctagctgttaaaaggtggcctggtttggtggtagaatacagatttttgatggaaggagtataaaacattgggagcttcataccctaactaatgattcacatctcaattgttactgttgactgttggtaaatgttctcaagttatacaaccacattttcttaactatatgtttggtgttgctagtattctaatatcaatataggattctattgcctcaatgtatagttcatcactagattatttcctcaaatttcttcatgataatgagctttatcctgttttggatggtggcctaacattatttccttgctttttttgcagtcttttgtgctgttttggacgtatccttgatgctgtaaatattattgctattttcaattttccatatatacacaaaccatctagtatttcttattcagtataggtgtcaggcaaggtctgattcgattactagtataatggctcaccaccatagaaccatactaaagccacataactgagagtatgtaaatcattattatgtgaggccatagcatgaatttgaggtagaccattgtggttatacatttgaagatgccatataaattatataatgcatgccaatttttatgtttgagtttgtccttaacaatgaacagatttgcgtatgatattgtgcacatcttctgatgcacggcataaagaactcaactccgaagacttgaagggagctgtggggtttctccttgaactgaattaacgtgtaaccgcaccaaccctggaggactacattcgttggactgctgtcctgttttgttccttttttttccactccacatgtatcagttatagctctgtactttagaaagatgcaagcttattaagtttaatttacaaattgatgtagaagtgaatccaattgctggcaagtatggtgcttgatcttttgaacatcagaacttgctaggtaggggacaactggtcattgatacatctattgctgcccagcgtgctgatactatactccactagtagtatgttatattgttatcgttggagctctgaacttgcatattgttgatctgatatggcaaagtaaccactacgtggtgtttgctgaggaagttttcaactagcacttcgctatcaagacgtggatctttccagccccggcaaattccggtagctgcaagtcagagggcaacctcccattccggcatccagcaaaacgttgcccgtgggggccgcaggatacaccgcgcgccaagtcgttagcgttggtgtcaatttctttcttgcttgcttccaacatagtgttcccagttcaaagagattgcttttacggcttgcttggcaagaataattgggaagaggaatgaatacaagccattttttgttgggaggagcttccaacatagtgcttcccagttcaaagagatagcttttacggcttgtttgccaagaataattgggaagaggaatgaatacaagccatttttttgttgggaggaggaatgaaatgtttcttgggagttgggaggaggaatgactgtgagttaaggagatttgggtgttctgaattcacactctgctgcagacacgattaggagatcgtgcattgccaccatcgacgtctcactcgtaagagcatccgtgtcttatagcaccaggctagttagttgtgcggtggcgctgcggtgcacagaggctttgggggaagcagagccatggtccgggaagagaagcttgactttgtgctggtgccgctgggcctggccgtgctggccgtctaccacctgtggctcctctacgccgtcctccgccaccccacccgcaccgtcgtcggcctcaacgccatcgcccgcaagcgctgggtcaccgtcatgatggccgtcggtaccaattgattctcttcttcttgtcatctctctctagagattctagaattgtcagcctgtctgtcgtacgttcttgtgggcgcagaacacggagaagaacggcgtgctggccgtgcagacgctgcggaacaacatcatggcgtcgacggtgcttgccacgacggccatcacgctcgtctccgtcatcagcgtcttcctcggcgccacggcgggaaggtccccggcgtccccctcgtcgtcgtcgtcgggggcgccgctgctggtgtacgggagcaagaccggggaggtgttcgcggtcaagtacctggccatctcgctctgcttcatgctcgccttcgtctgcaacgtgcaggccatccgcctgtacgcgcacgccagcttcctcctcggcctgccgcccgtcgccggcgagggggagggggaggcggcggcggcggcggcggtagcgcgggaggagttcgcggcgtacgtggcgcggacggtgaacagggggagccactcctggtcgctgggactccgcgccttctacgcgtcgctggcgctcttcatgtggacgttcgggcccatcccgatgctggcgtgcagcgtgctcatgtgcggactgctctacttcctcgacaccaccagggagcgcgccgccgccgtggccgggatccaccacggtcacaaggatagcaccgtgtagcagcactagtagtaagtagtaaccagtttctcgatggcatggatgtacatctattgatctatagacccatcaattgttttgcttgagtaatgaactcagtcacaggagagagttagctcatctttcgaatttcactatcttttttaaacaaataattttgatagtgtgaagtttcattaaatatagcagaaaataattacagtactataatcctgagaaaacaccaccaaaccaccatcacgcacagacgtggtctacccgcacacctaaggaaagatcaacatcaaaccggctgccgctagatcaataaggagctaatgatcaaatacagacccaaagacgcccaaaaatatcgtgggaacatgaggttgtagagggagaggacgagagagaagaaagatccctctccctagcacacacccgccctcaggcctccattgccatacaagggctccatccaaacatattgagaacgttttttggtgataaagaggagaaaagcgacgaagagcattgtcatcgtccgacaaggtatcaaggagatccaagacaaggttttcacccaacggccccatcaggaagggagagggccgtctcgacaacgccccctagagggaaaacaacgctcaaagtgtcgccgttgtcggcccagcaagaccggggtaggctttcacctactgtccacccaaagttttgcagaagccactccattgctccacccccggtcatccaccatcggcatgtggacacgactaaattgatgccccccaccgaccagccttcgcgtgcctcaaggttcaccaccgctggctaccccaagcatcctccaccgtgctgccacccggtgaagggtacgacagctccctgccgcaccaagccgaccacatcgcctctgcgggtgcgtgctaccatgcctccatggttgcactccccgctgctcgctccacggtcgcaccccacctccacggtctcttcactccgcacctccacgtgacgtcgtccgctccctcttgccgctgcctagatgcctcacgtgccgaggttttgccgccgtcattggctacgctatcacggtctcggcgggcactgcacacacaccgcggccatgagcacggcatctctagattcgcggcgccggaacttctcctctacgtctccaggcctcgttgtcgtcatcaccaagaaccgttgcaagggatccaacctcccttgtcagagaggctagctccacacggcgaggtgtcggatctggccaaaaagggcggcgctgcgtgtggcatgatccgtcaccacgctgcactgcgcgtcgcctcagcgcctgctaccccgccgccatcacctcctcctctgcctctccatctgccactctcgtcaccactaggcgccgccgcctccatttccgtctcccgaactgcttcagtgttaacattaacatgcaaaatgcaaaagaaaaattccagatttgcattcgattgtgctcctcagtaccgtcaacaacactgacatgcaaaatgcaagagaaaaggaaatgaattattgtttgcgagatatgcattattaatgtttaaatgattttttatagaggaaaaaagatttagtaatttggaaaagttattctagaggagtatttctctccaggctccccgtcatagacaaagaggagcccatgaggcgaaggctcatgttagaccgagtttacggagagggccagacctaaattggtgggctcggatcatggttcatggcccaaacaagtgtggcccagtaggaagtgactaggtccacgtagaccaggtgtatgcgagtgtggatggagtagtcggtggacgggccccgcgtgtcacgaaccgagtgcacgatcacgaatctacgaatggttggctgctcccacactttttcttctttcgtctctgttctctctctgctgctttgctttcttcgtcttcctcccccttcctcctcatctcctctctccttactctccatggagatccccatccccgctggatcaccatggagatcgagagaggggagaagaagaagaggggggggagaaagaagagtagggggttggaggaagaagattcgcctctatgaccatggagaccgctggacggagaaatagtggttgccatcggagctcactgtctcagtcactacccctctacggattcgtcgacgtcgacgacaacgaggagttaaattggtttactactctgcctcctccagtcgaccgcgccgccggtactcctcctcacgcctcttgccgccgcgctgccctaaaccctcacccgctcggcctcctcccctccccatctccctcatccaccacctcactcgatccttctttattgcaacatcccgatcccctcgcatcgccctcgaaattctcccatcttcgccgagatagccggcgctgctcccgtcttctcggcaagccagcagccgccaccgcctttcctcgcctcctctcccaggcggcttcataggtacggagaccagcactgaatcttgcaatttttaaatagtaccatatatgcgcaattattcaggattatcataggatgctgtacctgttagtcatggttttgctgaatgctgtatctgctctgttggcttatgatgccattttcgtcgttaatctatggattcatttgaaatgagtccctttttttttctgtcatagttactctgatagactgccatatcaatatttttgtaaaatatagttggcttatgcactgagacatgtagcattcgtactgaagaccagagatcatatcatgaaatagtgtggtaccaaaaaaccctagtaccatgacattttttttttttgctctatatttatactattatgcttgacaatttttcagatgcaagtgcactcttttgactgcttttttgtctaatcagtgcgtttacttcacttcaccatagatccacaaagaacgtttgatattcttgtagtgcaaatgatagtgcattttttttatatttattactgtaagtttatttgcaggtgtgatatctgttaattcttatcttggatttatcatttttgttatcacgttatctgttttcttttaagtgatgtctattaacttagggtgttgtaattagccaaaacaaacggttaattagttatcttatcataatagtttgtacgtttgatcaattattcaaatattgatgtttatttctataggttctccccctccactttagctcacatggagatcaagagggtgaagattgccgttcacgtagcgaggatcatctcgatgatcctcgccatcggggtaatgtgtgtcatttatataccgacatcttatgtcaagcctctgtcctacaggttagtgtagagtttgttctcacttttccccggttgttttgttccaagttaatttagagagtttgttcaatgttgttgtttactaaaataattagctaccatgactaatatgctaatcgactttgtgtgcagatatgtcttagtggctatgtggtttgaggtgatttggggtttgctggagttgctcctccaagcaacacacccgttcctttgtggcgtgggacatatatccactacactgctcaccatgatggtcatgatcaacatgatatgttcactggctcaaataatcatattattatttatactggaaatggagggaattaattaatactttgtttatatgggcggtcttaaaaagatgtattatgtcggaaataaaatattaagtgacaaatttgctttccttttaactcataactcattcgccccctctcaaacgtcttcctaatttgattaagttatatttatggtcatgcaggtgcttatgtgttgcacgtggggtatggctattgcagccttgagcactgccctatttgctagacagcacagattttgcatcagcgtgtttaagtgcacacggttcctagttggatttgtgctagcggtgtctgttggatttcttagcgccgtcaaggcattaggtatgctatggatcctcggatcccaatttcctcgtgccgagtaggagattagggtggtatatgtatacacacaatctctgtactctcgtatgttaagtacatgtgtagatctgattgtgttagaaccatgtaaacatctatgtctcatgctgaggactagaaaggtctgtctacacatctacgtctcacggcaatatgattggagaagatgtgatagaatgacttaatatgatatgattggagatgtgttaaaatcgctagtgtgcttgttctttatcttgcttttaattaagttataactagaagtggccaagatagggcatttatcaagagtagggctggaacatataatttcaataaaatatagtatttgaaattccagctaaattctagtgttttttgaaagaaaattgcgacgtgttatatataatgggccaagactggcaatatggcattcaatcagttgaacaaaatattaatacacaatgtctgctacaggaaagagttgcttcagcagtcgtgaaaattatagtttttttttcttcatcagttcatcaagattcaagaacaaggttctccagccttgcccttttattccttctcatttctcaagatatcaaatataacagacatactcctattagcgtctacctttactccctccgaagaatcagcaagctgcatattttttagggggaactacggcgggtgtttataccagcctgaactttattaattggctaaaaacagatttttacaatgaaagatattacagggtcggcaagctgcatataacgtagcatcatatcaatccactgttcagagtaagccattaaacagtatacaagtccagtgattacatacatatcccttctttctataaagttagacttaaagctgaaacctcagtgttccacgtcatcgctaattcttagtcgttcgatcggtggatgagatcgcatatgaaccgttcgatcgaatgcttctgtcgttgatttgattcactcgccccgcacggcctatcatggcgccgcatcatacatcggagaaaataacgtgtgcttggatgccggttccctgtcctcattttctcaatcgagtaatagcatttatgcgccttaaaaccggctggcactatcgattggtctgccatggctgatttccatataatgcagacctttaatcctctgtggcactagagttcatctttggctttttagctcacgagctctccaaatcattctacatattattcttctttcgagaatcattctacatattatttagatttaattcatatcaacttatgtaacttatgtttatgtaagcttacattgtttaagctatcttacacattatttttatttattgttataatagtaaacttccgtagcaacgcgcggggtttcacctagtataaacaagatacattgccatgaaaaagaagataaagtctgtgctagacgcccagacaagaaacttgatagtggacaaggaatataaatggtactgtcccagatgttcctttaataaagaaaaaaaaaggaaaggttctatggttcagaacatgtaagcaacacagttacaaaatggaatctagtaaggtatatgttgagtttccagtcaatggcattgaataatagcaccggacctgctatctacctcacagactcatggtagattaatttggagggagaaatgaataccacgatgaaagaaatgcacaggtggctattatggtttcattgctgtctattatatcctctattacaaaagcatatggttacttgcctagttggctacctgttcaggacgaatattttcggttggcctcgcggttcattttgtattgacaaccgcagtcttccgctgctttacttctgtattcatgggtccaaatctggaaagattaagatttgagtggtttaagtcattggccaagcagacggaaagcaagaaaatgatgtgcttatataaagatggaggagcttcattacatagtgcagcatccaggtgaagccctgaagacatggggcacagaaagcccaacatcgccccagcgcaatgaagcagcctcagattcaaggccccctgattgccccaaatttcttcagcgttgctgttacgaaatcagagggagtgattccttcacttgactgagacctcacagatgttaccaaagttttttgcaatgtccaacagggcttccgcatcagctatttgctccgtaggcctctgcactgcattgtaaaccagcaaaatatagcataagcagttatttgctttctagtaagtatgcattctggcatgccacagtgagtcctaaccttttaatattaacatggcagtaaatccaagttttgacaagaaatgcaatattgcaaacaaacgacaaggcgtcagtcttgcaaaagaaaagaacggagtaattacatcgaaattaacatggaagaaccaacgcgattaaaattccatagtcccactatctacataattacatattgcaatatccagctccaatgcaatacataatgttttagaggaagtctctatatattaatgaacagaagaatcttgatgtagttggcaagaaaataaacttgtccacatgctacacataattcccctaattcctaaggggcatcaaaagtccaaaaaaaaaataatcaacacaaatgtatctattttgctccataatttgctgatgtattctgatgttggcaacttggcatagcaatttgaagtaaaatatcaatagtaagaatgaaatgggaacatgaattttgatccttaaccccttccctaggcatatttagttcttggacaaagttgtgtctcaagaatggggaatatgctccatgaagttttcaagtgaaagcttttagttggcgaaaatgttatctcaataatctgaactaaccaaccaatgttcgaaatcctgctggaatttattgcacatactatgcagatcaacaactttttggtacccattttttctaaatctgcaaaaagtgcttcagtagccacttcagcaactaatagtctaagcatgcagttcaaatatcacaatgtctttctaatttatcaactcaaatggcacacaaatttgaaacagcaactccaaggcaaggatgatgacgtcacaccacttcaaagttgaaactgtaacctcaaacagattgaaacatgacttccagaaactactcagtttgctaaactgcaacaaattccaaactgggcaaatcatcggattggaaaaaaaaaaacgcgaactgtggtgattaggtaccatctcaaaatcctgacagtaagctttagtcctgaattttatacaaactatatcatggaatgagttctaaacatattagataaaagaaagaatcaaacaccctgcaacaaagtttagtttagaaattttctatagattatagcatggattgacctcagcctcatgattctgaacagtttagaatacaaccttggttgaaactggacatagaccaaattgaggtaaccaataatatggtagcttttccatggtgagcagctgcacaactggacgactccaaattttactagccttggaagaaaaaaaaaaccattcaccataacctgcatctctctaaacattatgcttaagagctaataaggaaaagagacaacaaaatcaggacctcacacaaaatataccaaaacacaccaacagtccaactaattcaggggacaaaacactaaacctcatcattcattcattacgtgaatcaaacaaggatgcgcggcatgctttgcgtgccctaccagtcgccttataattaacatgttgatttgagcgtgtatatcgctggttgacatagaggctaaaagctaatcattagatatatgcagattgtggacaggatttatctagcaaaatttgacacatgcatggtggcagaatagacagtacatagtaatagcggtagcattacagcagttatgctagatgagcattacctgcagtacagatggctaaatgctaaggtggttatttagatgcctttgcagcaattaccctttccccccttgaattcagaggattgcatcacttcaagggcctttttgttgatgtagaaatgcaaggcacatatttgtctaacttgtaccatcttgtttctatgatgaattgcttccacttatacatagctgtttgaaaagtgctccataaagacaagtgtcaatactgggagtcaataaccttatggcattgaactactcaacaatatttagatcataagcatcctcccctcataatgttcttttgctgaatgtgaataaaataagttcacggcgttatttttgtggtatatgtttagattgtaaggattaatacaggcatacagcagtagttgatgtcaagtaatctgtaaaaaattaactgaaagaccaagaacaggtacaatatccaaatttaaaccaatttcaggaaataaattgaacacatatatattatggttatggaaatacaaaaaggtaccggccaataaaaaaatgatttatccgtactaaaaaacataagaggcagacaaacaatctaatctattgtcttagcaattttctcataatcaggaaatgtaaactgagcaatttccccaacaacataaacatgtctgttcagcaaagaaagttgtaatggagaaaaccaggtcagagggggagagctcgagctgcatcgctacctatctctcttgttcgctctttccggccgagccaaagccgccatcatcgctgtccacctctgcatcgctcgccctcgacgaccccagccctccgccgcgagctgcgccactaggacaactgctcccatccgcaaggccaatgccgagccacctccgcgagcacgggtggaagaaaggcatctatgtcctgcggcagaggagctggtggcgccgaggtggcggcgcaggggagctgggggcggggcgggccgtggtcgccggcggcggggcagctcctcactcctatgtgccaaccggccgcgttggcccctgtcccagcaggagaacaagggggggctcaaatgtaaaatagggagacgactccacgtcggacgtccaatattccaccaaatatcagatgcccgactgtttgtacgtcatcacaccacctgcatatgcagcatgtaaaaaaaaatcggtcggtcaaatgttccagttgactaatgagtgaaacatcaagttatataggctgaaataaaaaaaaatcagtaactgaaacattaactgaaacattatgaagatgcgcgttgaaacatatcgctgtcacatatgaaacaaccagtgttaatggattgaaacatatgtttttttcatcaaaatataatcatgcgatatcttgttgtaaagatctgcttcctccatttcacaatgtaagttattctagcatttctcatattcatattgatgttaatgaatctagacatatatattcatattgatggtaatgatgtctataatataagtcattctagcatttttcatattcatattgatgttaatgaatctagacatatatattgatattaatgttaatgaatctagatttgtgaaacggagggagtaattataaagaatacaacggtgtgatcggattgtagattggataattagtttaacagaaaaatcgttttgaaactagctaaaatgcatgcatgcatgcatgaggtggagagagaggacagagaatagtaacaattagttttgtgaattttgtgaaatacgctgaagacacatgttgaaacatgtcctattacgtatgaaacaaaaagtgttaatggattgaatcatatgattattttttattagaatataatcatgcgacatcttgttgtaaagatttaattacaacgaatataacggtgtgatcgaattgtagattagataagtaatttgagagaaaattcgttttaaatatcattaaagatgtatattatatggttggagatagagatacattttcttagataggtgcatgtgtatcagtttgtcagaggctgcccgtccaacttttctcattggttcgggggcaaaaatcacctaatctaaacccttctcacaaaactaccgctcaacgtcatcaacaaatatgtagcgtccgatttcctctccagatgattctaaccgttcgatcatctgattgactcctcaagaaagttcatttgcaatcagatcctttcacatccctggcgtagaaaaaaaaggtttactccgcccccaaaccgcgacgagattgcgggggcacgccgcacgggcaccacctcgccgcccgccaccaccgcttcctcacccgccgcagccaccgcctccacctcctcctcctccaccaccttcctagccctgctgccgcttctcgtactctccatccccgtagtcggcatccgtgcggcctcagcacacctcctccatctcccagatggccacatgactacacagtggcgctcagccacgtctcccctcccctacggcaagttcagagaagacggagctgggggtaggccggcaacgagtcgccatctcctccccacgagcccacgcctccccgcctcagccgccgcggcccaccactccggcttccacctcagattgcgaatcgcaaggtaatgagtactaaaacacaactaaatgcaaattcttgaaggtctgtaagttgggttcagaaaaggccatgcaaatgtggtcagcgggtgctgatatagaggaaatagttcaagccagcacatgcaaacaatttaacttagaagaagcaaattaggcatgcagtgaatgagatctcccatttgcttgactggttttcttataagcttgatttttctctcagatacgttgctcatatcatgatgattgccatggcaaagttatctgtctatagttccataatcaaatttcatgctgtaatatcttggaagtgcttaaatgatgaattgatgttgaggaattatatatcttggaggtgcttaaatctcatcctggaattatatatatccttaaagtcaaatacccatgtcaaagttagtaaatgtaaactttcttttctgaaaacactagaaagtgctgaaggcaaattaggaattagatatcttgatggagagcacatattggtatttccctttgttttttcaataaaattttcattgttacccagcaatcatgtaaatttgagttttactttcagacgaaacatcaaaatttataacaagttgagatattgaacatctcaacaagccatatgtgataggtcaaggcgtcaagcattatacctttccctacaatttctaaaaaaaagacttaacacaaactttaatttttagaaatataatactataattaattaaggatgtcctaagcattcaaaaagggataagattaaagctaatttccatgtcacctcaatctatttggtacaagaaaaaaatgagctctacttgatccatcttaatctggtctcctcaaaaatattaaatctaacatcctgatcgacaagaacatatattaaaattttgggcttggattgattcttctcaaagttgttgtgtgtggtatcatgtcaagggctttgtgcgatatggtagctggcaactgaaaactgtcaaattaatctatttagcttagttcagtgctgcaattgctcatcaaagagacatgtaaagtagtaattccatagaagaagaaaattataagggacatgtattttgcagaaattaagctccatttgctcatcaaagagacatgtaaaggagtaattccatagaagaagaaaattataagggacatgtattttgcagaaattaagctccatttcatgcttacacaccataaagaagtttatgttagtttttagtacatctggagtttacctgagaacagattgcaaaggttgtatatgtgatcagtgcactgtggtaaggaacagagttaggggtgggtgctgtggttcactgaccttattcaacaattactggtgaaccttgggaattttcgctaacatatataactgtcatgtcacttcatttatttttgaatatggtttgaggaatttcagaaaagttcaattgttattttaatttttcccattgttttagtgtttatggttattgtattttttcctgttgcaacgcacaaacactttgttaatcaaatattaagaggaatttgggcattctttgtttctttagcaaggtagatatggcgttgcttgtttgtatgccagctttgaacccaataaactcccatatgacaaagacaaaattattagtcttgtcaagtcttatcccagtgaattctcaagtatgtacattatgagacttcgtttcattttaataacttcgttgaggatatgcgaagtgacaagaggttcaaggcgtaaagattggtaaattcatttaataacttcactgagagagtctttttttaagattagtgattaccgattatgtgatcgagcgtttctgtgctatggaaaagcgccacagtgataaatgtgattaaatttcatcgtttgtgctatgtaaaacttgattctaactgtacttttcataaattaagacctttgttgtatttatgtgcatgaagactttgatttggcacttgaggcgtcagaacacaaagggtaaagatcctcggtttgccactggctggggtggatctggtgtgacgcagataccccaaagcactgagaagccattgaggaagctcactcttgaggacacgcgcccctttggctgcactagcacagatttcacaagaacagagaagagtgaggagagcaatggaacaagaagcagcaacagctttggcagccaagcaagaggaagtggcgcagctcggggagggtatcctccaccactttgagcaaatcctccatcaagattccctcatgtaatcacatttggtttctccattcaaatttctccctgcacgcattttcttgtcctcacttcttgcattctgcaacacaattttttttttgaaattcaatttcctgcgtaatttggctgtttttaactctctgatgagcattcatgcagagatgaagtggggttcttgcacccgacacagttccagtcactagaacacagccagactagtaattggacatttgaagtacctgaatgtcctcagagatacctgtggtgcaaagaccataagcttgccatatccacggaaatcttacctaagctctaccgtgctgcacagcatgcatactccaattcagcagcagccaaggatggttcattcatggaaactgatctgatgaggcacagcaaggcactgctcattctttgccctgacatgctcaccgcatggaactcaaggtaatgctgtcaacctatcacggtatcgctaaaagattgcatctttcatagctagaaggatgtgactttgattaagttggaaataaggttcatcactgcctggaagggattccacgtggttgttttatgcttcttttcttttggcaggaagatagtgctatcagtgaattatgatttcactaagctcaaggatgagctgcaattgtgtgctctgatcctttcatactcaccaaaaaacgaaagcacctggagccataggtacagcttgtcttttcacttgtcaagttgtcaaattatggaatttggggaaactctttcaggtcacctcttaaataatttagggattttttaggaaaaaaatggatgcctatgaccaacaggtatgataatcttgagatatatgccccatgattatttatgagttcctctacatttcaatacctcccattcttccgaggaccgctgtaaaaaactcgttggggctggattttatttgggcagcacagaaatattatgttgattttgcccatgcccacacagtttacagtttaaactttaaattgattgcctactacaggagatgggtgatcaagaaggtttcagagcacaaccaggatgtgtcggagcttatagagatggaatctgtactagtgaaacagatagcagaggtcatacttataaatatttacttctttgggatgttaatagaattattcccatctactttacggaaccttcatttcctagcagataattatccgaactcatcatattagcatttcacacagttccttatttaactggttattaaattacttttttttgccgggtggttattaaattactttgacatttcacacttgtagtgataaacagtgtacaacaagatagtttgatcctttatgcagaaatcaaagatgaactaccgtgcgtggaggcatcgctgctggcttattccctacatgacaagagaacaggtatgggtaaaggaaaatcaagctgctaaaaattctttgtccacttttcttaatcttatgtgcaaacttctgagcaccaccatggtagctaggttaggacttttgttatattgcaaaaaccctacaaaatttctgcctgtctgttatcagttcatgcttatcctcatcagcatctaatttctgttaaaggttctgaatgagttaaagaaatcaacaagatggaacgagttacatgtcgctgacaactgttgttttcactaccgacgggttagtccctgcccttatttgtgtagctagtactaattactacttccaaagcaaacttgtatcccactcaacatttgcatattgaacaacctgtggcatatcgtttgagctgtctcaaacatgtcattttattgattgtttgcagtccctactgcttgcattactagacagttgccatgtagaggacacagaagattcccttgataggaagtcagaagttcatttactgtggaaggtatgttgtatttcattaaaatctatacctgcttcactatggttccccttgtgccatctttccctctgtttttcattgtacatctgttacaaaggaaaaactcgcctgtgcatttcattttatttgagaaacacaaattactctggtgcttgagtaattgcatctgacaggaggaactgacgtggaatgagaaacttatcaggcgctaccaagggagagaggtttgaagtttgcccatcatgattgtgacatttttatgttagtgccataatttctagtgaatgttgttcccctatgttgattgtgctagtgtgttggtgtagtctttgtggatccatcgtaggttcctctcacaatggtggatgaagttcttgctcagcagtgaggaaacagagtgtgctgcaggcacatcgctggtggatctcttcctagtccaggagatatacctcctgtcagactgcctgaatgcccctgccgatgaatttggtgaggcatgtgtccaatctgaacttgcagccctctacattctctggatatcaaaggtaaccccatataaacgtttgaaactaaaaacaagtgatatatcctcctcttcacgaatgatcaacatttgaaaaaaaaaaaaactaagcatgggcatgttgttacttgcagcaagttccggctgtgaaactaaagctggaagaaaggctacattcgttggggagcctggaggatgtgttagcaagggcctgcccggagagaagtagattgtggacgcatttgatagcttgactattgaaagcagaacaaggacatgcattgtagcaatatgtggtactcatatccaacggaaaacgacgcttggaatacaaccatttctgaggcgactagacattttgcacgactcctaaaaaataactcatcttaggatcctatatgatagcagatgcctgcacactattcctgtgaatcctgtggcgtggctgtcgctagtgaaaaagctcacaaaccacatagagtgcatacttctaaatatatgaagttagttaaaaatacagagggagtagttgaatccgccaacaaagcgcaattcctgtctccattaacatgaaccacagaatggttatctgagcatcccagcagctcatctaaatttcatccttcgtactcccatttagatagtcatccaaaaagatttctactccatattacttttcacttaacagatcatccatattacatcctttatataccaacatcatatattttactaatattttacaactaccacttatttatcaccactctaaaaaaaaaaaatcttcccacctttatctcttctctaccgccggtgccgagaggacggggaggacgagggctgatcggaggggcgacgcagtcggaagagcggctgggcgaggggcggtgcgatcgaaggagtggtacgagtggcgcaaggggcggaggagcggcgcaagtggccgacggcgggaggcagccggcgggtgcggaagcggcagcggcggccgacgagcgcggaggaggcaggcggcggccgacggacacggatgcaagcggcgacgctatccttctggtatacctatctctctccaccctcctcccgacgagtccatctctctccttctcccaccgatggtccgctgccaccaccacccagtctttgcgaggagtcgattcggatggggcaaggccgacctgcgacgacggcggtggacggggaattgatccggatgggggcacaaatttggtctgggtgctggcagttgcaggatagcgtgaggagagaggaatgccaaatttagcatttttttctctcggatagatgatgcgttaaatttggagggtgggatagggtatctactggagggcgtttttcttctgctagccgctattttctcgatggatgttcggatggcatatttgctgggatgctcatctatctagaagcttagcttacactttgcctagcttattttgtactataggctagcaacctatggctggaggctggtcaaataactcctactgccttttgttggcacatattggaaacgactattcacctaccaatggaatatatatacacaagaataatatatgaaacatgttgacaatctgggtagcacgcgagcagcttagcttggtgatgtgtcccacatctacttcaatccacgaattccaaaacttggaccctagcaagagtgaaacgatgataagaactcatcttatatagccttcttttctattacagttttacctttatacttgtacaattacaaatgattttttcccctacaatattcaatgaaatttacacggtctagctccgattctttaaaatagaagtataagtagcaggataagtaaagtagacacgtagcattggaagaaagaggaaactgcatgtctatctcttaagaagcaaattcaccggaactatagaagaaagaatgtacaggaaggtacggtacagccacaacagcagtagatgcgaaaccactgtggttgccatcattgttgttattggtcaccatgccttggaacgttgttgttcgccatgggcattgggcaacgtggtcgttcccgtagatcagtgagcagtcgtggagtagtcgttcacgtagaacagcgagcagtcgagtatattgcgctccaaaaactcgattcgcactttctctcggtgcaagatcggggaggcaaatgtttcgaaggcttctctcctagtgttcgtgcgcgtagacaccgagaagggaagaccctagtccgtataagcaatagtacgtgtgttctcttgagatgagatctcaattgtgaaaaatccttcagtttttattgggttactcgtgaagatgaagagaatttgtcaggaagagcttggcaacgattacttgcaccgtgtctcagttgttctgtcgccacacacatttctttgttttctgtttgtgtggatttgcgggttaggttgtaaggtttttaagcccaatttcacttataaagtgggtcaattctctttcttaatatatccggcagaactcatatgaatagtggaaaaaaagttgctagaaaaagaattactagcaatcgagattagaataacaaccacctgttttacttccatagttccatttacttctatattggagcaacagacgaaggcaaaaggctttgcgtcaaaacaaatcgtgcagtgtaaacctcttttttttttagttcaacagcaagtgcaacataaatggaagattatgtcaacaacagtcatgcactgtactccctctatcccataaaaaataaatataagactgtatacgacatattctagatatattctagtacgatgaatttggatagattcgtactagggccttgtttagttgggaaaaaaatcttgggtttggttgtcacatcggatatacggatacacatttgaagtattaaacgtagtctaataacaaaacaaattacagattccactagaaaactgcgagttgaatttattaagcctaattaatctgccattagcaaatatttactgtagcaccacattgtcaaatcatggcgcgattagacttaaaagatctgtctcgcaatttacatgtaatctatgtaattgctttttttttcctacatttaatactctacgtatatgtccaaacattcgatgtgacagcgtgaaaatttttattttgagaactaaacatgacctatgttaatttttttttattttgagaactaaatatgacctatgttaatgttttttgggacggagggagtaaatggcaaaaccgaagataggctgaccatgctagcgagaaggatgtatgcgtgtggtaaatgtggtttctcttttgtctgtgcaattccacaattaagggcatgttaaatggtagagacgggtatggtctcttaaacaatataagattatttagagacaatgtctttacaatagttgagacgacgaaggctctaatcattaactcaaaaaatattctttttgttaatattctttctatttttttactctcatgcaaccatatttctatattatagtgattaagagtcattgttaagccgttgttatgcataacaacgatgtttgtctctccctttttctctttcttccatgtcaataagtattcctaattaacaatgctaaaaaaccactaatgataaccattgtacataccctaagtcggttcatctctctatgtggactaaacacacgtgacttaaattgggggaggacttaagtttcatgtgtatcctgatttaccaattgctctggtacctttttatgcatttcttttgttaataagattgttttatttttgtaagttttatgatgtataaaatttgttcgacagattatatttttccgatatagatagattctaaattttggttgtgattatgctcttaaaagatataatcatgttttacattaccaaaatattaccattgcattagtacgagcatattactactagtttatttaatttaatttagtgggccaaatgcccaattaaacctaacacttatgcggcttgctgtagcacacgagaattgctcccgttcgagcgccgggtacagataagaaaacaaacaggtgctctgttgcgtgagtagctaattctctctctagaaatgcacctttgcaggccctcgtaagataatattcataatctagtttatatcgaattatgaaaagagctacaaagattacagtagagaagaatagaaccgacgagtaccgattagactgttctcgagatcgacttgacgagatcaattggcgagctggcttatagtcgatttgatggtcccgtaccccctagggccttgtatttatacccctgaataccttggcttccaagtagaactcagagaatatcttacacatacgaatcataaatccgcatcccctccaaataggattctaacaccttttatttggggagttggtttctttatacatcagcctaattccttaagactaaggtaaccttcttgtatacttgggtataccatattcgtatgctgcctaaccccaaggatagaaggtatgcctcatccgtaaccctgacaacatgcatgcatgtatttgtttttagcaattttgaaatgttttttctccttaaactacttagccgatccaagattcaatcatgccattatattcatcgcaattaaatctttacaataagatcttacgtgattatatttatgataaaaagatatgtgtatcaactaggggtggataacgagccggctcggctcggcttggctcggtcaagctcgttaggataacgagctagctcggctcggtttgttatcgtaacgagctagaaacccagctcgactcggctcgtttgaaagctcgagctagctcgttaggctcgcgagccaacccatccaaaccatccagccggcaacagaagaggagggacctagcggctggcgagggaggagttgggccgggttgatgtggaggtccttggaggcgacgccgccgccgacgacgatgacgatggcgatggagatccacacgacgacgatggcacggcgcgggcagatgtg

SEQ ID NO: 16028 - DNA, 1071 bp, Oryza sativa
tgcagccctgcggcggcgaagctaacggcggaggcggattggcacggcggcgactctagcggcggcggcacgcggccgaaggtggctgcaagcggcggcgctagcggcgagcggcgcgagcatgataggaggcacgtgagagggcggcgagagcggaaagggggaaaggaggctcgggggagcgatttctagggcacgggaggggcggaaacggccggggatggcccctatttggccggagacgtggaagagtggagagagaaaggggacgggattcaaatcgaatcccgccgatttgcgggcgcgcgcgtgagcatgaaaggcggaggagcggcgggcgacgatgtgggcacggcgcgtggacgcggagtgggcgcgggagacgcggacggcgacgtgggagcggcggttggagctccagcttcaacggctggaggtgggagacgaccgacaggtgggccccacctgtcggcgcccgaaggagagagggaaggagggaggacttctgggagggaaagggaggagcaggccggcccagcaaagagggcgcgcaggagggaggttgggccgacggcccaacaaagaaaaagaagggaaagaaaaagaaaaggaaaaaggaatttccctgggatttaatattgcagtttatgaattttaatgggttaaaattatttatagggctctgaaaattccactaaaatcccgttaatcaattgtgacatgtggaacccaagaaaaatcccacaatgccatttccaattattaattgcatttattaattagggattcaactctaggttaattagaacaatttctccggacgatttatttaacaaattttttttaaagcaacggaaaggggaaacttccgggcgtgacattaaagaagttgattggggaccaaaccaagaccttctccaggtccacttccatctcaccacttcacttttggtccatagaagacaagatataaagttctacacgttttggattcggattcgggcctcctgacagcatgaacttcaaacggacctagcagctgatctagaaggaatttggagcccatgagta

SEQ ID NO: 16029 - DNA, 10071 bp, Oryza sativa
cgtcgtctgcgccttcgccggctgctgccgctggccggtcgccggtcgccggccgccgccgtgtgccatgcccgggctggccttagcgccgcctgtccccagccgcccgatcagccctcggccgattgtggccgtccatcccatggcccgcgtggccagccacgtggtgccacgtcggcgccacgtggtacaccaccacaccggccccgtggacccggtccacggtggaccaccccctttgagccgctgacccgtgggccccacctgtcggcgctgcccccccccctcgctaacatcagccctgggtattattgcgcaataaatcgaataaggatattcctttattagtaaaaacacagtttatcttctaaaattcataagtaattcatccgagctccgtttaagtccattcaagtctcagtaaattcataaaaatccctagaatctattaaaaatggttttgtttcctctttcagtagtcttatagcatgttttgctgtttgtcgcgtagatttcggctgtttcgtcgatccgcggtttcttgaagacgttgctgaggtctcatcagtgcgagagcaaggcaagtcatgcattacaattgatcatattgtacccaatttacaaatatcccgcatttctattaaatgttgcattcttttacaatgtcacgtgggatgggtcctattactcagccatatattgattaccttatgccattgataacttgggtatcaaaatgactagatgttggtttaggaaatgcttagtcatgcttagctcaactagtacacaaatggggatcacattattacagactttgactattagcatagttttggtttggtgccaccgtaatggtgttagttaattaaaatacactgattggtgggctgtgggtgcatggttttgctggtcgcactcatgacaattaaggaccggttcacgggaaaccctgggagacttaccgtgcttaccacaagcgggagtgggtaactgcttaatctgaagtatagctcgaccctttcctaggcaccggtggcgagggtgggcgtaatggagttgggtcagccggggtgtccggttatccagctgccggattcaccatggtgcaagaggggaccgcccactgccttttgaggggtagggatgaaaccttagcgtggtgtggatggttaggggagggttatgcggagggtcttgtcacgatttccccctttgcagtatcatggtgatacttcggggcatggcgacatgtgtggaatcgtgtcttgtgggtacagttgtacacctctggccagagtaaaactattcgaatagccgtgctcgcggttatgggcgatcaaccagattcaccgtgattagtcttaccctagtttagcttaatgaactggtgtagttcaggtggttggttgggcctgttgcaacgtggtgtagcgttggacagtaattggttaatattgattaattactacaactgttttactgctttcaacttctgattttaaatgcctgctttatgcaaaagaacctttagcctcctttggatatatcctgcatcatacctcctcttccggtatgacttgctgagtacagtgggtagtactcaatcttgatctcttttcccccacaccagagctaaagattttcctagtgggagctgttttgtcgaagttggtttcgtcgctgccgtcaaggattgcctgtggagtggagtcgccccgctgctgaagtcaagcttcccggtttagctcgcttttatcttttccgctgcatttgtaatcttttctatttttgtaagacgtggatctgtatgtcaacaattgtcgtttgtgtaccctggctggtcctggacaaggatttaatgcacattcagcttagaaattctggttcgtgaatttctgggcgtgacatttaatcatccatgcattccttacacacggtctcttttcttccacccaagcaagtacctctgcaaacgaaaacacacaacactcattgtgtagcgatgtttgttcaaatatataacaagtaaatctaatatagaacatatgcatctttggttgattaatgcataaggtagtcatggttatatccgagctagttgtgtcctcatcatattacccttccatctggaactagaagagtgtgcttttgataaggatagtgttttcaagtcctagctcgtattcattcacgcttgtaatcatagcttaaatagcatatatagcttcaatttaattatttcccggactgtctcaaagtcggcagatcgattcattcctttcataatatgtggataagagaatccatcaaactagtaccggcaccatataagtgacaccatcatcactagagtgtatgagaagttgagaactccagtgagcaaattgcaaccctcgagtatatagtgaaagaacagcttggacctaccccagctacctagcaagctgaaagtttttatttctcaaacagtgtatcaaaacatttcttttttcacaggattgagtggtggatctgtcagtagaaccttacacttcaatgaatcaaatttcagctcactagctactgtaaatgcatgatcccaccagatgtaggaatttctacctggccggatgagctgatgaacaaacacataggagcagatagatgtaggtgacgaacacatgggattcaatgttgatgaactacaaattccctaaaagttgatgaactatagctctcccaatgacacatgggaacgacagctctcctcattgatgaactaataataataaaattattttgtgtatttacttaattaccttaaatgttggatcgatccacgagctaggagagttgtcgccggggagagggtcactgcctcgccgggggtcgattggtgggagtcggaggggtgaggatcgaggactcaactcagcaccgacgagcaccggccgaagtcggagctagcggaggggcgaggaggaggaggaggacgtacaactgagagtctgatatggtttctcgtggaggagaaccccatggagctgcgacatggaaagatgatggaggcggtgcatccatggaacgacagtgaggagaggccaagttcccatgcagcaaatgaagtctgacttatggttgtttcgaggggattcagtgtttgggaagcttcacaagtatttttcattcaattattgtagatgatggcatgcacattacatagcttatgtaggtagtagggtggatccaacgtgtgtgtggggaggggggacttaagtccccctacctcgttggatcaccattaagagaagaggaaaagagtagggggctggaggaagaagaagggaataagctccccttccattcttttcctagatccgccctaggtagtgttgttgaatttagttgcagcatgtatagctgggagcatatcaacatgttctttgtaacaatactagctacagttttttattctttctccaacgcctaataatagttctttttatttatgggaaatacattcagtgctgctagcaaacaattttttccaacaaaaataaaagaataggcaatgaatgatttggtagacaatatcatggtcagagagccaataatagaatgtgagcaattagggttaaaaagtttggtgacaattgatgagttacatttctagccttacttctaaattcatttttttccgtgaagtaattcaagaagcattgacatgccatttaggccatctgcacttcttatcagtgcccaacggtgtttctaggcaaaaaaaaacatttatctatttggcactttttgttgttataggtagtgtttgtggaaattactttatattaaaactatttaaggtagattcataaagatgaagataatagagccaacattgagtgtgagttgcagaacgcataaaaaccagagtgccatgagcatggtcttgctgtattgatcatggcggtgatgcaactcttcattttatttttgtttatttaccttagtcctaatcaataaatcatgtttgattgcccccataatggaatgtactatgtttctgcattttggtgaattgctgaaatcctcccttatgggcattgattttgtcttcaaggtttatgcatgatcagtttgaacttatctctacatagaagaaaacaacaagctcaaaaaggattgtatgactgaggtgcatatggtgtgctcttgaacataaattaaaaatagaattatttccgatagaccaagctaataggaaatattgatggtttttatcttgttttatccggttgatcggattgatcatactttatctgaatgtaggaatgtttcagatgataacatcatactacatcatgttttaaggcaattgatttattgtgcataatactaaggaacctttcactttcagtgtaaaactgtaaatatgaatgcccatgtctcggttgccttttggcggatgtgttacccattatatattgagtttgatcccaccctgccattcaagttaacatgccatgtcttggtttattagactcatatactgtcatatgtgataatgtttctttttaaaaaaactaaaatttagttagaattacataaaaagtttataaactatatgtttcatccccacttttgataaattccagactctgcacctgctagttactcccttcatcccactaaggcacaatcaaacttagtgcggtctccaaaactaatatttgactttaaattgctcatatactataatgtttgtagcaacaaaatcataatcatatgaaagtaaggccctgttccagaacccaacagagggggagataaagttttggattttcgtggcacgctttttcaaaatgctaaacggtgcgtttcgtatgaaaattttctatatgaaagttgttctaaaatattagattaatccatttttcaagtttgtaataattaaaactcaattaatcataagctattaccacctcgttttacgtaaaacacttaatctccatcttcatcttcaggagattcaaacacagcctaaatgcaaaagttaatctaataatactattttcatcaaataaaatttagtataataaaataattattggtgaaacattaaagtgttgaatcttaaaatatgtgcacgccttattcagtgcgaacaagggaatacaacttaattagaagcgaggtaagctacagagcatattaagtttttttatcacatctctaatcatatatttaagtgattttaccacatcttctctaatcatatcgtagtgagacgtagatgtctgcatggtaacataaaccctccctagttgagtagacgtagccacgtaggtgagatacttaattaccactcaagtcctcaacacggatacatatatagatgtgtacttagagcattatagtcctcaacacaagaagatataaatgtgcatatataacactactagtccttagcacgaggtgacatagatatttttcagactctagtcctcaatacgagaaatctgagatgcaagaagccgtagtatgcctagcgccttgactgcactaagagcgccaacaaatatcgatagcaccacgtcaattatgtagcatttgcatacagccatgctaacatgagatgttctccagcaaacatgacagtggccaaggctagcaaaaatgacagtggccaatgctagcaaacatgacagtggccaagactgcattactcatgccctacgtgcaacacatgagcacctacatggaaacacttcttggggcatatacatcgtacataatcttttctatctagtacattttgagttacaactgagcaaattaaatagtgaacaaaaaatgattatttattatcttgaaggatgaagtctgagaaaagatgtttgcatatggtcgtctggtgcccataaacaccactaggtggtgaggattatcgagttgatcctcgctgcatgaacaacaatctttagatccattgttgcatgttaattgcttgttgtcaatattaataataatattggagcctaacattgagaaaaaaaaaagaaaacaatggagaaaaagatgatatgaagaaaacaaaaaggataaaaataaagaagaggaagatattagtaaaaaaaaagagagtgactccttgtcgagagataatgcattatcaacgaaacaaatatagtttgactttttttgtttttttccttacacagttatattatcagtaaaaatatgtgatgtattcatatgcatattgtgaacaaaaaaatgaaatatatttaatgcgggttgtgtccatagtggctgctaggctacaacatggcgccaacaagtatctaaaaaaaataggtaaacaaacaacaatatatactcatgtttcgacaagtaatgtttattgtgagggcgcggggtgctaggcccccttgtcaaggcagacgggcagacgggtggagctagaccgttgtctggtgctaattcgtcattcaggtgtcgtgcggttgttagctgccattaaacccaatttcgaccactaattaccccaaatagaaaaaataataatatcggtgaagaaaacaaaagggaaaaaaaataagaagaggcagatagtaaaaaaaaaagtggtgactgcttatagagagataatgcattatgaacaaaaacaaatatagtttgactcctttcaaaaaaaatatagtttcaccccttttttccttacataattatattattagtagaaatatgtgatgtgttcatatgcatattgccaacagaaaatgaaatatacatacctaatgtgggttgtgttgctaggctataagatgacaccaacaagtattctgaaaaaataaggacaacaaacaacattgtatactcatttttggataagtatgttcattgtgagtgcaggggagtgggggaggggggcataggcccccttggcaaagcagacgggtggagctacaccattgtctggtcgtagatataccacgaagagagggtgtggtggtgttctagtggaatactaatccgtcattcaggtgccgtgtgttgttagctgccaattaaaccccaatcactaattacccctccaatcctcaacataaggataaatatataaatgtgtactttgagaattatagtcctcaacataagtaaatatagatatgcatatatataacactactagtcctcaacatgaggtgacattgatatatatgtagactctagtcctttgcacgagaaatcggggatgcaaaaagccgcagcatgcctagcgcctttacggcactaagagcgctaacaaataatgcctagcgccttttcagcactaagagcgctaacaaatattgatagcaccaccatgtcaattacgtaccatttgcatccagccatgctaacacagagatggtgttctccagcaaatacgtgctactcatgccctacgtgcaacacatgagcacatacattaaaacaaatagcaattaacgaaattaaggagtcatttgaggaaaaaaatgagttaaaatgagagagaagcacttatcaattgaaatgcatattatagatgagaatataaagtgaaacaaatttatttgagttgtgatcataccatgttcaccatgaccatcgcagtgagcaatgcagtcgatatgggtcccacctcatacaagatcggatctgctgcttggaggagcaactctaacacacctcagattatctcaaaccacatgggcacaaacatcaaaccacgtcagatatggtcgtctagtgcccataaacaccactacaatggtgaggatcatcgagctgatcctcgctgcatgaacggcaattttttgatccatagttccttgttaattgcttgttgtcaatagtaaaaataattttggagcctaacattgaaaaaaaaggaaaacaaatagagaaaaaactgatactagtgaagaaaacaaaagagaaaaaataaagaagaggcagatatcaataaagaagagggttaattgaatccatgccattataaatttgctagttttgaaaaataccattactatttgcataattggaaccatgccactggaaaacattcaaaatcagatctatgccactttgtatgtttgaaacccattttgaatcgttttctatctaccgtattttcatatagaccaaaatacccctgcctcttacaactgaacagcaacacgatacttgctcttgtcaactctgcaatttgatgcctcggatacaatcaaaattttatatctaatatctaaaatcgctgctgctaaattgctgtcgtcggccactccaataaatggttaaatcaggtgtacaaaattacagaggaaaaaaaaggaaaagaagaaaagagggcggtggaggagtcgccgtggaggggtcactgtccacgatgacagctcgagccggccagctgcagcccatccgctacatcgtcgtcagcaccagcaggagcaggagcagcatggaggtcgccactggatctgctctcaccacacgcgagctcgccgccgccgcagggctgcacgtcgcttccaccagacacggccagccgatctcgtgcaatgccgcagacggcagaaccccggccggcagctaccgccctccgccctttctacgccgtcatcgtcatcaccgcagctcgctcaactgccatcgccattgctgctgggcacttgcatcgggcaggatgaggaatcgatttggggctagggctgttggatttgggggtattttggtccatataaaaatacagtagacaaaaaacgattcataccgggtatcaagtgtatagcatgtcatggatacaatttttgttgtgttggaatggcatggttccaattatacaaatagtaatggtatttttcaaaactagcaaatttataatggcatggatccaattaacccagaagaaaaagaaaaaaagatagtgactcattgtagagagagaatgtattatgtataaaaataaatatagtttgacctttttttgtttttccataacacaattatatgatcagtagaaatatgtgatgtgttcatatgcatattgccaacaaaaaattgaagcaaactgacctagggagggatcgatcgtccaacgacacgtggccagaccggtcgatgaaacattaatcactaactttgttaaatgttttagcttacttatgaaaatgattaaaaaagatgcaaaattaaaaagtattgattgcaataccaagcactacaaaaaaagttcgtctatcgactaaatacataaaaaatagtacatttcacaaaactatagattttttttcacaatttatcacaaaactacaaatttaagagcatgtctcacaaaactatagatttattgtatccgtttatcacaaaattacaggtactttgtacaatctatcacaaaactacagatttaagaacttgtttcacaaaactatagatttagtgtattcgtttatcacaaaactacacatttagcgtcgtcatttatcacaaaactacagatttagtgtatccattagcacaaaactacaggttttaacaatgctaaaacttgtagttttgtgataatgaagtcactaaacatgtagttttgtgatatattgtgcaaagtacatgtagttttgtgataaaagaagacactgaatcagtagttttgtgaaacaaattcttaaatatgtagttttgtgatagattgtgtaaagtatacgtagttttatgaaatttaatcgaaaaaattataaaaataaaatttaaaatgtgcaaaatgttcaaatttgagttgaaacattgtttttcataagttaaaacatgaaatttgaatggttgatactaggggtggacaggaagctcgtagctcgttagctcgctcggcttgtgacaagctcggctcggctcggctcgtttgattttcctaacgagccgagctggcattttagctcgttagaggtaacgagccagctcgagctggctcctgagccgctcgcgagccttaacgagccaaggcacatgagctgtgggcatttggaattggattttggcagagattggaggcccaacagcccaact

SEQ ID NO: 16030 - DNA, 10788 bp, Oryza sativa
aaaaaaaccaggggcaccctttctcttttcagatttactaaagattactctgttttacaggtcattcaacctcacagcctactcaccatcttcccatattcttcctccctgaaataactaaccaacaaaccaaagctcactgattccaatcctcacaatgcttctatccaatctacctagtccttacctgaactatctcatccccaatagccatatacttatcccagataacaacatttgctgaacaaaagctgaataaaattgttacatactatgtctgctgctccacatcacaacctactttccatctttctcatttctctcttacccttaaactaaaggagcatccagtgctgaaaatacctaattcattccttcacctttctgaacaatgatataataagatcagacggttgatgctgcaggcaccataatctgcttacgtgcagcagcgcgtgcaaaactagttcagccatcacattctcaaggctcttgagggaagcatggccccttaaactacctaagccagctctagatcctgcgtgtgtacatacatgtgcaagatccactggaactgcatttagtctgtatacttaaacaatgatcaaaacaatctaaacctagaaaccaaaaaccttgtaacaattcaccacacatgacacaaccagaaaaaaattattgccaattcataatcacattatttatgccaatttagcttgtctacccatacgaaggttctgtcccagactaactctgcaaaccaaatatctgaatcatccaccgtaaactgaacacacatacaatactcagaactcaacatattatgtcgcaaaagttaattcgtgcaacacatcaacgatgccatgattaaatctacatttgccccaccactgacgcgactaaatctgcattcaccccgggaaaaaaaacagttaaccctaaacaatattctacaaccgaatcggaagtttcggaaccttaccgaggattggaggaggcgagcgatccgcttgcagttgcatcactttcgtctcacccctcggcgcactaccaaatgaggtaccacctgcgggcaccgctgctcctccaaccgtcgccccttgaagccgccgcatgtacatccgcccgcattgcaaagcgcgattagggcatcgcctcaaggatccacaagggcgattcgccgcaagctagcgatggaaatcggatgcacctacctagcaaacgcccgcggatgatgaggacgctccgctccgctccgccgtccatcgcctcctctctccctctctccgcgattcgatctcaccggcgccgtagcgcgcggggcggtggagagcgtgggatttctccgcgggtaatcccattggataaacatggcgcgtttgggtggttcggtcgccgcaccacgcaacgcgacgcagtgcgcgtgagcgtgcctaaccgtgtgcgactcggctcgacaaaaaaccaaaccaaaccgatcagatcgcattagaaaatctctccaccgcttgcaattgcaagctagctgcagtggtttagggccaaacatgctgcaagtgtgagtcgttgaccaaagaggacatcacattcggagtcagagatgggagaccgccagtgcaatgctagtcataaccacgatatcaaatgccaaggagttaaagaaatgatagtttgtgaacttgtgagttgtgatggaccgggacgatgagcatgggtgagctaggcattgtctctgcgcaagcactggtgtactgccgctgccagggtagatccaccgtccattgcagtggtccattgcctcaccctcacgccgacacttgtttcacagcgcgcaagtaattaacttgatccattcgagagagatgaggagagaaaacgaacaaggtttggttgatctggcactggggcaccgccaatccgatgttcgttccaccgactgtactacagtactagtatccggcagtctggctacgcggtatactactatacgtgtcattgtctactcaaccaagaaaaattcgctgacgatcgagaattgtgtcagtaacgccgccaagcagaagaacacccaaaatccatctatccaccaccactgggactggattcatcatcatcaattggaagaaatctcaaccaccgttgggccccagacgcacagacacacacaaacacatccgatcccgcggcggcagcagcaagcgcaattcccatcaaccgcaagtgcgtgccggccgaagatttggcgcacgcacactcaaaccccccactccactgcccccaaaacccaacccccaaccagccagaattaccacacacacgcaccgcacccgaaatcccaagaaacgcgcgtataaatcccaccggcttgaggagtcgactcgccgatccatccacccgcgcttcgtccattccatctttctctctctctcgcggaggtcggaggagccatggaggtgttctactacctcgtgttcgggggcctcgccgccgtggtggccgggctggagctcggcaagagcgccaaggaccgggtcaccacctcccaggccttcaactccttcaagaacaactacgtcctcgtctactccctcatgatgtgtatgtcattcttcgattcttggcgcattttcgtcctcccggatctgggattcatggctttcatcaatcttgtgcagccggggactggctgcaagggccgtacgtgtactacctctacagccagtacggcttcgacaagggcgacatcggccgcctcttcatcgccggcttcggatcctccatgctcttcggcaccatcgtcggatcactcgccgacaagcagtacgtttcttcttcatcgatttcctctccgattgtcacagattgtgccccgcgctgagactgacagaaaaatctgtgtgtttcagggggaggaagagggcgtgcatcacctactgcatcagctacatcctcagctgcatcaccaagcactcccccgagtacaagatcctcatgatcggccgcgtgctcggaggaatcgccacctcgctgctcttctcggcgttcgagtcatggctcgtcgcggagcacaacaaggtactggacgctcacacatttcaagattctaccttcaaaacattttgacggatttttagtacaatatgaattaaattttacttgctaaaagttatattattggattgatatttcaatttactttcatagggttataattttattactataaaccttataatatatgagaaattataagataaatattagttttgacgatcgtgtcaagtttgatcgtgtcttatattatgggataaagggagtaattagtattactgtaattatacgcagggccagatctgcttgtcagtgtcccccctcacactgatgctttgcagctgtgtctggtctgactttaactttaatccaaagtttcctctttttttttagttgtctatctagaagggcatgttctagtggtataaagaatacatatttggaatgttttaaccttaagtaactaaaattattcctatctttgttgtgaataaactattagagcgtcatttggattcattcacataatcacatccttgtcatccaagcgagctaggagcataggagtacttttattttgggatgtttgactacttactcaattaggcacataaaaaaaggattttcagtttgagattaggactacacagtaaaaggtcattttgtcaggatctgaaaagagaagactgaaatctagtactccttccgtcccattttgcaattatcggtttctatttcaatgtttatctgtccgtcttatttaaaaatttatgaaaaaaataaaaaaataagtcacgcataaagtactacatattttatcattcaataacaacaaaaaaaatattaatcataagaaaattttaaataagacgaatggtcaaacgttggacacagaaatatataactgcacttaggatgggacggaggcagtatggagtatagctagtagttctagtatagttgcaagctcatagccaccattttttgttttctttctggtcattgtgtcggtggatcagaataagatggttgcatcgtcacaaggataggcatttaacaagcatggcccatttaataaagctggagtatttaggatagcctcacactcactacaaattgtccttttattcggccatgtgccgtctcctatatggatattaatctcggacatattcaataattcattcaattatcaataagaatccaaggatccaggtacagtatctgttgcctgtgaggctgtgagtctgtgacacactactatgcagtgttcttcccgtgacaaaactgtcgttttgattaactaactaataaatggtccttgtcgtttgcaaacttctccaatgtattacagtcaatttcttatctgcgttatcaatttttcactgtaaagtttaaccttggcatttcctttcacagagaggttttgattcacaatggctgtcgatcacattctccaaggctatatttcttggcaatggcctggtcgcaattgtatccgggctatttgcaaacctgcttgccgacaacttgggctttggtcccgtggcaccatttgatgctgctgcatgcttcctggcaataggcatggctatcataatgtcttcatggagtgaaaactatggagacccatctgaaagcaaggatttgatgtcccagttcaaggttgcagccaaagcaattgcttcaggtatgcttaactcatcttattgattgacagataaacagatatgtatcaaagttgacaatcggcattctgacatcatccttgaaatctttagatgaaaaaattgcattactgggagccatacagtcattgtttgagggctcaatgtatactttcgtcttcctctggactccggcgttgagcccaaatgaagaagatattcctcatggcttcatatttgccacattcatgctgtcatcaatgttgggtagctcaattgctgcacgcttgttagcccgaaagctgaaggtcgaaggttatatgcagatcgtgtttacaatatcagccttcacccttttccttcctgttgtcaccaacgtaagaacactgcttatactgcctgtcaatttttctcttataattcagagcctaacatccgtttgctaaatgttgaacagattctagtgccaacttcttcagtgaaaggaggtagcatctcatttggaggcactctgcagctgcttggtttctgtacctttgaggcatgcgttggcatattctggccatcaatcatgaagatgagatctcaatatattcctgaggaggcaagaagcacaatcatgaatttcttccgcataccactgaacttgtttgtttgtgtggtgctttacaatgtaagtgaaagtgttcttactgaatctcatgattctaatctgttgatttccttcaaaaataacatttttttctgtgaattttgcaggtgaatgcattccctatcactgtcatgtttggcatgtgttctatcttcctcttcatggcggcaatcctgcagagacggctaatggttgtttctgacctacacaaatcatcgacaagtatgcatctttcttcattactccacatataaaaactaaaatcgctttgccaatcaatttctttgattcctaactgttggggttaacattttctgcagaagcacaagagatggttgatgaagatgagccactgaatccttaaggattgataggatcatacaaacagatcgaatataagcatgtggcatactgcaattcatttctaccgagctgctgaataagattggacgttgcagaaaagagcagttgtttttgtttgtaactttatttctgcaatgtcgattgaccattggctggtagttcacatctgtggagcaaatgtagtaggcacgagaggcaatacatagttcagcaagcattgagctatagccgagatataggctattcatgttgtcatttgttatttgttattgttattcaccagcatgacattgtatgaaattaaatgctacggatatcctaatcgaagttatattttacacgagagaaggccttctcagatatcgtgttgtttcctcgaaattattgtcccttacagacaatctcttgcagtctcttacatagtcacatctgtgatctggcgtacaggagttttcatacttgtacgcgtccaaacagacttgatccaacatcctcgtaccgggcactcacgactcgcgagataaatttgacttgatgatcagaagggattattgttcttgccgtaacatcaccctacagtaaagctcttgaatttatcacatcttatatgcctaaatctatgctgaatatacatgctagtctgccataaggtgaaatggttcatcacactgcatctcatagggaaatgaaaggaaaaggtcttgtatgcagcaccggattattatccgagccaaaaaggttcgaagctttaagaacatacaagtgataggtgaaatagttcatcacaatgcaactcataaggaaatgaaaggaaaagatcttgtttgctgcaccggattattggacgagccaaaaaagtcgaaagctttacgaacatacaagtaaaaactaggaaggaatataaatggtgggttgcacaagtataagaggatggccacatctcagaaatgcccacaaggaaaaggttcgaagctcaacagaagaacagttgtctgcctaacccaccaaccgaattgtaacatcagaatatgataagagttaacccaccaaaacattatactgaaagaggacaaaaagaactagccaactaggccaacatacagtataaaaagagcacatacgaaggaaaacagaagctggtggtgaaatacatgattcttccataacctaaagtttggtagttatcagctttatcaatagatccgttcaagaccaagaaaattggtgacagaaaacacatcaatttacagaataagaacaaagtacagtagtaacagaacaggataagactgcaatagatagaaaacatgaacattgtaatatgctatggtctggagaatacaaactaaaaaatccattcgtaagggaaaatacggtggaagtttgaactaaaatttggaccagtaacattcagatatcactgaacaagaaataatgtgctttcaacataaaccggcagcttacaaatgccaaacatcaagactggcagtgtgttttacagatgccaaacagaaaccttacaaattcctaatgaatatcttacattgaaacatcagagcataacaatcaccacgtaacatggcaatatagcatatcagtacttgatactagtacttagtactacctccatccccaaacatgagggattttgcctatgcagttacatagacaaattctcttatatttgggaacgcaggtagtagtcggtagtgtgacttgtaccaagagtcaaatgccaaacatgcaaacaaaaacattgttgtatagttgcaatagagcatcaaatgatataacaatatgcaaagatcatcaatatccattatacacaataaaatgcatgtggaagtccttgagaactacgggttcagacagacataaggatatatagttatacataggaagcaacattgggtataactaaatatctttatgtccatttgaccctgcaaccggaatgcattacttggtagaatgtaaatcgcagcacataatgaggatggcatccatagatagattagaaatgtgcaaacattagcctactcttttatggcatattgtttcatcgcaagtgaaacacacaccataataatctaggaaaactacactacaatgaacattacatttcacattgtcacggactcaccatcagcataacgtaaaagtatgtattattgtgttggtaccagctaactagctactcgagaagacgttacattgcaacataggccaaaaatttagtgatctgatccgatcatatcgattacatgtaacataacgctaaaatataatgtcgagaagaaaacccttctccaataataaattaaccaggagagcaaaacgaagaaatgacattccttttggcgaccaattgattcgaccatttcttatcacagcagagagaataccgtgcggacgaatcagagggcaggcacatatctcttcgccgcctgcttgcctgccatggcggcgccggcgaggaccccaccgatggcgcccgcgacggcggcggagcgcggcccgttggcggcgcggaagagcgcgccggtgccgagccccgcggtgacgctgttgatccagtcgtcgcggtcgcggacggcgaccatgccgctctcgatcccggcgtagagcaggccgatgaccccgagcgtgttccccatgcggcggccgttgctgccgcacgagttgaggacgcggttcgcccggatcttggcggtgtccccgggctcggcgttgcgcgcggcgtcgcggaggccgacggcggcgccggcgacggcgcccgagagggtagcctatgccggtgtagtaggtgaggttctcgccccaggagcggcgctgggcgagcgactcctcctggaagaggaactccggggaggtggggaggtcgtagagctgcttgtaggggatattcaggtcctggtaggggttgtacagccgcctgccggaggcgtccgtccggtcgtcgcgggtgccggatcccgacgagaacagccgcggatcagccatggcggcggcggcggagggcggcgtggagcggaagaaaggcagagaggaagaggaggagggtttcggcacggagctgactgcgcgtattccgcgtcggcctctttattattttacacaactttctggagccccaagccacttgcgtttgcgtgtgtgtgtgatgtgatattttcgcggtcgccgaccttgcgattcatgggccgcaattttgatggcccgggagttgattaggcgacccattaacccatcgaccaaagtggtggatgatggcccatcaaccgatcggcccatcacacactttagttgtgcttcgctggaggcaaacccaacacggcggaggcgaattgggcgcccgattcttttttcaaaaaaaaaattggacgttgtttcgttaagtagatcgaaaaatttttagttaatagattaaaaatgttttaatcttttaaaaagctgaaacacaaccaaatcactttataaaacattttgctacaatatatgaagcaacggtttccaaaaaatcggacgttgtttcaccttatataaaaacaatgtttcagtaaatagcgaaagaatatttcaattcttaaaaaaagcaaaaaacggtcagatcgctagatgaaataatttggttcaatatatgcaacaaacgtttaaagtcattgcaacacttaaatcctatatacataaaaaaacaaatcatatgtccatcaagataaaattattaaatagtataaaaatctactgtaatatttgatttatatataatgaaacatcgtcagttattttttttctcacccatcatgcgcccgacgaggaggattcgcgctacacggcagaggcgacagtaacatggactgtggtgtggtacacacacggtatgtcagagcaagtggttagccaaaagcagcaaactgttttgtatacaagggcgagctgcacgagctactgtctccatgagctagcattgcttggaactcccattcccatgtctcgaccataccaccactatagctaaggccgagtttagttttaaatttttttttaaaacttctaattttttcgtcacttacacagaaacatttaactttttcattatattgttccaattttaatcaaacaagtgaactaaacataccctaactaatcatcgcaaacacagctgctatagctatagacgaatacgataatctagcgaagaaaaacaaaagctcagatctctgaatccacgtgctcccctccactgacccacgtgctgcgtctgatgagcagcaccaccagcccactcccaactggagccaaacagacacaggtaaacacaaaccctttcgatccattcccgagttactaacactaacagtatatcattagttagtggctaacgatgcaatggaccacatgcttagtgcccactaagtactaatcctgccgttttacgagcacaaaccaaacccacacacgtctttacatgatgattttaggccggggattccggccgacacatggctcgatcgatcgagccgcgacatctctctctcggtcaattccgcccgttagcctccaacgatccaaaccgcctcgtcataaataggcaaagaaacgaacaaggaggtggcagagtgtgagcactggtcgcttgcttgtgctttgctttgctaggacgagaagaaaagaaaagcggcgagagctaagcgaggaaggatgcgtggggcgtcggcattggcatctctcgtcgccgcggcggcggtggcgctgctcctcctcatcgacggctgcggcggcgccatgtacaaggttggcgacctcgacgcctggggcatcccgccgccgtccaagcccgacgtctactcgcgctgggccaaatccatccacttcgcgctcggcgactccatctgtaagcactggatcatcgcgattagaggcctcgtctttttcttatgtttgtacttatcaaccgaaatttaaatttttcaacttcagatttaaagctgattttaaaatttttttcatcgaaatttatttttcagactttgtttttagctgatataaaaattt

SEQ ID NO: 16031 - DNA, 6326 bp, Oryza sativa
  unsure (1)..(6326): unsure at all n locations
gtgagagcatcttgttgattgtggattttatcttagggagtttattattaactttggatgatcagagcttggatctccatattcttattttttatccgtttgtattggattgtacaatgaaatgatggtgatgattcttttttttttttgcatcgatcaactcagctggcatccattgcatctgcagcttctagcttgccatttacaccattgcaagatcttactgtcccacttcatctgttcatcacatcattaggcaaacagtgaagtatttaaagatggccatggaacagatctaccacatgaagtagtagtatttaacagatgcctcatcgtgtcggtgtcctggactgctagtcccagacagaagagattcgatggtccaggcattgataacgtgatcttgaacagtactcttcatattaccttggctgcctggcacaaacaggaagctgctgtccatagggttagctgtgttgccaagcaccatcgggcaaaccatgttggcttccacagaaatctgtcatgttggatggaaaaaaccgtgtcctgatgtccatcaactgtccatgcatgatcacttccatagcaatgcaggcatggctggtacgtgccggcacttcatttttaagacattcacaaattattaatcattgaagccactcaaccttagacctgcaactcgcctccatccaaaaaagagttcactcttgtacacaaatctggacaagtgaatgtacacttcgtaggacagaggtagtatcagatagtgttatgcaagaaacgaatatctggaacaattagattgttgaaataatgcacttcatatctgaataaatgaaccggacggtacaaatgtacaatgacgccaggctccagcagtatatgcaacttctgtttaccagaaggaaaagtaagaaaacatatgctccgcgagttctatacttgttcatggtgtcatagcaacgttccagttgtacacctttacatcgaaggtggcagaattctcgagtgcttgtctgagttctttggcagagttaagattctttccaagcatcaacgcaaagccgcccccaccagctccaacaagcttgtagccgcagcagtaagggtcagcaaatgcaaacaattcgtccacaagcttgttgctgcaaaaaggatctagctcctgatgcagcctccaggcctccgacattatgccaccaagctcgtctatttcaccattcatcagggcttcccttccaattttcgccaactcagcaagcctcttgatgctagatatcaacaggctatcacggcggagatatcgagtgacaactttctgcaggacccggtgggcaagccttacctgtgcagagtatacattcatttggggagaaaattatactcttttgaagcaaaatcaatgtggaaaatggatgggcgtgcacacttggaaggaatcttgtttggacgtacaaatcttagaatcatggtggaacttgaacaggctactgtttgtaaattgaaacttctagccctaatttcagtttatctactatgttatatatgcttacagcagaaaattcatacttacttgaccagtgaacacaaccaggagacgttgttgtaattcttgaatcaactgcggagatgccagcaatggaacaacatgcaaacgcaatggctgtcctggaaaactctgagtgcacttgattccaggatataggccaccaatttgatcttgccatccaccgcctgtgcccattacttgctctactaccagcacagctctagcaacagttgcatcactttcatcaccttctataagttggaatagccccttaactaccgcagctgctaatatgctagaagttcccagaccacttccacgaggaacatttgcccatgtcctaatgttcaaccctaattttgacaatctttcatggtttaggacaccagtcacaataagagcagacttgactaaacggaatgaatcattttctttgaatggtgaagtaatagaagacaggtcatcaatacaaacatttctgccagcatcatcttcaatgagaactccaaggtggtccattgttgtctctatcatagcaccaactggaaggttcccttccaaccgtattgccatattcaaaacacaacctggacgctccaaactccatggaggtgtatcactccaacccccgacaaagtcgacacggaccggtaattccacaatagccttcttaggatgcaggttaccattacttgaacacttggaatcgcttgatggctctacaaaatcatacatatgtgttaactagattgatataaacatcaatattgataatggtaaaatgaaccacatttagctcgttgcctggaagacataactgcattttgagaaaagcgacagaaaaaatagcattaagtttgttggtagtgtacagactgtacctttagatccatattttatagctgatgcagtttcacttgctatggaagcccacactttatcttcaacaatagctgcagtggaaagatctccagaagctgtaagcagatccattttgacctggtatcttctgctctgcggaagaacaccagaatactgatccccatgactgggacaaagcgaaagtaactcattacagacttctacgcatgaattttccttttgtagcatttcctcacatagttgaaacaggttgcgcccaagcaagccataggtcatgcaagctttagcaatgttggttgctagatctgcttgatgcttgcttgaattcacacagagctgatggtagtcaatcgaacgatgcagctcttctaagctgatcctccgtgattctttccacagggaagcgactttgccatccaggtcacatgtcgatcccataagccacatacctactttcagcgtttcaggtagagacatgactggaaaaagctttgcattccataagcagttgtcttcattggttgagctccacagatctgtatcctggattttaagatgttccaagacatttctccatggtttgccacagaatgtcccatctttcttcatagatacttttggattatcatgaaggccacagtaaacnnnnnnnnnnnnnnnnnnnnnnnnnaaagggacttcccagaggcaatgtcgatcaggtaatgtgaagtatgagctagtactgattatctgagacctgttcccatgtaactcatgtatattcaccccaacaacaatacattgtgagccaatcctaattctacctgaaagtgatgaatcatagaccaatgaatcctctccaactgagaccccagcagaaattttactggacaaaatgacagctgttgccgcaatatcacaagcagtagtctctggtatcgaagacatgtgccttcgccctacaagtcctgaatatgagcccgccaagtgatcaagaacttcagcggatgtgccaaaatgtaaaaatgagaaatcatctgaaaagaaaatggtcacaacttagctttgcaaaaggcataatatcacacaaaactaatcagaaatataacatgtgaactgtttgtcaaatacaggagaatttaatgcacagccataccagaaagagaatcagcataatttacttgcaactgctacataatgaattctaaagagaacatacatgaacaaaagctgaacatcctgtgctttcccaaagcagcaattagttccatgccaaatggacgggtccttaaccattcatgcctggaaggcacccatgcagcaacaagatcttcgtataagctcatctgcaatagatcgggtaatatgaacccacgaaatgaaatatattatatcaaatctacagttagataaatgataaacgtaactaatggaagcaatggagcaaaagaaaatgagtttaggacgtcactttgaatttctggtctaacaaaaaaaattccataaagatgagattaatgaggtttggaatattcagagctttatcatgacaaagaaaaaaggttaggaaaatctggtctcaatataaaataaaacataaagcagcctaacaatgccaatgcctctctttaggatggaaaagcagactactgttgcttctagcatatcaaagcaaagagcgaaacagagacagacagcatctaactttcgtaaaattcaggatgatagaatattgtattgtacagctagaagagcatccagcactgcaagaattatagcaaatttatttataactcccaaactgaagtaatgagtgattatgtcttttaagggaagttgctcattagtagaccgatatctccaactactacaaatgcaacacatgcattttcagaataatcacatagccttgattcgatgaagcaagtctgcagtaaatgagagagcctgttgtgaaaaattggacagtgtgttaggaaatatttgctcacctcttttctgccagttatgagctccttgatcatgacatggctagatgaatatgcaagtctaacaagctcctgccatgctttacccctggctgatattatccctgtgtcaagcagtgctctcccgtcatctcgaatagcctggccctccacaagctcgtgcactgtaggcttctggaggagattatcaaccaaacacagggaatagttctccccatcagttccgtcctttgccgctacaactacaccatgattagcagccacatctagagttgttggcacggtgacgatgcaagcagcatcatcaggaagaactaggtttgaagcatcgaagcatgggagaacatccccggtcattatgaagatcccacctgatcatactgtaccaattaaaattgaacatattgctcaaaatcagtggctctgtctataagctacaaccttggtttttgaaagcttgccttgcgctggatgagatcgcgagaatgtggtcgaaaagcagcggaacaggtccatcaggattgtctccggccaagtaaggcagaggcaggaaggccttccccatggggttcgcccatggaaccctcttgctatcacccccagcgtgaagcagcagtacgtgtttgttcgccatgaatcgtaccaccgagctgagtgggatgtcatctgctgaagaatcacttgcttcgggcagcaattcggcgatctcttccttggaagcctgcagattcagatgatgttaaacaggggaggggatcgattctgtagtagtagtacatagggcagaagtggctggacctgggcgatgagatggcggacgagggaggcgacggcgtggagagtggcggcgccggagccgatgcgcgcggcgtcggggtcggggacggcgagggcggcggtggaggccgggaagcggccgaggcggcgggcgcgcgcaagctggcggtcgtagagcgcggcctgctcggggctggccgcggtgaggacgacggcgtcccacggcggcacccgcgacggatcccgcgccgatagccgcagccggcaccacgccttccgcagcaccgccgccgcctcgtccgccgtgtgcgccctccgccgccgccgccggtgacgctcggccggctccatcgatcgagcgacttttgctcctcgactcttatctagatcggagaatttggccgttgaaagaaagaaagaaatatctcgtctagacaccgacgcgactccactccactgatccactctactgccttgcttagccctcgacgacttggccagtcttctcttcccgctgctaccgatggcgatagcgttcttcagactcgtgcgttgcgttcagacttcagttcatgtactccctccatgtactccaatttgatctttcgtcttatttgataaattttttaaaaaaattaaaaacataagtcacgcataaagtattattcatgttttatcattttataacaataaaaatactaattacaacaaatttcaaataagacagacgactaaagttcagcgcggaaactcatgtttgcatttaaaatggaacggagagagtaactgctatgaacgactgtaatccaagtaaaatctcaagtaaaaaccacagataaatgaacaggaaacactgatggcaactcatctaaactttcaagatctgaaacgatatgatatttatgaaaactttgtatatgtaaatttatttgttttttcagttttgtgatagttgattcaatcacctgtaccctcgaataattatcacaaatccgttcatcagtcagcacaaaataatttacacccatcaaacatatatgcagcagcacgtccatagatttccggaaacaggggggcaacagacagaactaaacacaatgcatatgtattgttacaaaactctcagcattttaagtttgttcatt

SEQ ID NO: 16032 - DNA, 20889 bp, Oryza sativa
ctaacctagcagaaacagcccttagcttagaatagactttgcctgcaggagaacctaagataagactacagagtgaatcccgagcaaccttgatgttaacaaaggatccaagtatatggatcttcgtatcagcgataactatgcgagtcctcgtagaattctcgatggcatatttggtcttgcctccttttcctgacaagcggccaatagcacgtgacagatgctctcctcggagtgtcttcacgtccttgatctcaaaggaatccacatacaggtcatcgagacggagcagcgcaacagcatcggcgatgtcaaaaccaagcataaaagcatgtacgaagtctgcacacttctgaaggttgctcacgtcaggtgtgtcttgtcttgttttcagctccacccttcttgcctgagataatggaaacatattatatggtctgtttgatggtaggcagcttaagcattcaaaaatacaactgtaggattatggcattttttcacaagcactgataatacttcttgccaaatggtttaaggtcagtgagcaaacagttactactcactagacaaggacaaactaatggagtgacttacaaatgacggctgagtgtttgcagacacaaagctatgatgaatttgtgattagtagtgtctcaggtaaaagttgcaagttgtgagctttcaccacatcaaatatctatgtttttcgtactgaattgaaaaggttagacagctcaactgtcgtgctgatcatgggcaagaaattagcacagaggattttaaaaacagtgtcttcttacggtataattcaatggacattatactccatttactcatagcaccatattgaattctactcccatttggagtagaattctagcacaacgcatgtactaattatgtacagcttgcaacaatgttacaaggataacagaatcacttatcctaagggcctgtttggcacagctccagctccagctccacccctcctggagctggagctcagccaaacagtttcagctctaccaaaactggaagtggagctgggtggagctctctcacaaaatgaaagagttgtgggctgcagctccacaactccactccagactcaactcctggagttaaatttaggagttggagctgtaccaaacaggccctaagtaaaatgccaaaatatagttttgacactgcagcatcatgccgaaaagcaacacggacatgtctcaccattcaggatttgcaaccacatactactcaaaagactgagatatatccataaggcgattagctacacaaaggatttagatatatccatgaggcaatttgcgactatcaacggaatcagaagtgtacatccaggagagaaattggaggctaccttaaggttcatgcggatgtcgatcttcatgtgctcgtagacgggggtgtagatatccatccacgccttcttgagcggcgcgaagcggtgctgcggcaccggcaccttcctgaactgtggcctcccgccgctcatctcgctcggcatcagcgcctcgaaccgcggcttctccacgccgccagccgcgtccaccgccatcgcgccggaggacgaggaggattctccctgcccggcagcgctcgccggcctgccagcctccatcctgctgcccgttggctgtggcggtggcggcaatggaagccggcggcggagggtgtcggctctcgtcttctcctaggctagggtttgggaatcggggaagagaggaggctggagaaggccaacctggtttataaaccgaaactattgggccgaaaaaatgatagcatgggccgtccgaattctgtactactccgtaatgggctacttcaagtaaactccagttgtctaatgggccgccttaaacatggagatttttttagaactgggagatttttctgttgcatatatctccctgatcaagattaacaagtttatttatgagtgccatatagagctaaaaagattaataagctataagtaatacagttctgaaagcacgaaatactgcatagtatagagttgtagttcagtcatcaaggtttaagatcgaatcattttcttactgttggtgctttaatgcaaagacaatgaattcatggaattttcacacccacaacaattgttcagtgacaaatccgagtcaagatcctcgatgtctgtgttgacgtttactccgtccgtcttaaaataaaccaacctaagataagttgagatattacttagtacaataaatctgaacaaaacggagagagtaggttccagtcaggtgaaacaaatcttgccagctgctgccccatgctttactcatggacttgagtgcggcgtccatgctgccttcctgtctcgttgtcccctatccgattatctccaactcaaagctgttacaagtaagaatacagaacatgtgtatagcagtagcaagcagggtgtcatgtccgatcatctgtgtcactgtgtgagcaggcgttgctgaatattgtgaaacagtttttatcatcaggcataaattttgattgctggtaaggactatgtgttttgtttctaaatgataaggaataggtgccacgccttggtgatgaaagaatgcattcaaacatactgggatcacgcttcaacgcaccttataaacaattgcagatggatgatggatcaactgcccacaaaactagctgcgagagcagatttaagaatttatctgcataagaattgtattatgatattagatgatttgatggcactgcatagttagctgaagagtgtaagatataattcgatttgtaaactaacttattgtacaaagttgaatgattgttcatctgttccaaggaattgattattgctagaacatacaaagagctagaattgaagtgccattgtttcagttcagtttccaagccgttgacaaataccaaaataaaaattagaaaagaagtatgagctgtttacctttgccaatagcattcagctaggagtgagtactcaaagaagcactcgactaggagtatgtgattgcccttgcccggccaacctttgtgttgatggtaattcattcacactaggagtatgtgattgcccttgcccggccaacctttgtgttgatggtaattcattcactcatcatagtcaagctctgttatgtttccctggcattccccttggtccatcattattttgaaccaccccaagaaaaatggaaaaagggcattattttttatcaacctctgaaactgattcctgattcagaaacaaggtaaccagtgaataccatcaatcagcttggataattaatgcatacattggttaatatgaaatacaagcttgctgtaacagtggaagacacttaccagcagcttgccatcaaccatgcccacttccatctttaacaaattagcagcttcatccatcccatgtacattgtatgcctggatcatggtggtgtaagttactttatcgggcttacatttcttttccttcataagctgcagcatttcctccataattttgatatccccagacttggcatatgcatcgatcacacaattaaaaaatggagtatctaaaaccacatcagtattctctgtttgtcgaatgatcccaggaaccttgtcgagaaacccagctttgctgtacccattgaccagtgagcagtaagtgatggggttgggtttaacaccctgaattttcatcaatcggaaatagtactccatcttctcgatgtttcccgcccgtccaaaactttctattattatgttgaaggtaacaacagttggtgagaagaagtgtttcttcatatatttcagcaccgacatcattttgtcatgcatcttagcattaccatatgatttgatcatgatattaaatgtttgcgtatctggctcaacacccatcaactgaaactcactgtaccacctctccatttcatgtatcctgttaccatgattcccataagcccaaatgatagaattcatcgtgtatatgtccggcacactgtccccatcttcaagcatactagtcagtgcattctccatctcctccaacatgccggctttcccgtacccatcaattatcgcattatggataacagcattgcattgtagccccaagtaggacatctcatcaagaatcgcaggtatccgatcaaagcggcgcaatttgctacagcaattgatgagaacagagaatgtgtactcatctggcttgcaatccgcgacacctttcatctgttcgacggtggccaacgcctggtccagcagcccactgtagccgtacgcgccgacgagggccgtgtagacatccaccgtcggcttgagacgctccgagagcatcaccttgaagagggcagtggccgcgccgggctgctggcacttgccgagcatcatcagcaacctggcgtaggtctgcgacctcggcttgtaccattgctgcttacgcaacagctcgaagatctaaaccccaatcaagcgagcacagcacaatgagcatcagaatcaagctgattcctcaaggggattgggggttacctcgagagcgggctcccagcggcatgaggcgacggcggagtcgagggcctcgagcacggcgcggggccagaggcgggtggaatgctgccgcgacgccgccgccgccttgcgggagacgccggagacggcggcctcggtgcggaggatgcgggagagcgcctccggctgctcggcctcgggggcagacgacggcggcttgtgcctccggccgccgcgggccatcacgacgtgggtcgcacggctgctggcgcggggaggtggtgacgaggtggccggtgggcaccccgccggcgccggcgacggcgagtgcatggcgccggcagccggagtgaggccgagacggcgataaggtcccgagcgatcagatgacaagtccgagtgaggctgcacgaatcttaaccatccaacagttgggccgtcaagggagagggagctccgtgtggcccacactattgggccggaacgggaatgcgagcttcgtgcgacccattatagttgggccggaacggcccatactacagtcggcttgctgaaattgctgggtccaaattaagccactgttttgcctatttttgcaggagatatgagaagagagttgaggaagaagatgagacgagagaaagtcattgagatgttgggttccacgtgctgatgtggtggacctgtcacgttagcaaaaaaccgtttttaaaaccatagaagcagttgatttgcctcggttttcaaacatagggaagatgttaaacctggtttgtggttcaggtggttttgcggtcgaggaagatgattcaataaatggaggcaaaataaacttactctattcacaaacaaactgctccctgctaaagtacagagggagcagagcagatcaggacgagcagacatatatgtcgccttgagatcgactagctctagcatcttcttcttctcaatcttctccttatctttcggagcagcagctaagctaagctttggcagtatcgtcgttgatccacgtagctaattaccaaccgttaactgatccagacaacaaaaaggacggctgcatgcatccacgtccttggttcagtcaccagtgagatccaattataagttatcattcagagagtccagacaatcgactacctttctctgttaagcttgctgttaccaattccatgcgatgaacaatcgaaaagtacagtgtcttttttttcgcgaacgcgaaaagtacagtgtcgagtgttgcattcataaattattatactttcttcaggtacagatactaacacgtaaggccagactattcctcaccgatcgatatctcctagtcacaactcaaaaggtacaaatgtcatcatccctcgtatgtacagcacaatctaggtgttcaatctttgaaagtgagattaccaaagtgacaggagtatacattcgtattcgaaccccaaaaaatgaatgatatatagctagatcgacacttcgacagagactgtgcatccatggatggccctcactcaggccaccggcagctagctacctcgtcgatcgactacttattaagctataatttctctcagtttgagcttcacgctgctagattccaaatccaatggcatatagagaagcatctcactgcaagcatggaggcaaccactgagtagttgcagctagcagcagggaggaagaagaatatacaactagcccatgcacgttctctctcggttcatcgatcgctagcaactctctctgattgatttgctggatatatatgttactagtatcctgtggacagtatcagcatgtacatgtgcaagaactttggccacacatagtctgattaaaagaatccatgagcactgcagcttgcattgacacctgaaaaaggttagagctgattgataagcatgcacacatagttccttagctactgtttagcagcttggctgggctggctcattctcctgatgaatgatgatggtgtttttttttcctctctttagaaagatgcatggctagttgggactaaagagttgtgtgctaacacctgtcctacaacaaagatccatcgtacgtgtgatatatctaactaaaagtagccctgctttcgtttgatcgaaattaatcatgcatccaacttgctctataattcagtacaactagctggtagaaagtccctgaactgaacaccatcagtgcaattgcacacaaggacatctctacgcctagggtagctagctgctaattaacttaatttgacagcactcgagtgataacaaccattaatgccagcttgaagacagtgtaacacatgaacccttttttgcgtggttggtttggttggcgcaagtggagatcgtactgaagatcatgcataatctctccacaggtcaatgctgctgcagcatgcatgaactgatgaagaaacatgtccctgattaatccctgcgacttgagctgaaaacccggggcaaattgcagctgatgctctgacagagttggtacagtgaaccgtgtagcgacctaaacagttggggagtacagtgaacttagtgaactgaagctgcttgattggtcaccacaagctttgcatgacacacaagtaaaaaaaagtaattaaattaaacaagtggtagaattttgttaagctgcagggccagcaacacgacgacacgtcgatcaccggattaaccctcgaccttgcaacacctcacatgcatgcacgcgaggtccgtactaggcgctacggcgatttaaagaaagaaattgacgcgcaatacaagttaattaattaaatacaggtcatttagcctcttaattatccacgtcgatcgatccatcacgcagaaatatcaagcaagcaagcaaatgagataaatgattccatcttaaattaactacagctagagctaagctagctcctaattttgtttgttgagctcatgtgatcagcctccctgctcacatgtgcgcatgatcacgtcctagcttagcattggcattagctactaattaaacagcatctgtttttctttaggaggaaccgaaaggtacacttgttgagcaggaaccagagcaaatgacaatggtgtacttgtgttcccaccaagcacggctttgtttttttttaactttgattaaaaatccctttgcttagttttatttccaccgaggaaggtgccatgttccatcacattaggcttttgtttaacaagtccttgtaccttgattagagcgcaaagacactagtactagtgactaattaagaattagtttttcccctagccttgtatgattgccagctgatccttcttggggaattttgtagacaaagtaccataaaaccgcctcattagaaacgtgcctgtcggtgttaatcaggaccgcttgtttttacctcatcagcttagctatctggatataaaagtcatcacagtaaataattaattgtttgtttgctgttgtaacgaagtggacggcaataaaacgccataataaagaatacgttcatcgattactactgcattaatttaatcattaaaacatgatggcacatggaagtatatgtggagttgtagcatgcaatgtagcagtagtacggattaattggatggttggtggtagtgctaactgctaagctactgatgatgatcgctcagtgcattcctgcaactgcttgacaattattttttagggggttaattagttgcagctagaattaaacaagtgttttattaccgttaactgttgaacagtattcagtagaaaaatcaactgaggaatgctctataaacaatttgcaaatcgcataacaatccaaagacggaaatgcttccgcaggattcaagaagtgatcaaaccaggaagtttcggaaaaccaaagtcttggttagttaattagtttcattgattatgatctagagagaggacttctgaataagggcatatacaatggtatttattagcggtctctttttatcgtcatgcaagtatatttggtgatgtggaagagagaggaagaagaaaagaaaaagatggttactacacatgacaacggcatagaatcgactattagcatttattagaaaaatttttgttgcattgagtctaacaaaggaaaaatgactagtaagaaagtattttggtacactaatgattagagactgtattatcttaactattgtaacgtgataatctctaattaacgtagagaccataccagtctctacctttgtaattgccttaaaaaggttgtcggaaactgaaattaacaatagtactaacctgcagcaagatggttttagacttttagttgctggatagattaaaacaacaaccaacggacggtcaacgaacagaatagccacaacgtcaaatcgagtccggaattctagagatctctaattgacgatatggccatctcgtcgctggtagctgctactagtacagtaatatgttccaagtgcgtcacgaaagtgattgcaatttctgtccggttacgaacgagtcgggcgcgcggtttcacacccccaacaactcgtggatcttttttggagctcaatcgcgtgtgctgcggctttaatttgactggcttttgatcgatctatcgcgtcgttcgtcttggcgtgtatacaacaaattcatgcaagaacagaaaattcactgtgttggtggtgttgttggagttgcatgccaacgtgaacagcagatgaaaacaatgtataaagaggtgatcaagatgctaaagcgaaagatgtcacgtacgctagctttgctagctaggcgaatctgtagatcctatatctctaaatgtaggatcaacagtgatggtatatttgacccttaactcgtctgcttgttccagctagctagctactccagtttaaatttaaatttatccagcatgttcgtccgaaaaggaaattaaatgagaaagatattgagaaggagaagagctagacgacgacgaaggatcataccagatctgtgtgtatgtgggtaaggtaggtgcaaagtgccactctctcaaagtgcgtagctagcgatttttttttttttttgaacaatagctagcgattattagtgtacgtgtgcgcatgcatcacgcgcaattggcactagaacgtagaagcacttcgctcgatgtacgtacgcacgtacatatatacgtgtatatatatttgctacgacttgactgatcagctggatgcaactttgtgaacagatatactccaacggctcagatcgtacgtataactggcttaattattagtcgtcggtcgtccaagcaaagtcttgttgtcaacgaaaacgaaagaatttgaccaggagatcgatcggtcgaagaagaacaaaatcaaagagacaaacgttgtcacgtaacggagatgtgacaaccgaagcttgtgctgcacggtgaggcagggtgcagtcactgcagtggatcaccttgttgggtcttgggaggatttggcctcggattgaatcgagtacacgtagcccccgcgcgcgactggatcatcgtcatctgggtggattggatacgggataaacccaaccaacaaacgaccgatcggtggctggcctaacgcagctgcccacctcgccttcgccccgcgcggacgcagcagccgccacggtggctccacgtacgcgtccatcttcacgcgcgaccgagtgcgagtgcgagcgagcgagcgagcggctgaccaaaccacccgcgcgcgctgactccaccacgagctaagctgagtccgcgccgaccaaacgcgtcgtcgcttgctgcctctcgtttccgagcacggatagctcgctgtatgtgcgtgttggaacgggaattccgacgtgttactattgtggcgactacttctccttaatttttcgccatacgtccgtatctaatcgattattattagtcctaagttgataggatacgtacgtgcccaattaaggccgggtacgtacgtttcaggcttaactcacgattaacgtacgtgcagttaaattagttcgatggatcaagctcaactgcgactttgcttctgtggtacaaaatacagtaccgcagggcaagaaaggcacctaaactaacctttcgtgatataaacttttggttttactctactgcttttggccttttgttttcattagcgacagtatataatttttttttcacaggtcgaccaacggaaaggagctaattgcagccatgagcaaagcaacaataacaggtaaggaaaaaaaaagtactgccactctgccccatctcaatctcacctgttaccgcttgaggaacaaggtagctgaggtcaggacgcctacgtgtatatattttttttaacaatctgtttacttgtttgattactgctctacttaaaccatgttaattaattatcaagaggatcctcaaacagtcatgcctactttgctcatttaccatctactggtcagaaattcagtactgccaaccagtgctaattaataattggtggtgacatactaaacccttaatgattaaacaaaagcaactgattagtactccttaccaactgacatgagtaagagcaggcccgttgatcaggaaggaaatgtagagaacagcaccgagagatgcgctcgtgtctaccaaagattccggagcagcgtagcaaacaatttataactaggtagtgacagcaaaacatctccaagtaatcagcaagtttattttgcttcttgaacctgcaacgaccatttaatatcattacagtggcatgaagattaattaggaggatgttgtatatatgtagtatatgtttcaatgttttgtataatcacggtatcttgctagcaactcagcatggatttctgcttgcttggcactttagataaaatcgacttataaaatgagtaaaataattaatctaataaatatgcggcacactctttattgctgggcaatgtgtgggagtgtactgtgcagcatcaggtatcgcaccacagagcatccaaatgatatggcttgttgcaatggaggttaggcatgtgcaacctatatttgaaaaatggagatatgccacactgctttgctattgctaatgccaccttccattgacttggaccggttgcgacctggccggaacgagtgagagctgaggtagacatctccaatcaaatactaacatttttctcccttgagaatccaagggatccttgtgtttacataggtataaaaaaatactaaatcatcctaaaaaaaagctgtaggtcaaacttaaccgtacaatttcatcttctacattttcttttcacaatgtcgagcgctctgcggcgttcgcgaaaaaaaggctgtcctactcatttttatgttaaagttgtgcaatatccatactcacatgtcaatatgagtaaataattgcaattttatgtagacttaaattttaaatacgtagtcttagtaagcatacaaataaattcacgacaagcacaagccaacagtaaaaagataaaaataaaatccaaaagtaacatattatatcgaggaactagacaaacatgaccctgagcaacctataatacaaaatcatcaattttcaggaagacagacagaggcaaacaaacgtgtggaaaaacataatcccggtctacatggaagattaacaaaatcctcaatcttttggaagaaaaaacgggggacttccgagaagaaaagaactctagcatctccgtggagaaataaaattgataatgacgatctaaaaagaaaaacacatgatgataggcagcagagaagcagaagccgtcatgccttacggtttttctttttttttttcccggaattgctctaaaacttctgtaagttcttttctcaaaacttttagatttgtaattgtcgaatcgtctctagatttatatatataaagaaaaaaattgctagaagaaattatcacatatatcacatgtaaaatctcggtgctaaccaaccaaaccataatcaaaatataagttttatataagttgttacatattgataatggcaattaaaaaaacacttatgatgataggcagcagagaagcagaagccgtcatgcctcacagtttttcttctctttttccttcttctcccatcgtttttttttttggttttacgtcgtccgatccgtccattgctccattgctgacgacgagcgaacctccatccaaacgctgttcgcaaccgatcccagagatcaaggtccccatacatccaccaccaccaccaccaccatcctcttcctcttccctctcttgcctcctccttttattactctactcatttagcttttggttggttggttcccttcttgagaccccaaaacccaactaggaaggacaaggacacatccctctccctcttccaccaagagagatagagccaagaaccggacgaggtagaagagattgagccgccacggcagtgggagcgcgcgcgcgagttccccgagatccgcgagatctccgtcgccggctcatgccactggtcggttcttggggcggcggcggcggcggcggggggtggtgagtctgtggccgtttcttgcggcgtggtgaggtgaggggagggagaaagagaggctgcacatgtccgtcatggcgcggccccgcttcgaggaggatgacgaggatgagttctttgactcgagggaggtcatgtcgccggcgtccgtctcttctccggcgagctccgggcgctacgacgggcccatgctcgaggtgtgggccaccgacccgtgcagcgtccatgagcgccgtcagaggttcatcaagtccttgggcctctcggattcgagcccctccgccggcggcggcggcgaccggcccgacgaggagccgtgctcgaggtccagtgccgcagaagagatcctcccgtgcagccccaccgtcgagctggtctcagccgtccccagttttgcgtgcagaggcgaggagccgggagcgtcaggcggcggcggcggcgcggaggtgttggattgtgtattcaagaacttggacgatggtacagtgtttgtcgtcgacgagatgggaaaagatgggagtttcaggagcctcagggacaggcgatccaaccggacagttactgcagcggaattcgaacggacctacggctcgtccccattcatctgtgagctgatgcggcgggtggatgattcggatgagtcctctgctgtggagaaggctctggtcaggggaaggagaaggaggaggagatttggatggctgcgcaggctcggcatccgtggctgcgtcgtcgatgtggaggaggacgatgagacgaattcaacatcctcgagttcttgtcggagttgctctgggaaggttgatagggtcaaggtgaggcattacaagaagaggtcaaaggaattgtccgcggtgtacaggggccaagacatcaaggcgcacgaaggcgcaattgtgaccatgaagtttagctctgatggacagtatctggccactggaggtgaggatggggttgtgcgtgtgtggcgggtggtggagggggagaggcccaatgaacttgactttgccgaagatgatccttcatgcgtgttcttcacagtcaatgaaaactccgaattggcccctgtcaactccagtgaagggagtaagagcaagcactacaagaactcaaaggtgtcgacagatccagcctgtgttgtgatccctcataggacctttgcattatcccaggagcctgtgcatgaattctatggacatgatgatgcgatcttggatctttcatggtcaaaaaatagggttagttgtcattgaacaaggtttttccatgtatctgcagtatcttttaattgtcacatggtcatctaacttcactcgccttctttttgcaggacttactttcttcatccatggataaaactgtacgattgtggcaggttgggtgcaatagttgcctgaaggttttctcccatactaactacggtaaaccctttcccccgctaagtacaagatttagcacatacctcttcccagcgtctgatgccgacattctgatttttgtctattatgcagtaacatgtgtgcagtttcatcctaccagtgacaattattttatcagtggttgtatcgacggattggttcgcatttgggatgttcgtagatgccaagtcgtggactgggctgataccaaagagataatcactgcagtttgttaccgccctgatggaaaggtttgttcaactgttctttaagtgtttttacccaagcggccattttctgattttacttaaatagttaaacatgtttattctgctggctttattcaggccgcagtggttgggaccataacagggaattgtcgccactacgatgcatcaggtaatcatgcaatcatgagcacactctatgtatggcgcttgttattggcaggctaatgattttggaaatagtagcttcaatgaatcaacatccttgtttgttaataggtcaatatcgtttgctttcatgacgacatcctagatgtatatgcaaattgctaatgatagaaatgtcttgttttgtccctggtatgagaatagagacagcagaattgttgttatcctctaattgcttcttttgatcctgtctaaactgtatgtgtgtatagattgcagtttactacatgatggaaagataggtcattttatgagatgctagtgttgcatttatttccaccaagtagtactgtccacgagacttttctccagctggtttttatgctacgattttcttaaaaaaaattgatctctgccaaactatctttttgaccaatcactggttggactcattttgtcctgatgaatcaacaaaactatgtcatcaatggagatgatataggaacctttttttttttttgcggggagatgatataggaacttaggaaacggtactattgcattttggtgatgaacaggcaacatgtgctaatatgctattttcatagcaaggtcatgcatgttgatggtagacaacaattctatttttcattggataagaacagataagattgaaatagaaaaacatatattttcttggtttatgttttgaagctaaggtgcatattcctgtattggctgcagaagtcaagtgtactacccttgtttgggtatgatgaaagtattgttggggaaatttaggtctatgattcatgaggtccttaatggttataaccatttcctgcttatagatcttgcaaaacacatagcactggaaacttgttgcctcatgcttcagtcaagattcaaattaatgttccatacatcgggaaacagcaagccagtaaatacgatattcaaaagtctgttgtaatagtagttgatttgtaacagtagcttaaatccgctttgtttaattcagaccaggaactttaacttctttgacttgtgttcttttaaaacattttcaagtatgctcaacgaaaatatgctactagtatgtttctgattcatttgtttttttctaactttaatactttttgcagaaaatcacctggagctggaatctcaagtcgctctcaatggaagaaagaaatctccacttaaaagaataatcggtttccaggtaccttttcttatattgcatgttctaatctatttttttgtcacatttaattcttacaaaagcaatttttcctacatgcattaccagtactgcccatctgatccaaagaaattgatggtaacatctggcgactcgcaagtccgtattcttgatgggcttcacgtaatttccaactacaaaggtactgacaccctcttctaagatcactttcaaaagtatttgtgacccttagtttacatgtctattttccattctcaggactgcgaagttcaagtcaagttgctgcatcattcacaccagatggagatcacattatatctgctagtgatgattccagtatctacatgtggaactatgcaaaccaaatagctcccgtcacaaaccatgtgaagactgtatggtcaaatgagcacttttcctgccatgatgtggccattgcgataccatggaatgcctctcagacaaggaattctatttcactggcttgcagtatcacttcttcacagcaagaagtcttggatgagttccacaatgaacatgatagctcatcatgttctcatactgaggattcccctgatggtgatagtctgtaccaattaccatctggaaatttcactcttagcagtgccttctttgcggaatctgctccaaggggatcagcgacatggccagaggagcagttgccatcaaattcgacaacacagtctaccttgaggaaatctcagtacaagttcctgaaggcttcttgccagaatgctgctacgcacgcctggggccaggtaatagtggctgcaggctgggatggctacatcagatccttccagaactatggcttacctgtgcaagtgtgacatggtactagacatgcatcatttaccattgatagtccaaggcaaaagcttgggtatgccttgagaagtctggctggccctgacgcccgtcctgattcattatttcagcacaaagcgtcacatggctggtgcgtgagctgaattgcttgtggaccagaagttgtatgtagtctgagtggtccttcaagatcttgacagcgtcaacacatcgtagcaggcccgcggaagatgaatcgcctcgcagaattatgcaaaggcatgtggggatttaggcagcaacacgttggtgttctttctttctttctcttctttgttttggctcctgttagggccatccgtaaatatatataggagacatacatatttttgccgagttgaaacttccctcgcccgaaccggatagtcgatggacaatgggcaagtggagagctagaaatcactgttggataggggggaaaaattcagagtggtgggggtgcacatactactggattcgtttcatttgttcacatttcatgattcatagcctggctgagtctatgatggacattgatactggagttgtatgtgttgggatggatcatggatggaaccctgtggttgtggttggacatggtcaggtgggtgtggcctgtgggggacctttgtgcaggcagagggcaggcctttctggatagggatggtgcagttggttctgatgggtttcctaactccaggggccaggcctttgggtatgggactatactatcactcattgctgctgttaatgcctttgtttaaaagctgggtccatgtccatgctcagatcttggccttttatctcctgcttgcactgtcacgtcccttttcttccagatccctccccaagtccttcctattgaggtgatattcccaggaaggtgaaattgccattacaggtttacacttattctttgcagtttactggtcttgtttgtttcaagaaccattgcccagcagtcacagaaataatcttagtactaccgtccatacgaatcttttcaaggttttttttagtactcttatctcttttcatcaaagatctctgcagtaaaacgatggcatcaaaagtacagccatggatgggacaagctcagcgatggctggttctgccgttacaagtactctccccccgttcctgtctggccatcttgtactagtagcaatgggcatagcagcggagtacaactacactcctccagtatcgttgttcaaaaaatgcaggtgccaggacgactgagatcctgacagggctgcccagtggatgatggtgcccatgccatgccatgctctgcagcagcaaggtgatgaaatggaatcatcagcctggatgctgccttgcctcattttatgcaacagtggatgttattttttcggtgccagtccagtctggtcaaggagtaaagatcatcaagccaagcccccctgaggacaatggctctctggtccatcacctcacctgctgtaatttcagaaatgcactgctcattccgtccaaaaaaacaacttagaagtggatatgacatcttccttttatttagatttattgcactacaatggatatgtcgacttttttttagggacagagagagtacacgctcacccgtagcacagttacacccctcctccctacagatggccgaggagtagtagggaggaggcagtgttttaggcaggctagcagtcaccgcagaatgcgacgccggtgctctcatctcatctctccctctgcactgcagagagtacctgtctctcttaggttgacttttttttaaggaacagagggagtacacactcactcgtagcacggtcatacccctcctccctacagatggccaaggagtagtagggaggacagggttcgacttaccgccggtaaccgcgcggttaccgtgggggtacggtaatataaatactacggtaacctccttaaattcaaataaatttaaaaaataatttgaatttttgataaattttgcacggttttatacggtttttcacggttaccgcggtaaccgtgtggtaaccgtgcttgccgaccgggcgcggtaaccccggacccagcggtttggaaaaccttgggagaaggcagcgtttcaggcagtccagcggtcaccgcagaatacgacgccggtgctctcatctcatgtctccctctgcatatggttgcatatgccaagatggacacttgttgctctccaggcctggccaccgctgccttcaggctgcagccgtggtgtatgtcattcgtccgatgggccgccgcgcgattgacatgcaaactgcgagtcttttggcctcgtgaacttgtcattttgatcacccgtactcgtatcatcatatactgtgctggtactacattgttgctactgctggctgctgcgagttgcatttcgctagtgctagctgctgtacaaattgtggcggcaacaaaccgcgcagcctgtacggcaacaggcggtcgtgctcgtgcatgcatcgccttcctctctggtctcatctgctcaacgctgaagcttgatctactgttctattacatttgcagtgctgtttggctgcattcgaataggatccgattatcaaggcaagcttctttgattgtctcctctgctgcatgacaagctagtgacaaatcgtccgttatatatactcccctccatttcaaaatgtttgacaccgttgatttttttaagtatgtatttgaccattcgttttattcaaaaaatttaagtaattatttattcttttcatatcatttgattctttgttaaatatacttttatatacacatatagttttacatatttcacaaatttttttaaataagatgaacggtcaaacatgtgctaaaaattcaacggtgtcaaacattttgaaacggaggcagtatattcagtcagtggtttcatgagtgcgctaaatagggctcggttactatcgtgcgtcgtcttcttgcaaacaatttacagcaatagatatctgtatcagggtaacaaggggacattgtgaatcaatattatcaccattcccctttctgcaggaatccaacagaaggcaacgcgttgccttctgtcggatataatcaaagctttaaaggtgtcatgcattgtttagttcgtgaaaaaaaaaatttaggtgttatattggacatttgaccggatgtcggaaggggttttcggacacgaatgaaaaaactaatttcataacttgcctggaaatcgcaagacgaatcttttaagcctaattaatccgtcattagcacatgtggattactgtagcacttatagctaatcatggactaattaggctcaaaaagatgcgtctcacaatttcccccttaactgtccaaagattcgatgtgtcattttttggaaaaaaaaaaggaaccgagcctatgtataccatcagttatatacgatgatacggttatgagatgatttaggtcctgtttgggggagcttgagattctaagaagctgctgctgagaagctacctggtgagaatctgaaaaagctgagaaacctagcttctggcttctagttcattttacagattctacaactacatattttcagaatctgagtaaatagctggactgtttgggggagtttctgccaactgaagattctaggagaagctgcagctgttagaaactcccccaaacagacccttaacgagtgggtaaacgctatacatagcccgtagccccactgtttcagtcactgacgtgtaagcccatgttaaaattcatctcctagcccgtttcgtcccactgaccaagtgggacccacaggagatcgtttcggcaaatctggtccgttgatctgcacacgcctcccaccaacatcggcaaagcagagcatccccgcgtggcgctagcgagaccgcgtgcgcggaggccggagggggagaggacaagaggcggcgggcg

SEQ ID NO: 16033 - DNA, 10374 bp, Oryza sativa
atctatcgttttgaggaaatcgagtgaaacgatcttggtttcaggccacggtgggtggcggcgcaggccggcgaatcgcaccgtcgtattcaggtgtccgcgggcgttgctcccctcaaattttgttttattttgcactggttttgacccgggaaatttttggtcatgttagggggttccaggagcaatctgataagattcagattaatacggatgcacgaagcaataaggtgtgctgctaattcatgtgcttgtgaaattcgtatctacaatgtattgctgcaggagtgttcccgctcactgatgatctccttggatgtctcgatgtgagttgtgctttgaacagattggtgagatcaggaattgctcctttggtgaggtatgatatagagatttgggacggatggagtagggttcacgaatcacgaaagaacaattgcattattacaactgcgaaatgactacagatgaatttctaactttgtttgccttgcagatatgttggtactttactgacacttgggaacaattccgtatcagcggattcatagatgtgattgatggttcaaaccccgaacctgtcaagctacaggttagaaccagtatagcatactgccttagtgctctgatctagtagtggtctgtatagtggaaatgccaaatgtcctagagacagaagcataactgtagtgcacacgtttggttgtgcaacatatagtattttgttcttttgcgctgtatggctgaataaatgaatgatttgtgatatttattcgatggtacaaacaaatgaattaactgttataaagttggaaaagtgatttaaatcggtattctaagaaattcacatatagagagtttttgagaaaaatgcaccgtttaggagtttaggaagcgtgcccgttaatccattcatccattaagcagaagagaacagtccttgaggtttattcatctcagaagtgttactgtgttttctctttctactttcattgattcatttaaaatcggttgccatttctatacacagctgagagagagagcttggtttggaagctcagtaaaatcgagattgcagtacttgggaccatgcccaggtcttcctattccggatgatgatctcattaaggatgctcatcttgatccatcagctggtccagtagatgccttttgccttctggttcttgatccagaaaaggtaggtagctattttcgactttttgctggatctagaaagatgttgatgtttgctcatgctttcttagtgctatttgtcagcaatcctttgatcctgcaattgttatactgtacttaggtcgattatttgaacttgaaaagcaatcaaaggttaatgttcacaagaaaccagaagggagatgggaccaacagttggatggccgaaaaaattagcccatgactgtttgcggattctattgcagctccaaatttgtttgtggatttatcatggtaagaaagttgtcttgatttgagtatgttttctagcatttagaatgtttaggttggagcaatttgggatatacatcgccagaatttctaccatctataagtttagttgacttgaacttataagctgaatggatattgttattgaaggaatgttattttctgagaatgctaatccatctagccacttcttagctgggtacgagcttgcagaactgcagctacctgtggcatccgagagaaccaatttccatgttcaagttttcatcttttataaaacgagggaaccgttcctcaagttcccttataaacacctgaaccttttcaggtaggaaccaacacatagattgtccagataaactagtttatcttttttgtttccctcgaaaaaagaaaacgagttacccttttatctttgaactgtggtgttatgatttcttccgaatgcgtgttgtatggtgcatgtttaatttagtgacagtagaatttgaattcctttggtgtgaacatggatgatgcaggtctactagtacctctcttttccgagcaaactttaggggaactgtgatgtgcactagggttcccgatcttccaaaaggttctgataaacaacgatttgggcggagtcacgacacaaatcgatccggcttcttgaacgcgcacgctcttgagccccgcaatcgcagcaccacgtctatccgagttagtgatgtccgcatcaaactgcatatgttattcgttaacagagggaggaaaaagagtcaatacagtacaaataaatcagagattaatggacagtgcaaataaatactactactataactcttgcctgtacatagtcattttttcttgtttctcttgatattttatgtattccagtttccttacaggaatgttaatgccataccatggatgttgtcctggccttctaggcttgtttgttgtgtcaatgtcaagtaaggtcattgtggttttaggcatggcaaactcttctccctgctatgggcatatggcccggccctttaacctctgtgcttctcagccttccttgtgcttagacaagacactatcagatgcatattgcccttgttgtggcagttatggggttgaacaaaagctccagctataagccataaatcagcatacgcgtgaggcgttgaagtgtgttgttcaccgttatacattgatgagcagagctggaggtgccggtctgctggagatcaactctggccaggccatgaatgcagcgttcaaaagttagttgctgttatctccatgtataagaaaaacacatcacatgatctatttgctgcggaaagcaatatattgaccgatacgtcttcaagtcgtggttccagtgagcactggctagtggtgtgcactgcgcagctgatggttatgaacagttctgctcctgctacaagggaaaagttgtcaatcgcattatctcattgcagacatgaaagcagaaggaaactgttctctgttctgtgcatgctctgattgagccgagcactcagctgcaggtttctctgctggtcttgataatgctacatatcgtcttttcttgttcttggcagtgaattattgtttcatccaaacagagactggactgcaacatcttcttccaatcatcttagagcagcatgtgacatttcgctcctttctgggtctccgttgcagttgcgctgatggcagagcaggggtcaaatgtggctgtttaattgggtctccagcttttctttttcattcaaagtcatcaaggtagcagcagtcagtccagcattagcatttcggctgtgccgaattgaggtctcatcctgacgctttgcagcgcacacaaggaacgcttttatcttactttcgctgataaaaaagggtgtctggttgaggtcaaccgcaagaccggccctcctcctcaagttgctaatggcaggtccatttcaaaggctgagaaggccttaccctgtggcttggattcatcttttggcaatcatttttattggccaccttcctcctactgggccttgctgctggtctaaaggcctggaagatgtgggccatgtacagctacccatcctcacttagcactacacaagtaaggttacatgtcacaatcttctctctttttgccgaatgcatcattaaagtggtatgtattgacgagcttgttactagtgatgcttacttttcgtagaacctatgaacatcactcatcattttttaagtaatactctcatattgttttcatatccccaaaaagagaagcagaccctctttgagagaaaagaccctattaaattgcacctaaaataggcatgccttcttctgtccctccggtcaaccttccttgccccttaagagcaggtacaataatgggcgttagaagatccacgtaggattttctgttgaactggaggagagaggggaggggagagggcgcaagcgggcgactaattagtcgcccggctgtatgcatgggccgaggacgtgggcccgcccgtagcgaacgatgcacccgtgctactcgccgttgcctgcgtcggagcaccaagtccagggccgcgccaccatcgtcgcgcacgtccgcgtccgccgccgctgccgcctttgtccattgtgaccaccgctaccctcgtccttgtcaaccgtgctcgtcgcctctgtatgtcgctgccgccgaccttgtccaccgcagctgtcgccaccaatttcgtctgcctcggccacggctgccaccgtcatgcagttgccctcgccctcgtcggtcgatgttgcggctctcgtccaccgtggccatggagggcaagtaggagagagagaccaagagagcacaaaagcttggattgagttttgaggccttgtgcttatgaatcggctttgatggtttgcccgattgcttaacttctatcttccaccgttccgcgtgcagaaggccagctcaacgccggtcgccagacgatgagctcagctccggtgacccgttcgctctatccccagctacacgggcagcgtgagcctgcacgatgagctgtttctattttctgatggagaaaatagaataacatctttctctagaaaaatcagatagcttaagcgaagtaatagcatacgtatgtgtatatattgttctgtaccgattccttccatgtagatgagcagatgtatagtacaaaacggatgtgtatatagccataaatttgttcatctttttagccatggatgagcttggatgcctagttcgtgagaagcaatcgccggcgagaacaagggattaggagagagagagagtggggatagaagggagattaaaataaaatttcttgtatagtgtgggtcatagtagtatagcttgattattgtgtttactagctacaatgttacctataggtgagatggaggtgagatggattaaaattgaagtaaacagctggctgcactgttgaccttgctctaaggttacttctaggctgcacttgtagactcaagtctcaatctgaaaataacaaaaggttttaagctactccctggttggaggctctgtaataataactttctggggaagccttgtgctgatgatgctgtagagttttgtcattgtcattgagctaggacatcttatgacccacactgcactctaatctgattacactgcaaaagggataacaattgatgttatcactgtacctccttggatggaaacacatcacctagttcttgtcccatagggaacgcactgccccattttcggtggcatgtgattctcaaggagaaaagggaaactcgaatttttcgagtggtcactcaccaagacacagtcgtttgccatgccaagtcgcacaaaaacaaaaggtttcggtttctgagtcgcaaaaggaggcttcggtttctgcagcatccacatcggcagcggccagccacgggcgcaatcatttggatgggggatcacaaccagctatccaatcgaacaagacaattcatagatgcatccacccatgcaaaaactcccaccaatcaaccatgcacattgtacttgcacgcaacaaggttagtaccagtaccagtacatgtttccaatgcgtgcgtgccgcatctcgacacgtctgctttctcctgacatggtgaacagcaaagccaaaggcacacatacgacaccgagtgcaaatctcactggcaatgtctggtactcgaggacaaattacagcgtactgtatactagtattatatatctcggaaatacaatcactaatataattggctgctactgctataatgctacagatatactactatatatttatacactggtgctcatactactataatatttgcaggttacatattgcatgaagctgtatatatgtaatgtggaacaagagaaaagacagtgatgcactacttcctccatcctaaaatataagtatttttaattgttcaaatttatagataaaagttattatattttaggatgggtagtagtaaaatacggtaaagattagccagtcagctgtgtcagggagcggaggcatctttgctgtgtctgttcgtgcagagcagcatggactcggagatttgccacagccgctcggcctcgtggcggttggtggcggccggcgacggcagggcctcgttgcagtcggcgaagtagcggccggacacgccggccagcctcgggtgggccgccacgtagcacgtggtcgccgcagcctgcgaagagccgcgggttttagtaatgagcggtgcaattattactcgtaagcacaaagctcagctcacagctcggctgcctgcagctgcagtcagagcgagcgagagacccaacacatggaacagggcttaaattaacagatttggtggacggtactacgttaattaatcacctgagggatggttttcagcagcttggacagcagcaggaacaccagatctgcaacgccaaaataattaatctgttcttaagtcgtttgatccggctagaattacagtggatcaaacagagtagtagtaatagtagtagtattcacctgtgacgaggccgtcgcggtcacggttgagccgcgtcctgacgatgcccgggtgcacgcagttcaccgtcacattggcgcccatctcctgttgggattaaccgagccacacagcccccaaaaaacggaaggaaaggtgagaaacctgccacgaaaaactccatccggtgccgaaacgaacggaccttgaggcgcacggcgagttccttggtgtgcagcacgttggcgagcttggacaccgcgtacgcttgcgtcgcgtcgtaagctctgagattacagcgatcgccacacacatgcatgccaagctttagcggacagagagttcacgagatcgaggaggaagaagacgacagataatgacgctgactcacatcttccggcgggtgacgaggtcgaggtactccgcccagtcgccggcgaaccagctgtgcacgctggacgacacgttgacgatgcggccctgcacgccggtcgccgccgccgtctccgccatcctccccagcagcagcttcgtcagcaggaaatggcctgaacaacatacgatcgatcgatccatacatcatttatacaagtatactgagtagtacgtacgtagcaggagtacatacctaggtagttggtggcgaacgtcatctcgacgccgtcctccgacagagcgagctgcccatgcgagaacttgccggcattgttgctgcaaccatccgtccggcgatcgaattaagcacgagcacaaatgcaaaaaaagctattctattagctcccatggatttagctcgtacgatcggcgaattgaagcaggccacaggagatcagtgagagtgacgtacgtacatgaggaggtggagcgggaggccgagggagaggaagcggtcggcgaaggcgcggacggaggcgagcgagctgaggtcgagcggcagaacgaggacgtcggcgcccgggcactcgccgcggatgcgcgcccgcatgtcctccgctgccttcacgttcctcgccgggatcaccacccgcgccccgcgcttcgccagcacccgcgccgtctccgcccctatcccggacgtcgcgcctgcatgacaaaccaaatcaatcaggccaaaacgggagaccgatcggctctgccggcgctgcaaattgcaacgcacctgtgatgatggcggtgatgcagccgaggtcggggcagacgtcctcggcggtggacttggagccgaagccgttggcgccaggggaacccagcaggtacttcgccgcccgcagcatctccgcctcgccaccgatcgcgcgcgcggcgggcggcggccagcgacgcctgtgagctagcaagctgacactgtagtccgctcacgcgcgggcgcggcgcggcgagagctgagggcgaagaacagtgggaggaggaggaagtgaaagctcggggaggagcggaggccgcatttatagaaagctcgcgccgcatgaggacggcacgggacaaggtggtggtgccgatcgaagaaaagtggcaagtacgccgcagatggagatggaattattactactagtccatttgcggaatatgtgaccataactgtgcgacctctctccgcctctgcttctgcttctacgagcgctgtaataacactgcactgaagatttttcacgttgttttttttttgaaactcataaagttttattgcatattaaacatagtacattggaagggaacaacattccctgaaacatcaccttgcaagaaattgataacaacaaacgttaaggaccatcttcctgaaaggtaatgattgaatgatggaagcaaacttccagatcatctgatacagcagtagtagtgaatacaatcgtcggagatccgcggcattgccgcgacgattgcacccaagggcctcttcaaacgtgcttcccatttgacctgccagcgatccctccggctgcctccacggatttggcactaattgagctttggagttgagtcgtagatatgttggtggcttcaccggactcaaccaatgattgccatggaagtcatcgttaaatctgaggaacactaacaatatccctgccgaccaaagtctaacagatagtcggtgctcaacccgaacgataacctcaacatggatactgctgcaaaggaatgaaataaaagatgcatccaaaacccagctgaccttaagctttagagaagctagatggtggcgatgataaagtcttacgaacttaagatgtatcccatgggtgaggattgagaaggagacttcgttgccggcatgcacagaattgctggaccagctttgccttgttgtgtagcttgttggttgcctgtatgatgcaggggattcatggcgtgctccttgctggcccatgacttgtgctgctgcttggataattgatttaggcataattgatttaggcacagcagcaaattgatggaggtgttgtctgtcgagacaatgttcgggatgctcgcatgagaggaatcagcaagcacgaactgctccaacagctcagctaactctgcacctccaagcccaccaaatatgacgacgatctgggcatgtgtgagcccaccctcaccggacacgacgcggctgagtgcatcgctgaggaagggcacagcgccaaggattagatggacaaagaggtcgcggaaatcggttgaagccatccagatccaccgcaaactatggccagcgacctcaaagcttgaagactttcggccaccggcactgtagctgaattttccacaatcaggcgtcgctagggccgacgaaatcgaggtctggcacagcaaagaccgacctccctggctgatccacccacaatatttcagatctgaagaagggaatactggactcttcatagaggaccaaagacaaagaacaggaaggacatagaacgagactaacttgactacgagactaacccgactaaactactatacgaaggagacgcaattgagcctgacccctctccctcccgtcaccggcggcgagccaccggaatcaaggaggaagaggggccggagatgaggctttctttttctctctgtctcgggcaagctaggaggttcagagagctcacaccccacgttgttttttttttgttgttgttgttttgtccattgacgcgtcaagttggagggcaaaaggggagatcgagtggacagtttattgtagaaataatacaactttaataaaaaaaagtgtaaaaataggtgttggttgatagaaatcaaatattcagtaaccagtcgaacaatcatatttcaataaggtatctatcaaacaaccattgttcgataagttacatgtcgaacaatggtcttttgacatgttaattggcttgattgacctatcgaggtctcacagctcgctcatatgcatacacacatatcctaagttcctaattttttttaaaccctgtcaaataatggttattcgataatgtgctaaatctgtgattttagacaatcaacatctatttttataaattttcattaaaattgtactatttttttaaaaaaattctcgagtgggtgttgtttggctgggccggggctgaaatggctgatgctcgggggcatgcagcagcagtgaaacatctcgctgacaatcggctcggaatctccactaggaccaccgcacacagcttcctgtggataaggatatgtagggcttttgctgatccactgatgcatgaggtcaagaatacagaatctaccgagtcctgggctcctgcctgttcctgctgatcaatatacagtacgatctcatcttaccgtgtggcaatctcgctattgctctgtcaaaaactccattacttatatcagttattccatgaaagaggagaggcgagccacacgcttctaggagaagacattgcggctcgatcgtttgtg

SEQ ID NO: 16034 - DNA, 10574 bp, Oryza sativa
ttctcaccctgtcatacctagacaagtagaaggtgatgaaacaatagtgagcatcgacaagggttaaatggtacaaaattgaacattgacaatgaaagcaaacaaagataagaaatatttacttgtgtaattcaactccagttgagatgtcctcaaccggccaatcttgtttcttcccgaactgtcgcatgacacggtgtggaaggtggtactcaactgcccagaaacaaatcaatgggcactggtacatgaaatagtcagagtctcgattgcacatcaagttcagggtcaggcttgaagcctcatttgtgtggtatggtaaccactcaatctgcaaaagttgaagagatgtcgttggttagtatctcaattaaagaagtaaatgtctaactagaagtgatattggaagtacttacatgttgaggctgtaagcagtccatctcattgacataatgcttgtatgccacatcccagtgagcatgtgcagtggcagtactctcaaaaaggtaggccactgtcttctccatgtctggctcattgtagtaccaaggagtgaagctttgcctccacttaggccttccaaccggtagtcttaaccacatccatatctgaatcaatagcacacaaccactcatgttggatgatggtgcctgacgacaacaggcctcacagagctgtctatatgtccacgccaacactgctgagccccaactgaaacggcccagatcaccaaggttggcgaccaaaggaatccatatcgccgaagcaatgtcacccccagcatcaggaaacagaacccctcccaacaagtgcaagatgtatgcacgggcataacactcaacacgccatggctcagcatcgtcgtcaagatgtgagaagttctgactcagccaagacaggggtattccattctgcttcttcttccccccttgcccctgctcaatgttcagtggaatgccaaacagctgctgcacttgtgcatgccatccaggagtctctgtcctgcccgtcacggcatgcccccgtaatgggagggccaagatcatagccacatcctgtagagtgatggtcatctcaccactggggaggtggaagctgtgtgtctcaggcctccatctgtccacaagtgctgtcaacgcaggagcgttgaacactggcattcctctgctcacgaccaaggccaccccgagcaacccggcagcccttaggtacgggatgtacctatcgtcgaacactaggggagcatgagctctgactcggagcggttgaagtacctgcattagcaattgtaaatcaattagttaatataatgtcaaatacacgctaccgatacttattgacggagcgtggggctcctcaccgggagaccgcgtaggcccccctttgccggttcggccggggactcagggtgagattctaagctctctgtatgtggaaggttcgcgagacaggaaacacacaagacacgggcgatgtatacaggttcgggccgctgagaagcgtaataccctactcctgtgttttgggagatctgtgtatgaaggagctacaaagtatgagccagccgctcccttgttctgggttccctatctggaaaatcagtcccctctctcagtgggctaggtcctccttttatatcttaaggggataccacatgcaccatttctctcttttttgtgggacttaccctaccttttcataaatggacggagatttgtatagttgccgtccgagtcatcttctgatgagacgacccacaactacctccactttcgccgggagcaggtgcgacgtggaatcgtggctgtctgctgacgacatgaccggtgtcagacccgtcacgtcggtcattcttgtgcaccacgtgtcagcttagcaatctacatgttcgcccttcttcacacaacatcttgcctgtaatggttaggatgaagcctggcatatatctgaccaggactaacgtgccatctctgggaggtaacacgctagctccagctggggacgagcgcctagaagccctcgtcctgacgggatggggcgaggcgtgcgtcagatcgcctgtcgccacctaacccgcgatctgaccggtctgtgactggtcatagaccggataaacgagtgcactgcactgtgttacatgcggcgtgacacgctcagccaaaccgcaataaatgtggttaggtgagccccactgtgctcacctaacccatacacgcggagcaaaaacccacgaggggtcggggtgcctcggccctcggggccgaggcgggtgtggcccgaccccctcggggggactaagaggagggcgaacacatcaccctcgggcccgacgtccctcgggggtgccaggccacgtgtgcgattgtgtctgcctcaaacctctagtcatgatactcctgatcccatgttaccgacagtagcccccggcgttatgccagggcgatcgccctctttaagggaaacggtcgggcgtgacgccactcctaaggcctggtgacaggtgggaccggtctccacaattgggcagaaacccaacggtcacaaaccacgcacatcggcaatggtaactcggctgtcaacaatgagcagtctcttcaagactgccacattacttgagtagcacacgaatcttgacatggcgattcgtttcgtctggagatatggtaacgtcgcttcggtcggcgagcgtaattaacgcgcgcacgatatgatctatctcgactgccacaaccgcatatccacctcatgcgccgcaagcgggcgaatgggattagtggaagcgtgggcgcgagaaacgagggggcgaaatagtgggcgcgagaagcgaggagccgggcacagcgttggcaagagtataaaggcactgaggaagggatctgtttccttcctttcgccattattccccttgtcttcgccgcttgcgccctaactccttctttcctgtgccctaccttcgccacacgcgctcgctcttaatcttctctttctccggcgccatggcacggggctccgctctgcttgatggtagcgtgctgccgccttcccgcatcgtgagtgagaggcaggctgggctgtcgcgccgcttcatgccggaatctgccaccggccgggagatagtcacgctgggcgagggacgcccggcgccagactacccggggcggtccgtcttctttctcccctttgcaatggcagggctggttccgccattttcttctttcttcatggatgttctggagttctacgatctccagatggcgcacctcacccccaacgcggtgatgacattggccatcttcgcgcatctgtgcgagatgttcattggggtgcgcccatctcttcggctgttccggtggttcttcaccgtgcagtcggtgtcgccgccatcggtagtcggtggctgctacttccagccacgggggccggtgctgaaccgctacatcccctgcgccctccgcaagaagtgggacgactggaagagcgactggttctacactcccctcgccgacgaagcgcgcctccgacttccgagccagcccccggcgcaggcctccagctggcgggcgccggtagatctgggggatggctatgacgccgtcctcgaccgcctggcgggcctgcgatcccaggggctcacaggggccatggtgtacggcgactacctctgtcgtcggattgcgccgctccagcgacgcgctcggggcgcctgggagtacaccgggtccgaagacttcacaaggacccaccagggagtgagatgggactgggctcctgaggacttcaagatattggtccaacgggtgctgaatctcaactccgtagaggcggccctcattccccgaggaatcctccccctctgcagcgatccagaccgcgcctccatcctgaccattatgatggcggttggggcctcagaggagcgagctccaaagggccacgacggcgcgggcgggagccgcaggggggaacaatctaccccgagagggggtcgtgcttctgggtcccgcgacaggggcccggggagcagccgccctgccgacgcccgggggaagaggaagcagggaggaacacctcccccatctcctccccgagggggcggggcggcgcgtgccagcagcaggcgcccggagggggccgcgccaacatcgcagcccgagggggagcgcaagaagaagcggccccgtaagatgggggagacagaaccatctcggggaaacctcatttcccctccaaagtggtcgtttaaccgacctcctcgcaggttcatctctcacccatcgtggctgtattcattctctcaacgcgagttttcactcacccaccttgttcgtcttctggttttttttcttttgtttcagcgagatcccgtcgcgtccctcccgccattccaagtccggccagtctgaggccgaggatccggcggccgcagaggccctcaggcgggaatctgaccggcgagaggccgtggatcgcctacgggaagccaaggaggccgcccaggaggccgcccgggctcgccaggccgaggaaaccgctcgggaggaggccgcccgggcccgccaggccggggaagccgctcgggaggaggccggatttcgccaggacgaggcgatggcgacttccgaggcaactcgtgacgaggccgcgggcgcgtcgcttgggcccactccctcgggcgacgctcaggcgacaacttccggggcagctggcgacgaggctgcgggcgcgtcgcttgggcccactccctcgggcgacgctcaggaccaaacgggtccgggggacatccccgagtccggcacttccatcggcggcccgagccgcgtggcatcctctccaaggcggctcttccccacgccttctatcgccccactgaacgcagagccccttctgcaggccttggccgccgcaaacaccacggtgttggatgggttaagtgcccaggtagaggtcctacaggcagagcgggcggagctcgacgccgcgtgggcgcgtgtcgaagaggggcgacgctcggtggaggccatggtggaggtgggccgtaaggctcaccgccgacacgtctcggagcttgaaactcgtaagaaggtgctggcggagatcgccaaggaagtggaggaggagcggggggctgccctcattgccaccaccgtgatgaacgaggcgcaggacaccctccgccttcaatacgggagctgggaggcggagctagggaagaagctcgacgccgcccagggggtgcttgacgctgccgctgcccgagaacagcgggcggcggagaccgaagcggcgtcccggcggcgtgaagaggcccttgaggcgcgcgccatggcgctggaagagcgcgcctgcgtcgtggagagggatctggcggaccgcgaggccgccgtcaccatccgggaagcaacgctggcggcgcacgaggctacctgcgccgaagaagagttcacgctccgcctccgcgaggacgcgctcactgagcgggagcgagctctcgagggggccgaggccgcggcgcaacagctggcggtcagcctgtccctccgcgaggcagcgcaggaggagcaggcgcgtcgcaatctggaaggtgcccgcgccgagagggccgtactgaaccaacgggccgctgagctcgaggcccgggcgaaggagctggacgcgagggcgcgcaacggcggggcggccacgggcgaaagcgacttagccgcccgcctcgcagctgccgaacgcaccatcgccgatctgcagggcgcgctggactcgtccgccggggaggtcgaagccctccgcttggcaggcgaggtagggcccagcatgctttgggacgccgtctcccgcctagatcgcgccggtcggcaagtgggcctctggagagggcggaccgtaaagtatgccgccaaccagggaggcctcgcccagcgcctctcgaagatggccggggctctccaacggctccccgaggagctcgagaagacaattaagtcatcctcgagggacctcgcccaaggagcggtggagctcgtcctggcgagttaccaggccagggaccccaatttctctccatggatggcgttggatgagttccctcctgggaccgaggaccgcgcacgcgcgcaggtccgggatgccgccgaccatatcgtcgacagcttcgagggctcggcccctcggctcgcgttcgcccccaactccgacgaggagggcaatgccggtggtgcagacgacagtgacgacgaggccggcgatccaggcgcatcggattgagcccccagacccccgccattcttcagttttttcttcttttctttcttctaaggccttcgggcctcttttttgtatagatcaacttaatctgtaatcaaaaatgaagaaatttttgtgttaatttcatcttgctgtgagtatgagatgaggatgatctgtgccgtggtccttttgtgtcttagcttgaataagggcttgtgcccaggttctggtcctcaaaaggcgcgggtcggggctagtgcctggggagatccacatgtcgagactggctaggccgggaacgtggtgaccgagggttatgggtgacccgattgtgggtttttgccgattcccccccggagttcaccacgcctcggggcacggctcggttctaggccccgtttggcgattttagccgacccgagcctccgagggcaggattgaggacgagtgacctatttcaagtcaagatttttcaaaaggaaaaaacagcacagatacagcctttaggaaattgaaactgcttttattgaagtactgagaaaaaaaaaaggaaataagaatgtgcatgtgtggcagcccccggccaaccctacacgcccgagggggtgcggggttggcccgagcccaaaacctgacacccgacccccccctcaggggtagaagcgacgaaggtgttcgatgttccacgggttaggcagctcagtgccgtcgcccgtggccagccgtatggagcccggccgggggacgccgaccactcgatacggaccctcccacattggtgaaagcttgctcaatccagcacgcgtttggacgcggcgtaggacgaggtcgtcgacgcagagtgatcgggcccggacgtgacgctgatggtagcgccgcaggctctgctggtagcgcgcggctcggagggccgcgcgccgccttcgctcttccaagtagtcgaggtcatctctgcgaagctgatcttgatcagcctcgcaatacatggtagcccgaggagacctcagagtgagctcggatgggagaaccgcttccgcgccgtagacgaggaagaaaggcgtttccccggttgctcggcttggtgtagttcggtttgcccagagcactgctggcaactcctcgatccatgaatcgccgtgcttcttgagtatgttgaaggtcttggttttaaggcctttgaggatttccgcattggcgcgctccacttggccattgcttctggggtgggcaggtgaggcgaagcagagcttgatgcccatgtcttcgcagtagtcgccgaagagttcactagtgaattgggtgccattatccgtaataatacggttaggcactccaaaccgggccgtgatgcccttaatgaatttaagtgcggagtgcttatcgatcttgacgaccggataagcctcgggccacttagtgaacctgtcgatcgcgacatacagatactcaaacccacctggggcccgcctaaacggtcccaggatatcgagtccccagacagcaaacggccacgaaagtggtatggtctgcagggcctgggccagctgatggatttgcttggcgtggaattgacacgctctacatcgccggaccaggtcgaccgcatcattaagagctgtcggccaatagatatcctggcgaaaagctttaccaaccaaggtgcgcgaggcggagtgggctccgcattctccttcatggatatcggcaagaagcacaacgccttgttcccgaggaatgcacttcaggaggattccattagccgcgcgccgatagagggtcccttctaccagcacgtagcgtttggagatgcgatggacgcgttcactcccttcgcggtcctcgggtagagtcttatctgtgaggtatgcttggatctcggcgatccaagcaatcaatctaagggagttgggagcactcccctcgggtcccgaggcctggactccgacgggcctcgggggccggtcaggcgcatccgtctcccctaaggggtcgggtcgcgccgacggctgggtaagcctttcttcaaaggcacccggtggggtctgggctcgcgaggacgcgagccgtgagagttcgtcggcaatcatgttatcccgtctgggcacatgccgaagctcaatcccgtcaaaatggcgctccatacgccgtacttggcgcacgtaggcgtccatctgcgggtcagagcaccggtactccttacagacttggttaacgaccagctgggagtcgcctaacaccaggaggcggcggatccccagtccagctgccactcttagtccggcaaggagtccctcgtattctgccatattattggtcgctcgaaagtcgaggcggaccaagtatctgaggacgtctccgctcggagaggtcaacgtgacccccgcaccggcgccctgaagaaacagggatccgtcgaactgcatcacccagtggacggtgtgaggcagctgcgaggggtccgtgctggcctcggggatcgagatgggctcgggagccggggtccactctgccacaaaatcggcgagggcctggctcttgatagcgtggcgtggttcaaagtgcaaatcgaactcagaaagttcgattgcccatttcaccacccgtcctgtaccctctcgattatgcaagatttgaccgagggggtaagacgtaactactgtgacccgatgcgcctggaaataatggcgcagtttcctcgaggcaatcagaatagcgcaaagcatcttctgggcctgagggtatcgggttttggcgtcccggagggcctcactaacaaagtagacgggccgctgcacctttcggtggggccgatcctcttcgctaggggccgcatccctggggcactcttcgtccaagcagcctcgcggggcgcacttgtcttctgtgctgatgacctcggggtcggaggataacaggggcggccttcccatagtggcttcggggccgtcctgggggtcgggggctcctggcgtcgtcggacaagcgggcaaagggccaactccggtcgtcaggggccttaggcctccgttcggctcgggggcctcttctccctgctctttcccgggtcgagtcagcacagggttagcctcggggtcaaagggcgataggtgcggccttcccacagtggcctcagggccttcctgggggtcgggggctcctagcaccgtctgacaagcgcgcagagggtcaactccggtcgtcgggggccctgggccaccgttcagctcgggagcctctcctccctgctctctcccgggccaagtcggcacagggtggggaggcgtgaaatgagaattgtcctcatcgcgctccacaaccaatgccgcactaactacttgcggggtcgccgctaagtagagtaacaagggctcgtctggctccggggcgaccagaactgggggagagcttagacatgccttcaactgagtgagggcattttcggcttcctccgtccaggtaaacggtccggagcgtttgagaagcttaaataagggtaacgccttctctcccagcctcgatatgaaccgacttagggcggccatgcaaccggtgacgcattgcacatccctaagtttgctgggggggcgcatccgctctatagcccgtatcttctcggggttggcctcaatgcctcgggcagagaccaagaacccgagaagcttgcccgcaggtacaccgaacacacacttatcggggtttagttttatgcgggcggagcggagactctcaaaagtttccgctagatctgagagtaaagtttcctggttgcgcgtctttacaatcaagtcatcgacataagcctcaacattacgtcctaattggctacccaaagaaattcgagtagtacgttgaaaagtaggacctgcattttttaacccgaagggcattgtcgtataacaataggttcctatgggggtaatgaacgcagttttttcctcatcctccctagccatgcgaatctgatggtaaccagagtatgcatctagaaaacacaaaaggtcgcaccccgcagtggagtcgacaatctgatctatgcgaggcagggggtaaggatccttaggacatgccttgttaaggtcggtgtagtcgatgcacatccgaagcttgccgttcgccttgggaacgaccaccgggttcgccagccactccggatggaagacctcacggatgaatccggcctccagaagtcgcgccacctcctcgcggatgaaggcttgacgttccggggcctgccgccgcactttctgccggaccggccttgcacccggccgcacggcaagacggtgctcaatcacctccttggggaccccgggcatatccgccggtctccatgc

SEQ ID NO: 16035 - DNA, 34476 bp, Oryza sativa
  unsure (1)..(34476): unsure at all n locations
gtttgcccgcaggaaggagacgagcgcgtcttcctatttgccgtccagaagaccaccgatccgtgtggtcttggacgggccgtcgcccagggcaacctccttgaccgggacctcgtcgcctgtgatcatccgctgcctcggggtggcgggggcggaggcgccaagcctctcgtcgccaccctcgggcttggacgcagcgacgaggtggtccgcgcgctgctccagacaagcgagcgcgactttgaggtcgccatggacagagatggggccaccggggcccggcatcttcatctgtaggtaggcgtagtggaccgccgccatgaacttcaccaacgcgggcctccccaggaccgcgttgtagggcagactgaggtccgccacatcgaagttcacccgctccgtgcggaagttggcggatccaccgaaggtgaccggtaggtcgatgtgacctaacggccacgtgtgccccggcgtcacaccgataattggctgggacggccggagcaccatccccggggccttgatggcgtcaaaggccgcaggggaaaggatgttgagggccgctcccccatcaatgaggatacgccccaacttcacgttgcaaacggtgggagaaaccaccatcgcaatctgccctccccgggcaacgcacggtgggtggtcggtctggtcgaaggtgagggcaacctccgaccaccgcgcccgacacgtcgcctcatgagtaggggccgcggccagaagctctcgcttcatggccttgaagctccggcgagaaacgtgagcacacgctcccccatcgacggtggcaatggtggccccaggctcttggaaacctaggtcatcatcgccgtcatcgatgtcctcggcgggggccttctgcttggcctcacttcgccgattaccggaaggaaacgccggggatttgccctctcggcgctcctgcctcctctcctcctcccacttcctcgtccgctcagccaaacttttgactgcacggcagtccgcgaggtcgtgaagggaagtgttgtggacggtgcaccacttgccggttgggcgctccctgttgggagcgccggcctcgttctttttgcctcccgcaggcctcccctttcgggtggcccgcgaagcgccctcgacggcgaggacatgaccctcgtcgtcggtatgggctgacctcttcttcctcctcctgtcacgccgccctatctgagcggcggatccgggggcggccgaagctgccacaccggaaccggaggggttccaggtccatgcctcctccttacgagccactcggtccgcgagctgaaaaagctccgcggtagtctggggctctttggaggcgatcttttcgagcatgcggttgtgccgcacaccccccctgaacgcgtaaatcaccgcgtgtgcagggatgcatggtatggtgttgcggacttgacagaaccgctgaatgtacgagcgaagtgactcatcatcccttcgctgtactgcgtgcaagtccgcttcctcacctgggcgcggatatgtgccttggaagttcatggtgaactgttggcacaaatcctcccaagagtggacagacgcgggtggcaagttcattagccaaccccgcgcctgtcctttcagggccatgggaaagaaattcgccatgaccctgtcgtcacccccggcggcctcgatcccggtcgtgtagacctggagaaactcggcggggttgacgctcccgtcatatttttcggcgatggtgggccggaaccttgggggccaacggacattccgaaggctcgccacaaaggctctacagccgacaccaccaaccgggggcacggagggctgatccccgcgtccgtggtgaggtgacactccggacgaggaggcgccctccgttgcgtggggagcacgtcggccattacgccggcgctcgatactgatgcgggcatccggttccccacgcagatcttcccgggtcggaggcgttgacgaaggagtggcggccgaatggcgaacagcggctgccgctcgccgcgccctccgtcttgacgacgcggagccggtggtagcagcaccagaggccttggtggcggaggaccgcccaccagcatctaggcgctgccgtgcagtcatgaccaatttggccacatcgtccagccaacgttgggctggagactccgggtcatgggcgacgggcgggtgacgtaggagcgcgcccgcagcttggagcgcgccctggggcgtgctgccgtcgccgtagacgaggaggcgacgctccccatctcgccgcccttctccacctcctgtgggcgtcgaagtcgcggatccttcggccctctcgagcgccttctcccgcctaggactttggcgtggagggggcggtggagtacgagctcgacggcgtgggtttggctccccgtcgtcaccgctcatactcggggagaggtcgtgcgcctttgccggctcggccattgggctgaacaggaaaagcttggcgcacacgaaagagtgcgagagctcagaaaatccctcgcagagccccctacctggcgcgccagatgacggagcgtggggctcctcaccgggagaccgcgtaggcccccctttgccggttcggccggggactcagggtgagattctaagctctctatatgtggaaggttcgcgagacaggaaacacacaagacacgggcgatgtatacaggttcgggccgctgagaagcgtaataccctactcctgtgttttgggagatctgtgtatgaaggagctacaaagtatgagccagccgctcccttgttctgggttccctatctggaaaaatcagtcccctctctcagtgggctaggtcctccttttatatcttaaggggataccacatgcaccatttctctcttttttgtggggacttaccctaccttttcataaatggacggagatttgtatagttgccgtccgagtcatcttctgatgagacgacccacaactacctccactttcgccgggagcaggtgcgacgtggaatcgtggctgtctgctgacgacatgaccggtgtcagacccgtcacgtcggtcattcttgtgcaccacgtgtcagcttagcaatctacatgttcgcccttcttcacacaacatcttgcctgtaatggttaggatgaagcctggcatatatctgaccaggactaacgtgccatctctgggaggtaacacgctagctccagctggggacgagcgcctagaagccctcgtcctgacgggatggggcgaggcgtgcgtcagatcgcctgtcgccacctaacccgcgatctgaccggtctgtgactggtcatagaccggataaacgagtgcactgcactgtgttacatgcggcgtgacacgctcaacccatccctattccagaaggcaggtaagcncanctgtgctcacctaacccatacacgcggagcaaaaacccacgaggggtcggggtgcctcggccctcggggccgaggcgggtgcggcccgaccccctcggggggactaagaggagggcgaacacatcaccctcgggcccgatgtccctcgggggtgccaggccacgtgtgcgattgtgtctgcctcaaacctctagtcatgatactcctgatctcatgttaccgacacttatgcacaagtgaatcaatgccgattcataccctccccgcctcgatcgcagccccacgatgacgggcctcgtagtacgcctccaaggctgggtaagtcggcggttgtccctcctcagccatcctatatgaaaaagtaataaattcaccgttagttaccaatgtgacatatattaaaagaaaatgaatgcaagaacatgagtaggacaactatgttccttacctacccgtgatatcctccacgtaccactagacctcttagttgcatggaccttccatttgcaccgtgggttttcacatttaacagtgtacctcctatttgcggcagaattgacaacacggtatggacgatggtgcacgatggcgtactcctggagccatagcttcaatgcgaccatggatgggaactctaaaccctttctgagaccatccacctggaatggttctggcaactgatctaggttgatgccgccatctagtagtgcaccatgggcatgtgttaggtccctaaactcaggaatgtccggctttctcctaaacaccttctcaaacgcacgacattcctctaatgctaacttgtcattattagtaagtggagggaatggacggtcatcatcagagtcttcagcaaattcaacatcatattgctcaacacttgcctcctcgtcaacatcatctctattgacttctactgagacagaatcgtgaccaccactcaattcgacatcaaagtaatcatctgtattcatatattggcctgctacttctgtcgggtattcagggttgactccgtacgacgaccaatgaacactcgccgacaaatgttcacttagatcaagcccctcttgtactaactcccttttcatcaccctcgctgcatccacatcatcagtaccgcaatgtctctttgatggtcctgcctcccataaatcatttccaagcaaaggtctcttcttctctccttccccctccaagtcttctcgtaccaactcagtcttacttgcaccccctccacgacgagaataatgtcacaaaattcttctcaacgtaatgataagaaggagatttgtttagatccaaattttctacggtacgaactaactttgatgcaaacacctctagagatctaaactgagactcttttaccaaatcaaagtaaacttcccattccaactgacctatcacatttaatatatacttatgcccttgaccaacatcgtatctcccataaaaacgaatctccacattatcctcggtccatccaagaacttctttcactcgtgactttagttcatctagagttgggtgggtgggaaacaaaatggtcttcaatgacatatcctcaaactcacatgtgcaccaacataaggttccaccactctaccaccgtagtaaacacgaacaagtctatccatctacaccaaaaaatcaaatgtaactttgcaacaaaattaaatcttcattcctaaacgtagtccaaaccgacatattataaccaatgcacaacttaaattgtcccaaagctactactccaaaaaaatatttaatccacctacaactatcaataagtttactagtgcattacacatcgaaatattacaaatactccgtcatacaacccaaacctccgtcatgcctcaaccataatttttcatccatccatccaaccaaaccatccaaaaattaacattaccacatatatggttaaaaaaatcatgacaccaatgagtacattgcaaacatgtagcactacaacaagccaatcctaagaacaaatgctaaaaatcataaatttgggtaaaaaaggggttctagggttacccaccgatctacaaattcaaccaataaaaacgaaaaaaaaagaggggggaatgaaggagtctacctttctcttcgatttccacaaaaaatcccgcgaaaaacggctttaaattgagtggatttgaggtggagaggtgagggggagagagaggggaagaactcctgcgctgctgctcgggctgggacttggcgaaaatgggagtggggaggagaaaggtggtggggcccacggggtttaagggtcggcccacagaggaggggcgcgccagccgtgctggcgccgtggtatgaggggcggcgccagtgtggctggcgcccccattctgcccagtcagcacctccacgacagccctagtgccacggtggcacgggcacggcgccagtgtggctggcgccgccatgttggggtacggcgccagccactctggcaccccaaaaaggaccatttccggtttaagttttcccaggagtctatttgtaaaataagttttcaaaaaggaccaaattgtaaaaattttagattccaacacagcaatgtaaaagtccaagcattggcttttattctagatgagaaaacgaatggcgtgttaagagatgttttgtcttgataacaactcctgttaatgttgtcgacatatttagtcaatcgatggcttagtttcctattcgtagaggtcgcagttgtaattggcgctttcatgactagaaacaggccggcgccgcgacgaaggttctaatttgatttctgacccttttttttctgatcgaaacgccgttgatcgatcactttgctttatctgaccacgcgcacgacctgcacggcaaagctcctgcctatagctgtttattattccctgtgtgtcgagttccagtccaaacacgcgagcgagaaaattcccttgctctgactcgtggcaaggaattcacgagtgtcgatgatcatttcgttgtcacggcgtacgttaatctggaagagaataccgtaactctgtaagagacgagagtacatgctacgggagtgtttgagagcagaggaaaaggtgagatcgagaaagatatgtaaaacgagctaatctattagcatatgaataatagagtattagtgtataattaatagagtagtttgaaaagcgtgcacgtgaaaaacgacttactaccgaacgcagccccggcaggtactccaaagtatcagtagcatgtatacatcgcctgaccgaccaccgccgtgtaatgactactgtaatgaattgaggcacagttagcaaaagagctcaatatatacatcgggtatggacggagacgtggtacgtactgtatacaagttataagactgcttgtgcgcaaaacgccatggctggcagttaaggccgtgcagctcccgcggagatggccagcaaaaacgcgcgttgacacgcagcagcagcagaagcaggaggaggtacgtacgctgatggggggtggtgaatgatggtcccgatcgatcgaggcgaggcggacatgcgtaaatccgccccgattccccgtgatcgtatcgcgcggcggatacgtagtacggtgcagtgcaggtggcggcgaaagcgacccgaattcagcgtggcggatgccggatgggacatcgcgcgcagtgcatatacggctgaattgtttcgcgttgacatgcagatgcaggtgatcgatgcggtgcgacttcgtcgtcgagatcgatcggtgtgggcttgggcttgtcggttcgatcgctttgcatcatgctgtaccccaaccagggttcccttttaccattttcggtgcgacaccgtggtaacccgaaaactgcatgataaccacgagacataactgattttaaaaactaaaaagatcacaatacatgataaccacgataatcatatgataaccacgtggttttgtaaacctgacaccaactggaagcttaagtaactaatttggatcgcaccccgattccggccgagtccgattgatatggtccagagagagacgccgccgtgcgagcgtgaccaccaccactgcatgcgtcgcatgattggtgcgtggttccgtcgaaaatgtcagcagaggaatgctcgccgagatccaacttctcacaagcagagcaaccctcctccatgctgtgttgaccgtcgagtcgatatatagtacacacaagaaaatgttcggatcccttgtggtttcgatcgttttcaccacttgctttctgtgagactgtgacggcggcaatcctgttcttttgagatcttttacattgctccaactaaattgcctccatgaggtaagagcccataataaatcctaactgttcaatactagttatatgttaattgacgttttggacaagattaagattaaacttttacaactttgaccatcaataactttaaaaatatttagtttaaagaaactagaaaaaacatatatagatttgtctttcaaaacactataataaaagtaaacatgtatttatttattgtatatattataatagaaaattaattaaggttaaagttatatcttgtagagcgtgtcattgtccaaagcgtcaattaaaatgaaaccgaagggagtaaacatcttttttatctaataaaatatactgtctccttattaataaatcggagctactccaacaatcattgtccttcctaattaatcacccatgacccattcatccgtaacctagctaccaaaaatcaaggaagaaccaaacattctgagtttccatattccaaatatctaagtgaaaacagagaaaaactatattgttagaactaaatataaatgtaaaaataagttttctaaattggcagtgtattctaaagcctcaaactgaggctatgtgaagcataacctgtatctattttaaagtttttgaacctgttttttaaaaaaacaactgaaactttgtttttcaaattataatttggatactcaaatttcaatttgaaatcggaacatgtcttttatatttaatattatttcgaattttatattcagttaaataaatattaagatattccttattaggctgtaataattatctttaataaaatttgcatggcaataaattatgtctcctatgaggtataagaccaatattagccatgggatcatggaacaatggacgatgcatagtaaattggtgtaggataaaaaagtccgtttgttttttgttgcactcatgcggttgcttataagcttattaacatcatataatcccaggtgctttcgagaagaaaaaaacatcatataaatcccaggtgaggtaaggttacgtgtgtggtggtttgtaatgtagcgttttcaccttgcgagaggttgcagtgtgatgcaacacaaatatatatttttaaaacattttctggcaagtgtgctgctcaggaaatcttctcttttctccatcccgtgctgccgtgcaacgtatgtcaacggacggtgtcaagacaaagattaattagattatgacatgcccatacccgataccaagaggcactcgcttgacctctttaatcgacttgtcttttctcacttgtcctatactgcaatttacgcaagatggaaggtcgttgtaacgtccattgtacttgattttcagtgctgtttgcagaaagccgggtcgataaaatggctgatttctctcttaaggataaaaagaagctagtaaatactatataatggaaaggaatcgatgttaattttgttacagtataagaggacggtaagcaaatgttctgaagagtcgaacgcgagactgccatttgcaccgtgcgcggtctcttgatctctctttttcatgtcgttaatttcgtcaatagattatgacacccgtgccatttcagcgttgacagctgccgacatgtgccatttggttgtaccagtttaatttcgcagctggttggcagctgtaaattttgctgtcaccataaagtccaaccgaataactgatcgaaactacaatatggagacatctcacatcctcttgtagaggggtagaaatgcacggccaactcagaacatccgtgcagcctcaacgagaggcgccgctgctgcaccggagagaattcagtagtgtgtggttttgttgcatttaactactccaaagactaatcctctcttgcatgcaattagtacaattaagtcaatagtgattcaggcaacagctagctagcagatataaagacggttctctgttcttggctgttttcttccaaccgtctcatcccgctgttatgctaatccaggaatagaccgaaattaattaaggcagtaatcacccagatgtgaaaaagaaaccaactgttccaacttccaagtggtctgttttggatcgaacagtgattggatcatgagctatgaccctttgaaaacttaatcattaaaaataattaaaaaagaaaaaaaacacaagtgtcaaggaattcagatttggcgcctcttttcatcgccatctttgaccgcgcaaacgccgtcgttcgcgaactcccccctcttaaagcccccaaccccctcgtctcgccactcgccacgacgcgacgcgacgcgacacgggagcaagcagcgcgcgcgcgctactccgaaccgaaggcccacgcggcgccatgctgctgggtgccatgagcggcggcggcgtcgtcgtcgccgtcgccgtcgcctacgccgccctggccgtggtggcgctgcggatggcgctgtcgtacaagtcggcgctgtacgcggtgcggcggctgtggcggtgggccgacgagtgggcgcaggcgtaccagtaccacgaggtgccacgcttcgcgtgcgacggcggcggcgccgagaacccgctgttccgcaaggcggcgcagtacgtggcggtgctgccgtcgctcgaggacgccgacgccgcctccgtgctgtcgtccgcgtcgaggaccaacggcggcttctccctgcagcttgggccaggccacaccgcgcgcgacgccttcctcggcgcgcgcctcgcgtggacaaaccggggcgacgtgctggttctgcgcgtgcgccgccatgaccggacgcgcgtgctgcggccctacctgcagcacgtcgagtccgttgccgatgagatggagctccggcgacgcgagctgcggctgttcgccaacaccggcgtggacgggagcaccgggacgccgaggtgggcgtcggcgccgttcacccacccggcgacgcttgacacggtggccatggaccccgacctcaaggctcgcgtccgcgccgacctcgagaacttcctcaagggccgcgcctactaccaccgcctcgggcgggtgtggcgccggagctacctcctctacggcccgctgggcaccggcaagtcgaccttcgcggcggccatggctcggttcttgggctacgacatctacgacgtcgatctctcccgcgccggcagcgacgacctccgcgcgctgctcctgcacaccaccccgcggtccctcatcctcgtggaggacctcgaccggttcctccagggcggcggggccggggacgcggaggcgagggcggcgagggtgctgagcttcatggacggcgtcgcgtcgtgctgtggcgaggagcgggtgatggtgttcacgatgcgcggcggcaaggagggcgtggacgcggcggtggtgcggccggggaggctggacgtgcacatccacttcacgctctgcgacttcgaggcgttcaaggcgctggccagcaactacctcggcctcaaggaccacaagctgtacccgcaggtggaggagagcttccatggcggcgcgcgcctcagccccgccgagctcggcgagatcatgctcgccaaccgctcgtcgccgagccgcgcgctgcgcaacgtcatcacgaagctccagcacgtgtccggggcggcggcggcgccgcggccgccgcacaggcggaacacgagctggtccggcgcgggcgggccatgggaggagcaggccgcgcgcgccagcgcggacgcggcggacggcggcgaggaggcgatcacggcgacggcggcgtgcggggtgttcgcgaaggacgcgccgatgagggagttcaagaagctgtacgggctgatcaagatcaggagccggaaggagggctccagcgggttcatgcccttgcacggcggcgaagcgccgtcgccggcaaacgggcggggcagcgagcacgacaaggagcggtgattaattaggcgatggtagtagaccccgtcaaacaagaaaaatatttttgattttttgtccgtgcttttttacttcgtgttaggctagtaggagtactacgtagttgtagttagttcactttttaattgtggatggaagaaatcaaacacgaaatggaggatgataatgggattgggtgatgtacaattgtacatgaggattgtttggttttaacagggtataaaacaaaagagatgggcaagttgaaattcttgaaaattgcatgtgaaatatgtctagttggaatgcaaactcccaactcccaaagtgctcgcaatcgcggcacccgcgcggctccggcgtagtcagctctgtcctggcgcgcgggagacagcgactcgtcgtcggcgtccagccagggcgagcggcagcagctatcatggagtgcgtgccatttgaaattaggccctctttatttcccaaaacaaaaattttcatgctgtcatatcgaatatttggacacatatatgtagtattaaatatagacgaaaaaaaataattacacagattatatgtaaattgtgagatgaatcttttaaacctaattacgtcatgatttgataatgtgggactatagtaaacatttgctaatgacagattaattaggtttaataaattcattttcctggcggaatctgtaatttgctttgttttaatgcttcaaatgtatatccatatatccgatgtgataattaaaaccaaaaattttcctcaaccaaaaaatagtgcgtctccagccaagccaaccaagccagcgccctgctgctatagcttacaaggtgatagctgcggctgcgggcaacgctatgtcgctcgccaaccaggtccaggtcgggggatgatgggtgggcgtcccactactgcacctgctaaacactattgtgccaatcttggccagcttgttgcttgttaggcacaggcgccgccgtttatatgatgagaccttttatagtgtttgcatttctaaaatggcatagatctaatggctcataataaaagataccttatgaaaggtatcagagatagaaaggtactaaggattaaaaggtaattgataatagggcaattatgtttaacaacgtatggacgtaccgaaaggtacggtgtaagtggatttgaaggtaccacaaggtaccgcgcaagtagtttttaaaggcaacgtaaaatatgatttatgtggtggggacaaaaattacattctcttctattcggtttccaatcttcggcgttctgtttgcgtcggtttccaaactttggtccgatttacgtggtacatatcatattcgcatgatcttgataattatttccaattagtcattaatttacatagcaatttggtgatccatcgtttgatgaatgtaatcaaagatcaaaaggacaacaaaatgagaagatttacgcacctaacaagaacaaaacaagttcaatgagaaagatttgcgaaaaaaactaaaccaatcgtctgacagatcgagaccgtgcggccgcttctagctccggcgaacataggcagtcctggaccacttcctccgggtcctcttcttccgccgcccctccctccaaccaccgcctccggccacacgtccaccgccggccctcaattctccacctttcaacttatcaaagaacacgtaaaccttacatacgaacagaacgtatctaagaacgatgcaacgcaacaggctacgagctaattccttcgataccttctcataccttttcatatgtgtaaaagacacatttgtcattctaatatcatcatatttacattaatgccacctattacaatattttctttccataccttgcccctcgcagatcaacggctcacgtcgccccacctccttgtacctcgcaaacatcgtaaaatccctcttatatgatagggaaagaaattcacttcctattggcggcgattgaattgtttcttaggagtactaaattcttgagaaatttctacttacattcaaaacggcattactctctctctctctctctctctctgaataggagtattaggagtaggacagtaggagtactgatgaatgcgaatcatgcctggctcgatgctggactgatgatgatgagtttaggtgtcgggttgaaagacaatgatagccgctaattgccgctggcctgtacaattccctgttttgattacgagatctctttgtattattgtgcggctgacaggaagatcgatgcacgagtgtatggtccttctgcctttgggttcttggctaccatttgtttcgcttcattcttcctacggagatcacgcgtgtcagcacagctgttccagctcgcgctcgggaggttttcgtctggtgatctggaaagctcactgcctaattgatgtactcgcagttttcctttttctttttctaatgcattttaagggacatatcgcgtatggtccttcgtaatggatcaaatgctaatgctagaagtagcaggagtactggagtagtaaatcacagcaacatgaggtatgctactacagtaaaaaaacattaagagagtgctccaatataatgatttcttaaaataaatttatttttgaataaatgtgagttaaaactgaacttcaacaagcgaactccaatgttgggctttggggaaccttaccatgatgtggaaacactgaaacagaggtcctgtcagtgcaaactggacaatcgcaagaggctttttccccggttataccggaggagccacccggtggccatatggatttcctggcagtagttaccatgcagtcctagtagctacggagtactgcatttgatctcaatccggatttccttcggacaaacctgaaaagccgtgagtgcaagattgcttgtcaggcacatactgacctgtccttctccgttttttatcctgaattacacagcataggccctagggtcagaccactccaggcctacctagttttatcccaccgttacattctaaagtgcagatatgattttccatgcacaattttaaccgtctgttttatttaaaatattttttaaaaaataaaatataggttacgtataaaacactatttatattttatcatctcataataataaaaatactaattataaaaaaatttaaataagacgaataattaaagttggacacgtaaacttatggttgtacttaaaatgggataaagggagtactccactcctaagactacgaatctggacaaacttctgtccaaatttatagtcttatgtcacatctcttaaaatcccttatattatgggacagagagagtattacgagtaggttttcacttgtttgcatgtactcctgggcacttggccaggaaggcaggaactcaggatgcaatgcagtcacggacatgatgagctgatgaatctaatgccttgctgctgggctggacagtgttaggtgttgacggtgaggcttgaccgcttcccccatttatagttggttcacacggccatccagctttcataaggcatcgcattcatacaggtcagctgggggcgtatttagttccaaaataattttttaaacttctaacttttctatcacatcaaaattttcctacacatataaacttctaacttttccatcacatcgttctaatttcaatcaaacttccagttttaatgtgaactaaacacagcctgggtgcaaatggcactccagcaaaccacaatggtgaacgctcggcaggtatatgccatgacaataccagatgataaaacggcaaaatcttttgaagaaagggcaaatttagctataatactgacactgtactaattaacaacatataaacaatatattctggtggtctataaatacaataatccagtctcgcagctcattggttctatactatattggccaagattggcatccatggccatctcaattcttaatgataagtgcggcccgaaatactatatggataccgcagtctctcataaccaccttacactagtcccccgaataaataaatataatcccaagtaattaagtagatcgaacaaatatacacaaacatacataaacccaagctggccatcatcgagcagcctttgttgctatgcatctcaaagagctctcatctcctcaacagttcgatgcagattcccaagtcgaatccatggcacctctcagttttcctcccttcctaaaagcgcacctcaaacaccttgttggaatccgattagccaagcctccaggcatgagccagtgcaggcaaaacttttagtcgcctgaatactgcttgtactaataaaaagaatctggctcaaccttaacatgtcaagcattgtccacctccctagtgtcgattatttcttcgtgacagtacagtatttttagctcttcttgtagctgaaagtgatgatagagatccatcatatataatgattatcaaatgtacatggtgtccatgttaggattaaaattgactaacttcatgggtgccatgtttaatgttcactattgtcctatatatttataaaataggttttgccccctcccccacaatttggcatttttagtaaagtaccatatggtctaaatagaatgatccttattgtaggtgacctcaggtgtcaatacagtgaagaaaactaaacagacatgacttactgacctggacatgttgcagttttgttgtgatcagttcatcggttaatgaaatcattctgcaaggtagaaaggtatgttactgcattgatcatcaggcaaccattggcatgaaaaatagatgttttaataacacgcgccattttttctttcgccaggccagcggaataaatgccgatcaatttttattaagatggaaggagagccatgttacgaacaacaacagagttgttgaggcaacttgccctggtcggtcatcctacagactaaggacctgcacattttacagctcgccgcgatttacaccggcggcgctaaagcgagcatcactatctagactactcccactgccttaaacgtgtcatgttcaagtcttgatttgagcataaaacagagcataaacataatactatggcagctatatccaatagtttgaggtttgccagtttggttgagttatgaatacaaggcaatgttttggtagctggtaacattgaataccaggttggaaattcatccaaaagattaaactgatggagaacaatgaactcttcacaaatgcttcaatccatgcacccctctctaacgtggaggctccctttggattcacacatgttgagttgcatatgacttatgagttgcatgcaccagccagcttaatataaagcttaagttgatgaggaaaactaagaaattcacttgtacttcaatggtacaaggtggtgacctgagtccgtgacgactgggaaagcatggttacggtagaggaatgggcataagcaccacggatgtaaggatgcaattaccacccctaaatatcagttgcaagtaacaaacctacctagattgcaattcaaatattttgacaagtaatgaccgttctccctcggaaatagacgtttcaacctgccaaatgattgtgagcaaactttgagttaatgaacatttggtagcagtattgagaattctttgtacagactatgtacagactaatagaaaagaatgatatgtgggaaaaattttgacaccaagctaataagcttcttacctctgtatcaccatccatattaccaagtctatactgtgttgctggagaaaacaaacgatttaatcgtaaataaaggcgaaaaaaactttcagcaaatacagaggaaagtatttaccgtcagctttctcattctgttgcaagctacttaggaggtttgtgatgagatcctaagtgaaggaaatggagaatgtttagtttgccaaaaactcaaaatactgcaattaattatactgcccatacttagaggtcactagattaagctactcccatacttgctgaaatgtggtctgctgtacaagattccgtagatggggaatcagaacggacgcagatactgaaccattgcagagttccttccgctgatgactattcgactgcagcatcgatgggggaaaaatgttatctattgtgaacaatcttaaagcatggagaaggcacaagggcagtggaaactgtataagaacaagaaggccattgcaattgcatgagctgcactagccagagatatatagttctgtagcaagtgtcactgaaaagaaaatactaaaatgatatgttaaaagggttgaaccttggttgcctttctaaatcatctagtggctcaaaaatcggagataagtgtcttaaatgatatgaagaatatactactagtattttcagaaaacattaagatccagacaatgacatgacaatagaaacagaagtacagaacaatgcccttaatcaaaccctagtattcaaaacttgtaaggttttattcagatgcaggaaacatttcactaagaaattcccaaccagcattctctccaagaaaaaaaaaacagtttttgtctgaatatcaaatcacagtaagtaattagtttctacaagttggtacattattgacattgaaaagcttaccattggcttagcatccaccggccaatgaccaacgctggctgattttctcagtgaagatccctgagcaactcaagtcatgacacttgatggctggatgtgggttttgaagtagtgtagactgtagagtacaacagagctttcaataaaatggatagggcacaaattcttacctcctgtaatttgcgtgaaatgccgcttgttggaacttcctgaacctgtcaagtaagattttaattagtatcccttgtagtgatcttgctcagtctggagcacaacctattgaagtgtatgctcagaacgaaacctacctttgcaagatccacattctcagatgtcactgaaaaacgtccttttatctccaccacactacgcttagacttatctcccaaggagcccacatagcctgcaaataacaggcagataatcatatactttccttcagttcataaccacagtgaattcaaatgatctaatttatgttacaaaagtctgtaaaccttaaatgtggtcatttgctatgttaataatattaacacgtgactgctgtttatcatgtgcatccaaaaaagtactggctgcttcctacctccagaagaccgaataggagcagacagactatttgcagaagcacgagtagggagtgcaagaggaccactgagatttgtggttctttttgtacaactcttttgtttatcagatgccaacttaactgccgcttccctgcagcaaggaataacaataaccaaaagtgcttttaaaatgcaaatgcctttttgagcaatttgtttcagcaaaaaaattatgaaacctcctaacttcataacagtactcacaggaaactcaggtatgcaaatgcctttttgagcaatttgtttcagcaaaaaaattatgaaacctcctaacttcataacagtactcacaggaaactcaggtatacaaattcaagaagaataactactaatttgtttctataaaatcaattattgcatgacctaagtcaaacatttaagaactaacgacacttgaaagctcaaatattagccgattttaagggggaaaaaagcatcttaaactgtaccgtttcatttctgaggcatattcatatgtaatatttcaaacaggaaagtccaaaaaaaacatgcattaaattattggtatgcacaacattgtagcagccaagtaatattaaaattggaataggaaaaaaaaacagtgaaaggcttacctatcaaaaatgcgactgctttcagttattgatttattatgtacaccagaacacagaattgggccagagcaagtcctttctttttgtttaacttcactactactgttttgtccttcagaatcatgttttgatgtagagggtaacgattcgttttctgacccttgttttctatatccatcaactttcctttcactatcagcatcaccaggttcagaaaccaatcctctgcttgtctcatgcatattcccccctggacttactgcagtgacacaagtttgttcactgaaatgtaacaaaagagtggaacattatgaacacactaccagtaacacagaaaagcatgcatcaaggctcactgaatctttcgcttgttttaatttataagaccaaaatttcaccctacaccacataaaataaaacttgaatcctatatacttcgattggtgatgttgagaatcacaagctagggaacaatatagaacatctatatcttttaaagaaaacattgccacaaaaaaatattgcatactgattcaacctgaagtgctttccactcaaaatttttggttgtccaaaatgattgccagaaaacggctcctgcaaacagagcaatcataaatgacttgaaacagaatcatatttggtacataattttgtcttacttacaagaaatcaataagctatgacaacatggtgtgcaaatgtttctgcagcactcagaattagcgagaaacaataacaggatcagaacataagcatcttccagatttaaacagaagcatttgtggcattacaaatgaccctgacttttcaaatttgataaacggcaagctcttttctgtgctttgaagttaaacatgtgtgatacttcttctatttgacacactagataaagttttctcatgatcccatctagctacagttattaccctgtcttaccagaacgcaagcctacgtctgaaacaaaatcaagtcgagagcagctaaccttatcagcttcatttattctatcattgtcaacatcttcctttatttcaggtggatcatcatcatgaatctgcaaaaaggttggaaatctcacttataagactaaattacagtcattttacatcttagcaatgtaacagaatgaatcagagagcaatgtagcatttcgatatagaactaaagaaactggttgttttaccaatgatgcttgagcctttaaatcctcaatatcgaagttccatgcgcttacgcctctttggtactcactctattagataattcagatgataaggaaactatcatgtaagtgaaataaaagtgcaaacatatctataataaaccaaactatgtttatcatgaatattagtttgtatgtggaacagaagtgcaaaaatcattagggtattacgtccatggagctaacaagtgaaagaaaaatagaagttagctactgcctgtaaggtggactagctaaagtgatctctcgtacaaatcattgcgttggctgaaatgtgtcttagacatcatattcttagcataaatatagtgacaccatagcatacaagtgataaaaaaatttaacgtcattttaatttttaaattaaaaaagcatcaaacatagtctaatatgctgggatcttaaatcattctgtgctagtccttgttcaaccaataacatatccatgcatgaaagtaataccacagttctaacttcattttgcaagggctgggatttgtgttactgcaaattgaccctggccctctacaaatttgtttttaagctgcatctactgaccaaaatcattaagactggtatggtcagtgataataaattaaaaacaaagcagaagatttgcctgtaaaatgaatatatataataccaccataaagcctatttcagaagtttgtgggtaaaataaactagctagcatattttcatgaactcaaatgaaagaacagcacaaaacaaagtggaacttaaaagaaacatcaaaatcacaaaccatagaaagtgcctcctgttcagaagaaggcattttcttcaaagctaattgtgctgcatcttttagctgcaaatgcacaggataacaggaattaattaaggcataatgtttccatcattaagtaaaaacaaaaggaaagtaaactagcaaaacctggagcgcttttacacgatcccacagagggggcaaatcagttaaaatactcttaacagtcagctctggaggttttgcgttcttgaaaaatgagtgctttagtaacttttcagccgttggcctctttgtttgatctttgaccaggcacattgcaaccatttccttgaaagactgataacaactgaaaagccttcattaggaggtaaacattgaggctaaaacaagcagatactgccataaaacatagactcgctagccaagaattagctgaaaggactagtactacctttgagaatcttttatcacggtcatagtcaaggcctggtggtgcattttgaagggtcatgagaagaacctacagaccacataaacatcctcagattctggcaaaacataaacatcctcagttcagcagaaagtttgtatttgtaggatcctaaacccaagattgttttctatgaacaagaatgttctacaggcatattgctaactgcatggataacgctgttcatcggcagtaactttaaagtccaaacaagtaatttcacgagaagaatgtatgtgcatgtagtatatggaattgtatacaaatgacagaacatgtattgcaagtgcaaagtacatatgttttctagcccaacatgacatacaaaaatcacaaaaacatcatccctggcagcaaacactaaccatgtgaaaatttgaatataagacacatagatatttggctgaccatgcacttgttaattagactgtcactctttttcttttaataaaaaggtttcaatttgcaaaagataaaataattcattgccttcatgggaggatacttcgagaagggagcatggccatgtgctagctccagtgcagttattccaaaagaccatatgtcagctctgtacaaggacaaatagttgtgagcgcactgtgcacctcaacagtacaatagcaaccaagtaaaatataaagacatatatagtagaaaatacagaatgtttgaacacaagcagcactgcagttacatgttgagtgcaacgacagaagaaaaaaagaatgttttagttatctgccaatggttcactgaagcatttgataccaaaatataccttattcccagtatttttatggtagttagagttcttacccttaaggaaattttaaataaccaaattaagttggtaaacaaatggtttgaaacatatttcctggtaaaatattttaagaaacacaattttatctaaatattgaaattaatatctaaatattgaaattaactttttcaaaataaccaggatactggtagctaacggaacaaggttatgctattaccaacgtacttgaaattatatcctgctccaggctggagaacttctggagccatcctaaagaccaaatgacagcagaaaacacgtttaaaggtttgcagaacacttattgtacatacaacagagaaaacgtaagaaaactccagttaccagcatggtgttcccacgaatgtattcctggatctttgtctatcacctctatcaaacatacaagcagagacaccaaagtccccaagtttcactataccaggactgtccataaggatattacccgcctgtataatattacgctgagcaaagcaactgacaaagttagctaaaatgaatactactgtagaagctaaccttgacatccctatggatatgtccttgccgatggaggtactctagagccttaagtgtttcctttaggatagaggcgataacaggctcctcaaaaccatcaggatatgcaaccttcatcaggtgtaaacatgaaccctctgacatgaatggcattatcacccagaggttatgatccacaacaaatgagcagtaagccctgatgacattagggtgatctatcaagctcatcgtttgtgcctcttttcttatatcatcctgggtacaatatgtatatataccactatgagatgctaaatacattattgaacttggggagaggatcattaagagacctcaaacatcagcctataacagtaaatgtatataattaatttactgcaggtaatattcatgaatcctactacttagcattaagatagaaagaaaaatagacgcattcatgatccaatgcaacaaaggtgaaaagtactacaagcaaacaagctataccacaacgtcctatacatctaatttactggatcagtaacccaagacaactgcatgtcatcctataagccgcaaatgcactgcccggaagaattaaatgtaggcctttgtgaagttaaccatccactatctatgaagttaggccgaggatgaattaaagtgcccatggataaggaaccccacgttgtctcgatatagccacaaaacctaataaaaagtaaccgacaaaatgaacaatacgaacgatcgaactaaaaatttgctaaaatgaatagcataagtgagtggagctaaatcccgactccgcaaagcacagttaccacaacctaattcttaagttggtaccacgtcaatactgatcaatagaataaacaactttaattggatcaaattgtcccaacttgacacaacacacacagctcaactgcatcgaatcctcccctgcacgaccgcatatcccccgatcaaaacagcgatcaccaccggaatccctaggacacgaacgagtgagggagtttcgatcgagagagagagagggggagagaaagctcacgaggttactgttgacacgatcgagatccaggcacttgacggcgacggtccggttggatggcaggaacaccgcccggtacacgacggcgttcgcgccgtagccgacctcctccagaaggcggtagtcgccgggcgaggcggtgaaggccgtcggcaccgccgccgcggcgggcgacgacgacgcggccgtccgccgcacactcccgctcctcaccatggtggccccaccccccacgctgagcagagaccccccgccgtgccgccccccacctccggcgatcgccgtcggtcgttgactcgtgtcgcgcgtacgagaccgcgggtggactggtgactgaaacgaggaagagaagagagagagacgatggggagaaaagggtgggtggattttgggaaagggaggaagtaattattttggcgtgacgtggcgggcatggggcccgagaggcgggggccgtatgagtgggcgtgattggtggataggctatgacatgtggacccgaaggcgtgggtcccgtttggcagtgggagtgaagagatggtggctgtggggtagcggagtgacatggggcggcagatgccgccgactgtctgagagatctccgcctcccgatgttggtctgtgactaggatcgtctgcaggggcttccctgtggctgataacgtttgttgagacaaacatggcatatccggatgcacatcctctgcagtgggttcacacatcagtgtctgctactgtatcagcagtactgcaggcaatccccgctagacatatctatatcattgcgtcaattaggtttttaaggagtatacttattttgtaatagaggtagtagtacaagctacatccctatcaaaccagacttgctaactatgtggtgaaagtttctccttatgcattcgtagtaatatattttaaggatatctgtatcgtataatttatatcattacgttgtatcttagtatactattttatctctgtggtatgttgggaataaggttcaaataaaagtttatgtgtcttttcaagtgttaaccaccccgtagcatgtcttcgtcatttctttgtgtggttgtactgcatacatatgtatccccactgttcatgacaaaaggcatcttggttttttttcacaattttgcagcccaatgattgtcttagtacctgtgctaaggacgaattatcaagtaaatatagtagttatcatatgacattcaaataagaaagataatatatgcaattgataattgtattacatcttgactctgagactaagataaagaaaatccccttgtaacccatttgtaacccatttacttatgcctctctatatactcgtgttgcacaccatcttcacatgaaggtccttattggttggcaatatctcattaattattagctcctaacaaataatttgaaagtaaaacttttatctatatgtgagtatgtccttaacgaccttaaaactaatgttgaaaacgaactacgctgaaagtattctaaaaacaacctcaaaatcaagtactaaattttaaattttggcaatgctttattttttataagggaaacaataagatcatagaactattaaaaacacatacaactcgacggccacataaataacagacgcatcgtcttctccgaatgcaaatgttctgcattcaaggcattcaagccaaccagactttctctgcatgcaaccaaacttcctctgcatgcaatgttttgcactaattatttatgaaatttcttcaaatcaattatgcgcttatcaattataaattagaggaaatacatatttttaaaaaagtaattcgataggtggccaatattcttggatcaactagtaaattacttatacacagaaatatcctttttaaggtacacggaaaatatttgacactgaaaagagaaaaggggtagtaaggcaacgaacccacaaagccgatgggcacagaggatccgcggtcgtcgggagcagagcaggctagcgtgtgccgctgcggctaccaagccggtaccacggccgaggacggctcgtacaaaaacggacggactcgccgcttcgcgggcccaccttcagccaccgtacgatccaaaccagcctcatttactaccaccctcgctggggttggtttgctgccgacatacgtgggcctacgatcctagatgggccggccccactttgacagctactcctactctcatgggcctagtacccaaccaggccaccagcccaacttatatcagaagacaagtccaccccatagcatcatcgtctccgcggaaccacgcctcgtcgccgccgccgccgccgccgccgccgcgcgacgtcctagcttcccggaccgcctccgcgtggttggatccggcgagaggggagaactgttgtgttccttggaagcgggagctggatgaaagctgggaggaagaacctacggcgggcgtgcagcgagggcgccgtcacgctgggggagggcgagagcatcatgcaggtcctcgcgctgcgcggctccaacgtcatcgaggtaggacaagctctctctctctctctctctctctcccacctccaggtctcccctgatcgtgaattcccttgcactccattcgtatgtgttccttatcgccgtggcttgctgggtgttaggtgatggacgccaagggagtgaagtctctggccttgttcccggccaagttccagaagagcttttggatcaagaatggtgagtggtcgccggactttagcatagctggtcactgctcccgtagtgaaccgagctgtcttttgccgccggtttatgacggtttggttgtgggttatgtgaatttgcagggaattttgtggttgtggatgctagtggccgggatcaggcgctcgaatcagggagcaagatagcctgtgttgtgtcccaagtcctcttccatgaccaagtccgggctatggagaaatctgaggaatggtgagttgcttggttctttgatcgctgagagttccctagtagtactaacaatcagggttcagggcttccgagtgtatacaagttgtaggaaaggctggtactggatatcaatctgtgaccaggggtaacttttgaaattgtttgccagtagctgcagattctgcatttaatatgcaaaatggcaacaagaaattcttgtgcaactttggttgaggtattttgcctcatgagtcaagaaattgtcaccgatgtatttgttggtgtaaccagcatgaataacctcggttatggtattttgactcatgagtcaagaaatgtcaccaatgtatttgttgttaacggcatgaatagttttcttcaagctatgctctgtgttgtgaccttaggtcacgaacaagatcgggtataggccggaaagaagtgttttcccgcctatccttagaaatgagctcaaacagcaaacacaacctttgaggattacttttgtattaaaaatgtcttgttgtgctacagggatttgaccggcttttatagcctacggtcttacatgtgatgttacgtttctaccctcatgggctttagtgaacttcctataatgcccttgccatgtcagcaaccctaggggtactacagtacattctcggggtcattatagtcttttggctccagctggcaagggtggttgagaagtggcccccacagaatcttccattcgactggatcttaactcgaataggtttttccttcgagttctcttagccgaatgtcttctatgcttgagggttcgcacatccttcatcaacttcccgatcgccagattcacctgccatgtacttagaattcatccccaatcaagatgagttacatataagtgataagaagccactcgagggtgctttcccactcgagagtattttccaactcgaaagtgttttcccactcgagagtgttttcccactcgagagtgttttcctactcgagagcgttttcccactggagagtgttttccttgttttacacttaggaactttccataaaccatcttaggtgtttcgaccggataagagggagggcgttgtccccctgttacaacactctgatgctcatacaaaacaatcagatttaagtgcaatatttgctccttggtttcaaaagcatttgtgttgagctgcgaaatacaaagtaacgtatactgtttttatccctagtttcatctagggtccagtgttagtgacattggtttatagattgtcatggaactaaaatatccttgctgtagtaaatgcttgtgaagagttctgcagaccattgttttaaatatttgaattctctggcaactttggattaaagtcagttgcctgatgtcacctttgcatttcaacagcctgaatagtttgctcaggttttttcttgatcaaatatccatgaaaatgatgtgaggaatctataacaataccacagcaaaactaagacttcaacttattgaattcatcagtccccgtttatcatgtaaaccgtcaggttctctaagaactggaactataggtttaattatatgttagtcaaagggtggctttactgacatcttcaaactggctctctgatgaattcattattttcgtacatactaggccagctatcttcaagtcaacttctaaggaaggttcagaagctggaacacaagaaggaacaaggccacagattgaggaggaaccggattctgatgaagatgatgatctgccaccgcttgaggcgaacacgaatagacaaagaccatttgaactgtatgccgactcagagagtgattctgactcttagactagtttacatttgaacacgccattgatgatgttgtggtttgtgatggaaaaatacacccggtgtacttatggtcaagtcttacattctgccaaaaactgctgagtgtcaaaatattctgaagaagttcgatgtcattcagtagcaggcacaaggcctttcacttgaaactatgatcaactccatatgttgctttttattgttctcaatgatggtgcattaattgtctggacacagcctgatcaacatactgcattttctatcaccggttcggaattattcaagcttgttgtgtgtcagctgtttggctccaaagcttggcctgtttctcaattctgcagatactgctagctgtcggaactcctaagctagagctgactggccaaatcgaatgaggagttgaagtatcaaagtcattagtcataagcgtggaaaataatccttcttgtgacgaccttctggatgaagcgacggcgtggtaagatccagcttcgaattaaattgttgatttgcttatgctgcaatttatgttcacgatcatgtctgctactagcaggataaggccccaaagagaatttgattttattatgggtttatatattccatcaagtctaattattagtcagggagtgcgtctgtatcggatgagttgtgtcaatgttgagttcttaataaagaataaaggagttctttttattaataaagaacaattgacactggcaacttggcaagcacagatgagttctttttattaaaaaaaaaaattaggactggagcattattactggtaagcatgtactcctgggtggtaccgtggtagtagtcaattacgagaaagtttcaaagaagtgaaatttgcaaccagcagtgtggaccggctccttttctattacgcggatttggttgagatttcggggctttttggacttttgtattgcactgcagatttccctacttgcttcacagtggtttcccagattttgcaaccaaaccatcccgatatttttggatcacccgtataatattcagtcaatctttcggcgaaatttgctttggcaacttggtctctgctgttgttcacgattctattatctatgcaaagatcagtgtcacaaaattcgttggagaaggcaatttcgttgatcgatcatatgtacacactctttgagaagatgatgtgaaatcttgaactaaaaatctacaaaatttggacattttacacttgaaaggtgaaagaaaaaaaacgaaagggcgtcctcttggtggccgtcgcggcgagcgggtcaccagaacgcccgtttccgccggaatcgcctcgccgtggcgagaagtccgactccgacgcagacagcccatgctcccatctccagcgcccacgtcaacgtctccgcctccatctccggcgtgtcgagctcgccgtcgtctccgaccacctcccactcgtcatccccgcacgtcccgcactcgcagtcgcacccccacccttcctccggtatcccctccagcctcgtgccgccgcacccgagccccctcgccgacgccttcgccgtggccctcatcagcgcgccgccctcctcgagcaccacaacctcggccaccgccgccgccgcagccgcacggcggcactcgacgcgccaccctcctcccccgccgcggcggcgcgagaagacgccgtccgccaccagatccttcccggcggcgtacacctcgaagcgcgccccctcggcgacgcagacgcggtcggcgctcgcgtacgccgccgcgtcggtgccgccggcgcccaccctccggagcggcacctcggcgggcgcggccggcgggagcgcccgcccgccgagctccagcgcggcgccgccgatggccgggaggtagacgagcgtgagctcggccggcgccggggacgagaggcggaggtagaaggcgcggacaccgaggcgcgcgcgcgcgcggatggaggccgccatggcgtggcggccgtcgtccaccgtggctaagcacattgctgctgccgtgtgctggatgcgattgattcgcggaattccgtgggtgtgtctgtgtgttgtgtcgcgtgggcgcgaggtggagagataataaagcgaggcgggcgggaggaggaggcgggagatggagatggggatgcggcggatgcggagggtggatcggtgggcagagcggctcgcggttttgggcggtgcgcacggggttttgtgggggaatcagtggtgtgcgcgtgcaggagcacacgggtttgggacttggggtgctcaggtgggcgcgcgtggggagatgtccctgggttggcttggatttgtcattttccggttgctactagttgtgctagactacagtgtttaggaagcgacccgccgacttggctgtcaaccacgccgaagaattggtggctgttagctgacgcaaatggggggtcggaaacgtgtcgcgatctgcaatgggttcgtgcgtacatacgcgagggcgaggcaccacgcatcagtccatgggatcgcgctcctacgtgggttctacgtgtacccacgtccctctggctttacgttaagtcagaggagactcatctcagtacatgcgcatgacattttttcttgcagtaactcggtaactttctaccagtttcatgtgaaccgagttaaccgtggtagtaccatcttttttaactagtcgtgctgattgtaatacacccccttttgaaacgcactgtaggaaacagtaagaggagctctccaattactccatcacatcaaaaatctatttatattattaaaggaatagaaaaaaaagcctccacgttcgctctcatggtctagaaattctcacattaatcagagaaaaagaaaaagcagagttcatatagaaatacaatttagaaatagctgaaattcggaattaaaaaaaaggaatattagaagaggagactagagtacacatagaaataatttagaaatagttgaaattcggaattaaaaaataatgaatattagaagagtagactagagtccatatagaaatacaattaggaaataatagaaattcggaattaaaaataaagaatattagaagtagagtatagagtctatatagaaatacaattaagaaaaaaaaataaaaattcggaattaaaaaataaggaatattagaagtagagtatagagtccatatagaaatacaattaagaaaaaaaaatagaaattaggaattaaaagataaggaatattagaagtagagtatagagtccatgtaggaatttaaaattaactaaaattcgaaataaatataataaaattaaaagtatagtttagagtccgtataaaaatacaatttacaaataactaaaattcgagattaagaaaaatatgggaagaagagtttagagaatattgaaagatgagtttagaatcacatagaaatacaatttaaaataataaaaattcagaaataaaaataaatattattaaaagaagagcataaagtctatatagaaatacaagttacagaaaattcggaattaaaaatatatattaaaagtcgagtctagagtttatataggaatatatataatttacaaataattaaaatttgatattaaaaataattaataactaacacgtatataaaatacattatgaatattacccattagtagttcgtaaagttattgcaaaatttaaaattatgttgtcattttaatatatttgaataatatattgagaaaacatatatgctattatatgagagaaaatataatgattcgccaccatgctagttgaactaaagaaaagttctccaaaaggtctaacatcttaattaccttttgaattaatctagaaatgcaatactaggaaaattttcatatcctcttattactacgtatagaacggttctacaggtaagaagtccttagcaaatcgaatcctccatttgaatagtactcgtatcaataatttcgtggtcaagaacacgaaatgatactcctataaatcattttaggtcagaaaagagcctatgcagtcaacagtgcgattcctgttgaatctgcaagatagtatagtagtcaataatagattacacaggagcgcagcactccacgttacaatgcgtgctctactatccactgcgaaggacgcagcgcgactcagctaaaagtttgagcctctaccatactacaagccatattgggtgcaatggcaatgtcaggttcagaagcagctgcctacctgacccaacctctcgtcttgttcacggctggttgctgccttgtggctctggtaacaggacccgtcttgtgtgtggcagcggccgtctttgaagttgccgtcacccgtcctgggttcttcagcggctcggtcgattttctcttcagccttggctcaccttgcaggctcctcttccttgaagcattctggcttccaacaggctggttctccaattccccaccaatcgatgaattccttgcatctcctttcctcttcttctcattgacaacttctggagccccaacaatggaagaattgttggtgactttcttgttcatagaatctgagcttctcagaatgtgctgctccttctcgctcattgcttcctctcttgtcaagaggtgcgcctttgcctctccaggagtactagcaactctcatacagttggtcgagtcaagtatcatgtttgtgtcctgaagtgttgtcctttcttgcaagttattctcaagatctcttggctgaaatgtggagaggttaaagtccacattattttcacccctttactgtaagaatgggcacaatgtagcagttctgagaaaagagcttaccttgatctgaagcatagcctctgttctctgtgtttccaggagctcctgtcctatttccattgcctacaaaaaaaattcaggatgatacaagtgtcaggtaggttaggaaatatgtatattagggtcagagacactagccacatgttacaaatcaccttagattctgcaactgatcgatggtgttcttgttccttcaacttgagctccagctcctttatctgaaaataataatataacaataaagctatgtatattagggtcagagacactagccacatgttacaaatcaccttagattctgcaactgatcgatggtgttcttgttccttcaacttgagctccagctcctttatctgaaaataataatataacaataaagccaatccaaacctggaccttttcaattaatagccactaacagtttaatgttaaatttgaactgcaacctcagattctgattgctgctggagtctaagtttatgctctgattcctccgctatctggaaaataaaaaaagaatgggtatatgtctagagtttagtaccctgtgcactacagtagctacta

SEQ ID NO: 16036 - DNA, 1378 bp, Oryza sativa
agattttggcagttatcttccagctttctcaaggaatcatccttaagtctgatatcctgtttagccctttcaagctggcatacattcacagaaggaaaagtgtggaggagtttatgtcattggctcagtttcaaggaggttcagatagccagcttgaaaggaaaggcagtattattgacacttaccatctgtttgaccttttgaagttctgcagtgtcaacctgcttctttgctggacccaattctatacgacgaacacgacttgcaaagttcaatgagctcaaagtttctgacacatcgttgttggatgggctaatttgcacaaacattaaagcttttgagtcccctcctattatcagtatgaagaagcaccaaaagagcaaattaatgatgtagctaagtgaaagacacacacgataattgctcaaaaaatacatagaagattggaaatattgaagtgataaattatgaagatggttctcttccagaagaacaggtcaggttacctagagaatcttgcagcaagtgcgtcaactttgaattcctgcccagaaaaggaatataaacagtgagaaacataaactgatgggttaaacaatattcctttatgaagaccacaaacctgtagggaatgtgggaatttttcgttgcaagagctgaaatcacatcacccaaagcagaaagtgatctgttaatgttttgtgcttccttaagcctttcaccttgcacatcggtcttagctaatcgttcacttccagccaaatctacaagccaaagcttacttcttgtacattctccattcatcaggttctccgctctcaccatgatgcaaagcatactgaggtacagatataaaggtcaaaacattttgaccagaagcaagtactctagaaaagaaaagaataataataaaattttgaccaaccagtgggagcgactgctgtgctcattcacattgtttgatcctacagcccttgcattgcttccagcttgcaagacatcccaaacctccttgatgttctcaactttggcctccacaatgccagggacatgatgggacccttcacttgcctgtttgatttccaacctaaaataccaagattacaagttatcacaggatggcaatattatggaacccagcacagatcctaaaagaaacggtcatacttcttagacgaaggggatgatgcaagcaggtctctgatttgctcattgtagacctcaagcacgctgacagaaatgctgtatgtgacagtctcttttctctcttctgcgattttgaacaactcctccagagttctataatttactccctgttcctctcagttccttccatggtaaaagtcttccctgctcctgtttgtccgtacgcaaatat

SEQ ID NO: 16037 - DNA, 13372 bp, Oryza sativa
gtcttcttagctgctccaccgttcacaatagcaatgtctccatcttttgctccatcaaaatccactgcacatttgtaacctgatgatgtctcatctttacttaatgggcggcaacgacagaaaaccctgatatttcctggaatggcatgtacagccagtcagtagaaagaaaataattatatatggcagactagaaaaaaaatgtgaaagcaccataatacagaggagaagatcagaagaggcaggcacctttggtctcctcaacaatattatgaagtttctttctcttggccatctcttcatagtacttcagtttaagatcttcacactgtgcaactgcagcagaaaaaaaatgcttacaaactttttcattttaaatgctctgaaacctttacaacaatgcaactgatggatattacctaatgtttgaacagctcctatcatcttactcagatcaggaacagcgtttgcacagtcatgtgcttcaagagataacagtgtttgctcttgtttcatagcctgaaaattaataagtgatataatcagtaaaacttggcacgtattgtatttatcaattcttgttgtagcattgcagacagtaaatctgcttttaccttgattttattttccaagttagatatggcagctgcccataatttcttggcattttcatacttctgggaaacacttctcagttgatcagcttgtctatcaacgacttgttctgtcaggaatgtagaacagcggtgagcatatataaacatttaggaaacaaagttgattatcctgatagcttagttcataccaatattatcactttgcatgaccttctgatgaagctctatcttaagtctctcaagctcctgattggtagattccactgaagaccacgccatataacattcatcagacttcatgttgcactggttggttagctcctcaatctgtttctcatactttgagattaatttacttgtcctggtctgcattgtagattgatatgtatcagtattacaccaaatatgattctgtaactgtttgtgaaaatactgacctgtaaaggtgaattccctgtatgagctgaacatcttttgcataagacattcccttctgtaaccatgtctgtcactgcaagttcatgattaaggttatcatgctgaaaattagaccttgaaggagcaagttgcatctaatatcaatgtcttacctgccattgctaccctttttcgaatacagatgccacaaaccatgggacttccccttactcctttgaagtttatgacaatggcactgtcactctcaactgtcactctaatatcacgcacctgaaggggtctgttacctccaaccaccgcgtacacatcaagttcagacaaaatctgcacatcaatcaaaagtcaaattgtttagctagacatgaaaataaatcgtgatacaaaactaagagtcacatgagtcagtgtgtttgccttttcttcttggacaaggacatcaaatgctctaattccttttggcccataagtgttcactatctcagcaaaatgcagatctaagaaatagtctccaggagcaagaccatcgattttgtagctgaaatttccatatcgagctgagtggtaaagtgaaggatagtcaccaccttcaactatatcctcagatgtctctattgcatcccctccttcaaagaaagaatcctcagaaagctttgaagagggttcacaaccttcagttgcactgccaccggcattaatgaacagaacagagtcatctgtttcatcacaggcacaagaaggataataagaagcactgtggaactacgatgacatgaccaattaacatttcgacaaggtacttccaattttcaatttagaattcaagattatgaaatatccattttgaaagcacatgactgatgatggctatcgaagccccttctacttgatattactacagcaccacagtcgatgcaaccttgtactctgacatagaaacaatcttattttcttcaaccaatccaatgcccatgactttagtactacatgatgtattattcattcactctgagagtatcaaatgtggccagcacactgatccacttgaaaataggctaacatggcagagaatcaagtcaatgaagaacccacaattttaagcagagaaacagtactctatcaaatattcaaatatactccaaagagcctaaatcgacgcacaaaaactagagcattatgtgaatgattccacacatagctgattcctgttacatggagaaccttattaagctcctagcacagcacaacacctgaaggcctcaaaattgggattgcaactttgataccaacacaggtaacacaccagaaaatcccaaatctgggcacatccagcctcctaaatttcctcctccacacgcacacgtgcacacacacaagaaaaaataagagcaaatttggaagcatactttctagggttttctgcccgagccaaatcgagtactctaattcgaccatcctatacgctcatatcccaagaacccccacgcggagttgagagaaacctaagcacaagatctgcaccctggaaatctaatcacaaaccaaagggggaaaaaaccacctgcacggcagtcgccccgcatcagcccggacagaaccacgcgtggcccgggcaccaggatcatggactccgccgcctcctgcggcgaaggggccggcggtgcgggcgcgggcgccgactccgcctcatcgtcgtcggcggccgccttctcccagcccgtggtccacgagaagtccatgggggtgggctcccccgggcaccgctcctcctcgccttccatcggatccgcgagttgctgctgctgctgcttcggctgcggcggcggcggcgagcgagcgagctaggctagggtggcgatttggttgggggagagatggatggaaatggggatcgatttggtgtgcttcttcttcttgttgcctctttgtgccccgcggtccgaattcgaactgcggatagcaacggcgaccgttgtgtgcttttgtttgtgtgtgggcatcctaccgttgcatacggtgcgctgcgcgggccggcctacccgcacatatgaggcccaattaatctgcttttcaccggatgtaataagtctattttgtgctcctcgttttcttgctcgtgattgaatcgtttccctcacaaccgcaataccaggtataacatcttcattttcgaaaactggtgtaaatcgcctcctttgatgatttgagaagtggttttttttctgatgtagcaagttgactacacttgactcgtttagatgtgaggagaaagatgagatgaggtgaaggtcactaacatgtgggtcccacccaacttgtcacgtcaacataaaccatttcctaatccattgaaggaggtgatttatgccggtttatgaagatggaggagggtgttataccgcgtttggttgaggaagatgaatcagtcaggagcaaggcatgacggactcgaatagacttatacctcgccatattggatggcccaagaggccaagattgcccacggggctcatctttttggcccaacaaaatgtgcacatttgctcatctctccttaataaggccacgttcttcggcttggtttggaagaaaatttttcataattaaatattaacaaatataaacttgaaaaagggttaagttgctttttaaaacaacttatatataaatttttttttgcaaaaaacatcatttaacaatttaaaaaaacgtgctaacaggaccttagtagctgcatgtctttttctacttgtaacatacaaattgatgaataaccactctacctaaaattccaaaaggtacatttttaaataaaattttctatatacgtttttttattaaaaactattttaaatatatttttcttaattaattcatttgtaccaaaggttgtgggtcttatatatagacaaggccaggatgtaaaatattttcattatttaaaaaaacaatttttattattcaatgattcattcagctatttaatcatttatttacatacgtagacatggatttctgcacacgacgcacgaacggaaccacacctctgttgccatgttgattgctcacggctattgcagtgtgtgttctcacgctgcctacttttatattggcagatgagtttagagtttactccagactttagagtgatgctgtacagccagtactttatgcagaatccaatcatcagagaatggaccaaatttgatcagaggcagctatccttcgaaagcataaagggaaggctagctacaaatcacacttgtcatttgccaagttggtagctgtcacatacttataatgtaggagtacgtactcctaggcctaggtaagtgatcgatgccggcagatggagtgaatgtgattttttttttctctgaaagaataattagggattcttttgaaacgtagcattgaaaaaacgaagaaataaaacatacgagatatcaattaaaatgcaagtgcaaattacagaattgcataacgcacgaaaaaaatatacaggagcaatagtttgagtagaccgcagaaaaaatacaagaatcacttgaaagagatagactcaatggatttttcccaagagtttggaactttgactaacttccttcaaaatatgcattattccatgaatttttggaggaaatgataggatttactcctttgttttaaattccttcctagatttttttgctataggattagaattcaccaaaattcctatgattttcatacaaatcaaaagaggtccttaatctgcaaaccattatactaccttttatgtgaaaattatctacctttctgtgaacaattccaatgatttttggattgtgtgcctcaccacataggagtagaaagtagctgacgatgacatcatgttatctatcaggaaatgcaagttccgtaaagaaagctaagcacatcgtttttgttttgttctcgtatgtggaggtgacctcttctctccttcgacgtaattaccattgtctatgcgagtgacgaacaattactttgtaatgtcctagataagtagagtcactgtcatggcgcatgcagttgcagtgtagattgccattgacgccgtataaaaatacaatcaaccacgcttccatcactcgtggcatcgactcatcagcccccagaatcaaacccagtaaaaaaaaactggattaagctcgatggattagatgattaacatggccatcagtaaaaaagttaaaaaaaataaagatgaacacgaccgataggataggcattaggcagaatgtatccatctatccatcgtccactcgtgacaatgacagcccaaactaaaaaaaggcacaaaactgaagaagaagaagaagaagaagaagaagaggaggaggaggaggagatcagagacatgaggcatcatcttttcgcttatgtttatacttattagcaaaatttgaattttttaactttaagtttgaagttaattttaaattttttttcatcataatttattttttgggttttgcttttagaacgttaaacatgtatataaaagtttttttttcagcaaatacgccgtcgatgggctgcagagttgcaaaaaaggactagacacggaagcacacagaaaaatacactgcaaacttgagaggaggctgaaatcgagatgcagacaagcacagcattgggatctgaatttctgaacttctgacgagagcacacgagccgtcaattgacacgcaacttgtcgacaaaaaaaaatactcctcctccctccactgatgcaatacgtacgtgcaccaccaacccaccaatgcgtttgcaacggagaggaaaagaaagctagtagaactagtagaatgattggaatatactcctacctgagctgagctgagctgaatggcctattgggttccatgttactgccatgtttaattaagatttaagagtagagaaatggagagagatcagggaactgaatcctgattgaatgaataagtacaaaagttagctgcatcatgcatgcaatggcaaatgcaatgctggtgctaaacaaccacctagctacagatgctgccagattatagctaaacaaccacctagccccatgtcaagatcatagcttgtttagtggcaatgaaccaagttttatcatagagtatgaacacactatgttagtatatttatgacgtaacgactttacactaaactagtagagaatatacggcgcattttattttattttattttatcggtattgttcgtgcggttgctcttgatcccaatcattcggttgtcgataaagaattcggagatgtttgatctctaattcccagagaccaatcaaattgaatgaactaatgaattcaattcaggtgttgagacattcataaatgaaatgacaaagtttttttttttagtcacaccggaaaactgatgatgagaaatggctaatcaagatatgatgatggcgatgggatgctttggattcttcagaggtcgaggaatccggtctgccggagcacggcgttgcggacgcggcggaggtcgcgccccttgagcgtcctcccggcgccctccagcaccgacgacgaccgcgcgtgccgccgcgccgccaccacgtgcggcggcaccatctcgtcgtcctcgttgtcgtcggactcctcgccgccgacgacgttgttggcggcggcgcccttgcccggccacatcgggaccctcaccggtgccgaccgcctcggtgccgcggcgcctccacccggcgccgccgcggccctcacgggcacggccactccatcctgacgcccgtcgtcgctgccgccgccgcgccccccgttggcgagcagcgacgacagcccgaagctctgcggcaccgtgtgggcgcggcggggcgcgcgcggtgggccctccgggtgtggcggcgccgggcagcagtaaccgtcgtccccgacaccgccggccggccacaccacgtcgctctcgtcgagctcgaacggcggcgccgcgccgtcgggccccgactccggctgcttcaggaggccaagaaaccggagcgagcccgcgcccggcgaccgcggcatcgccatcgccccccacggagcagccacggatcaatcctttggctctgatctccccttcgccgtcgacggctgcggcggcggcggcgaccagcgattgcaacgaggtgtttgtgttggtttcggatgccgcgaggtgcgcgttatatacaggggagagaggaaggggaggaggagggggcgatgatgagtcactggaggtggggcccacactgtgggggaatctccagatagatgcagtgggattcctgtgtggttttggaatgctacagcaaacacaagaactgatccttcccgtggttaattcgggggcgctttgcgctttgctttactgtactattcctagttcatacgccctccgtttcattaaaaaaatactctaattctagacaatataatacaatgaatctagacaacacaatctaacgcaatgaatctggacaatctatctaattttgttgtagattatgtcaaatccaattgtagattgtttttattttttaaaacgaagagagttgggagtagtgtgacgagctagctgtttcccatgacgaaatggcgtaaaatgctttataggataggtgttcgtttgcggattgatgtatctgattccgcatcaccgtgatcccgtgatactattcttttcaatcaggatcactcataatggttactaagtactacctttgcgagtttggatctgttttaaggcatttgttggggagtgtcttataaagcgaaaatagttttagaacaaaacttgtttgtccagttttattatactaaaatgtgccacatccactcattatctcttgtattatgggacagagagagtatataacaagtaaagatgaagaattaaggagtctatctagaccatccaattaccaaccaatgtctaggattcattgaaccttccctgctagcctcatcaagaaccaaactcgatcagctgcgagctgttagtatatatgaacaattgagaggacctgcgagactgtgaggtcgccgtcgatggcggtcactgggagtgactcaggtggtgctctaagagattgtcatttaattgatctcttttggatgatttagatgggtctactgttaaaattgttgagctatagcgactacaccatttattgtatcgtcctctctacatttttctctagtaacgaagatatttactagccagtggaagtttcagtgtgaatagctaggcgaattgtttaaaatgaaatccacatgatgtttactttaagactgtgattaatgctcaaagagccaacgtacagtgaagtatactgttttactgagaaaaaaaaatattgggtgcaacgtactagcagtagcttgacgatgatggatgcatggtgacaccggccgggtcaattcagaggttttcttgcctgcggttaagacgagagtaattgggggagtagaagacaagatgtggtggctaacaagtaaccaggggctactgtttcagttcgatggtgatagtggcctatatggaacgttccaaaccatctttcgaccgtgcagtgtacctggcatatatgtttattctttgtaatcaagagatagtcatatagcgcgtatcttgtacaattgcgagccggaaattaattacttatttggtcgaagagataaatacgagcttacgaggtgacactcaaacgtactacaccttttatgcgtggttgatgtgcagcacacgagaaaactgcgttctcgtggtgaattagacgcggaaagctagctagggcagttaattggttgtatacaccatccgtttcaaaaaaaaattaatataatactctctccgtgataaaatataaaatatagtactccctccgtttctaaatatttggtaacgttgactttttaagtacatgtttaaccgtttgtcttattcaaaaatttttgtgaaatatgtaaaactatatgtatacatatatatttaacaataaatcaaatgataggaaaagaattaataattacttaattttttttaataagagaaatgatcaaacatattttaaaaaaattaacggcgttaaatatttagaaacggagggagtaagagattttagggaaatgtaacttatcatagtctatccagattcatatatcatatccatctaaaatcccttatattaaacatgacacgttctaatcgtggttattatgctaaatattgctttatgttacccgcgcgtgtgtgcgcgaggcgtgaatgaatgattggtggcgcgcgggtggtggccggcgccgatcattgggcgctgggcgacacgtacgacagattgatgattttacaacgtgaccccggccgcctgcctgcgggatgtgcggcccacccccgcacgtacgtacggttaatttgcgcgatcgagcggcgggggcacacacgaccagacacgcacgccgtgtgctcggcgatcccaagcgcgcaccgatcgatccgcgcacgtcgcgcggccgcggagattcactgtgccgatcgatccaccgcgggtggcggggtccggggccatggccagcgcctcacacgaacccagcacagtaccaatccttgcatgattgcgcgtgcatgaacgccacagttgtaacagatgaaaggacagcagatgagagaaccttttttttcctgggaactaatacattcgttccaaaatatagcaacgtataatataataagactcatcataatattatgatattacgaatctagatatatatccatctatcgattctagaactataaatttaaatataagacatgtttctatgagtaaattgttacattttgagaggggagttagcatacggtcctcgctcactctcctctccgccgtgtttgtagcagtagcactacactgcggccactccgtgcaaagcttgtccgacgtgaaaagatgggagaaactaccctacaaaggctgacgcgagagggcctttcgggcggcagctagcattgccggttttgtgcacgcacggccacggtcatacacattgctgccaacctggatggattttctctcactgtgcacagcacagcaaacaccacactggctctcagtctcagcagccttgtagtactactgtcacagatctcacaagcacagcttctttgtcgttgtcgaccagaagcatccacacgaagaaattttcaaattagtagtaactgagccatgtccggcggcattttacgttatagtaagacctagtattactaccggtgataggactaattaaagattgttcttagattaccctgagaatgagagaggcttggagatggaacctgcctagccaatggcccatgctagtgctacctacaccaagtcaccaacaaagatggaagagatccgtgactagaaacgaccccacgttaacctacgcatcactgtgccatcccctgaatcgggaaagatgcactgcactgccactaactacggcaccactatacgcgagtcatcagcgagtgagagtgacagtgtactactggtagggcagggacctcctccaattaggcgactaatagaaacaaaagtgctaatgctactactagtacgagttttgttgtgtgatgagtagtactgatgtggccaacacgtcggtcccgcctccccctgcactgcatgggaacatatactatcgtgtggtgtggtgtggctggagatggaggtgtcgcgtcatgtcagcttcgccttcacacacgcgccgcaagacgccagtcgggcgcgttgcatcacttgtcatcgccggctcacaggctttcctgcctggatgcagctttggctcggctgtgtatgcaaaggcgattttacatcgatcgatcttcacgggaaaagccatgttagtagcagtacagtacgtcacggcgtcagatgcatcaccgggggattgagatcttgagatcgatgtaaaactgcccagttgcggaggtcagatatcaggaatgaaactactcctattttgattcggcggctatctggaaaaaacatactccaacatcgcaggtgtcgttaggaaccattattcagcaccagtcctccgaaacgatgtaaataatgagtttatggaagaagggacaactgttttacttgggcttacgacctcgatgcccgcatggttcactcgataaacttgagatacagtgcaaggaattcaatcatttgaactagatgacaatcgatactcatctcatctagtataatgtagtcgtacttcaatgacattgacatgttttacacatacaaagatacaaaaaatgtgtcggacgtagcctatgattggtactttggtagggacctacagatcaacttgtactctacagatgcgagataaggaagaaaacactcggagcaatcaagctgattaaaagaatatgggtggttaaaatggacatatctgttgctcgacgcactcgtacatacaacaatagatcaaccagtaatgatacctgccaatacatcactttttcctcgtgcaaatatggtgtacactaagcgtatagcatctaaccaaccatcaagagactcccaggtatcagcaacctgaaaaacgagttaaaaatcacaggctgagaattgaggtgataatgacagagggagggcctagggaggagcaacaagaataaacagtgccctgaaatgtcaagaaggcggtacagtacatgtaaacttaactcctgaacaacaagcatcaaatgagtatgtacttaccaagaacaaaggcccgtgaattgtttctatacaaaggccagcaccaggtggcagtgttagatcggagcatgcagacactgaaacgatatcttcaacagctactttaatatattttttgcttctccccatatgtccaaggggtttgctagaagggctttcagaggcatcgacctaacatttgcaacaaaaataatgagactcaaatcctggtgaaatgcacatgggtagaaacatctccggctaaaagaaaccgtctgaaaactccaggtactctagaagtatgctcatgttaaagtagaagaacttacctgctggagtccctcatggtttaagacaaattctgacctttcccaatgtttatgtggtgcaatggtgttgtctgctggaggagcagttagatacccagcttttagatatggtaaaggtagctgcaaagcatagcataacaataagtatgccaaccacagaataatttaagacatgcagattacctggtgtatgaataattgaatagttgctgaaaattcaaaacgagataaaataaaaatgataaaaaaccaagctagtgataaaactaggacatatatacatatcacttaaacactgaggacacacaagttcacaatctttaccctaattttctcgatcatattaattgttccggtgcatttcaatatacgattttgtttccttgtgaatcatcatttgtactcaataaaaaaaccaattacatttaaaaaacgaagtccaatacaggagatgaattgcttaaagacaaacttcaaacaaagaaatactgaaagcatagagcatgctaacataccattgatcgaaccagacgtagagcactgcgataaacctgcattatccacaacaacatttcagtacatctacataacgcctaaagattcatgaaatgtcctatggaatttcaagcttataaccacatcatgatgcgaggcataaaatgctaactctgccaaaatagtcagttcactcatccaagtaacatggaaatgctactataagataatatcaaaacccacaaactgctgaaagctagcagaatatacatacaggaaagagaaaaatattgctgaattaacaaacgtttctacaatactgaatcgtatttgttgaattaaaatatcacttcagtgacttcagttaagcaggaagaatacaatgactgactgactatgaaactcttcttgctttgttttcacatctctaccttccagggcatcccaataaggaaatttaaaggcagagtagtcaaagagaggaaaaacacatactgaataatttggcttcaatgcatgagcagctgcgacataaatggcggactgactgtacaagtcatttggagagacatctggacctgcagacctcattgtatcctctgctaacccatactgtgacatcaaatatatgaaagttggtgaattgttgttagcaaaaaatgcagtcagctagcatgtacgaatattgacaaagtgctgtaaaaaaacataccaggacagttccaagattgtaaatagcccgg

SEQ ID NO: 16038 - DNA, 6538 bp, Oryza sativa
  unsure (1)..(6538): unsure at all n locations
gctcttagagtagaattgtttactgaagaagcatactggtactttttcaaggtgtgcacagtcggaagcatggatgaacaggagcacccaaagctggcatcaatagccatggatatggccagggagttggatgggtgtttcatgggtgcaagcatctacagtgtacttctgaaagcaaatttcaacgctcggttttggaacatggctctggcaagcatcaaagaattcaagcaaacgaacctcctagtatacggcgcatatattgacaatccttggcagacgtctgaaccgacatatgttaggacggtaaacagaatttcctctgaataccttgtgattcttgacgactatcagacatgtcccatccaaatcacaaaccctgctcagagtgaagctgaagttcctgaggtgaatattcaagattttctctttgcgagtgttatacctcaaggaaaattcaaggttcttgcatggacatctcaccttccacctcactacaactacatgctcagctgtgaggtacagaggaaatatcgtatggtcgccaaaaagaagagatcgcaggaactttgcacctgacagtttgattgttttctgaagctttgtaactgaccatgtcagaacctgctgtataatgcaattatctgaagatgtcatctaaaactgagtttgtgaaatattttcacctactataatagccactaagatatatgtttctgttaaacttttgtgcttgggagatgttctagttgtttctttcttcttttttggctgtgtgcattttatgcagaggccgggggtgactcggtttgattgtatcatcttgatgtaattaactgagtctaaataaagtttccattatctaaaaaaactatatgagcgagggcgtagtccaagctcctatgtaagattactatttgtaagaggttgtcaaactcaattcatcagcatctattaattttgtactgtttgaagtttgaagatttcaacatgctgagaattgatagctactgattgatcctataggacgcggcctgaatgaacagttatacactagaagttatgtattttccataaaattgatttgatggttgtttggatgatttgacttgacatattgaattcaagcttgaaatttgaattcaaaaagtttctaggaatgcaagggagtttgtatgttggatgaatttaaataaattttgaggagaacataaaacaagatgaaattttagggagatatcaatgaatatttgaattcaaatttataatttgatgtccacacagtgttaagaataaggagttatttggattagtatatgtcctatttcagtgaatggggatattttaattaattttgtaatggttttacaagggagatgtaaattccaaaattcgagttctgagatttttgttaagatagaatgttttggatcaaaattttgggtttactaggaatgatttaattgatatcttgccactaattcgttgatacacacaaagaatcaaagttttaaaattatgctttttaattaaaataacttttagctgctaaacaaaagtcagggtgttacaatctctaacctttctaaggtgttctctctttttttcaggaatacgctaggagcatatctttgtattaagaggaataaaagctatttacaaatcaaacataaattttgaaggggacgggataccggagcggaacaaaggacttaaactacaatctcacaaccaattaagatgacctagggactcataaaaatagagaccaagtgccggtactaccacctttgctaggcgccataactccgcctccgcagccattgttttcactacttccacccatggccactgttggaggttgaagacctagttgtttctctccttccagatcatccaagctactagtgccacaatggtatcaaatccctgatgacgatctttcgcgacttttttcctgctaaggcaaagccactaatggaaggaggcctcatgcaaggggaggcaatctggctgattaatcaccctgagaacccaccgccagagctagcgggattatgggcaatcaaccaagatatgatctatactctgttcatgttgattgcaaagaacacagtggacagggtgggggagccccggccccgatggcgaagacgatcagtagcctagcatctattcgctgcgaccaaaccagaggaagtagcgacagcggggaggggccagtggcttccagattgtaaggtgttctcgctcgtgatcgaggtacttaattgtaaagaatctatagcacaaaaaaggaatttcagaaaagttgttagctggtcagctgccattccggttgcgaaagattgttggtcatcgttgagctagttgaggatgttgatgacgacaaatggagaaggatgtactcttcttcacgaagttgcatttcagctggaagcaaaatcataatcacaagcccatcagacaagatcgcaaagcttggaacaaactcgatctcttcatgtgaagtttctgtcacgagaggcttattggtacttcttcaaggtgcttgcattcggaacctcaaatcctgaagattaccctgagttaacatatgtatcaataccatgccaacgtgccatgtaggcatcacgtacaataaaaccgtcactgaaatcgtctaggaaggaaaaacgagccaattttaaatgttaaagagaggttatatacctagttttgtagttgagagagatgagaataagactcatcacgtcctccgcgacaagcccgtgccgtccgatgccccccgactcggcttttctttttctcccctcaaatcttaatgaaattcggtcaccggtctttggctgacccggcaaaaaaaaaaaaaaagagagagataataagactcggcccatcgatgagggatgagcaatggactttctcataggaaaaggaccacgcgcaaactccgttcggaccagcccatctaccagcgggccctccttcccacttcgccggcgttggcgagctgctcgtcggcgggcggcggacggcggcggcgctccggtggtgggcgccctagtaggctagtgctctgcctccaactcccctgatttggcagcgattgatgccgtccgccatgaagccgagctcggccggcggtggcaagtggccgcaatagccctggctggatctggagacgtcggcaacaatggcggcgccggacggcgatgccactcctccgtcctgctcgtctaattggcgatccaaaggttacttaattttcaaggatttatagcatattctgaatattttatttttcccatagcagtcaactattgatctccaaaaggaatttcagaattgcggctaccataatcgttgaagaaatgtagctaaaaaaaaaaaagctctctacctttttcagtcaaaaaaaaaatgtagctaatcagctgattaaggatgagacagcaaccgcagttcgaaaaactattggtcaagccaacaaaacaaaaatgtattttgtatttgggcataacagttgtgctactactactagacaacattatctgatgatcctggcttggaataggatgggaaattttcaacagttgggaaaattggttggtaccaatggttttaagaagaagcatcaatatattcgttcctattacgtcaaaacaatgaaggaatatgactgcttctggcaatactcaaatgcagaccaataggcatcactactgctatctttgccagctgtgctatcagcagtttccatttttatcagttttaacatgctggctttcataataaaatggtttaaacatgtattttcctcatgtttgtcaggtcattttgtctagtatgcagactgttcaactaaaaatacacgtgcttgtgaaacttgaccagagatctatggtgctgaactaaacttgtagaatttcctttgctgctgtcgtcgtctcagctatgtggtcaatcttcgacggttatattaatccaaaccgcagggaaaaatacaaacttgaattcaaacagtttacattcaaaagcatatctaggttcagacacattaaaaggtatacggtatatctatgttctgaaatgcatctctctttatggagacgtggagctactcgagtttgacgctgccttaatctctattcctattacagattttcagactacaaagtttctctcaggtcccagatcttgttgatccgttgagtaatccacaaagttagagactacacagtttcacatggagatatttctgtctgccattctgggtgatcttgccagtagatccatatcattcctgatcaacaagtgctcgaaaccgacagtgctaaccgtggaggagaaactgcaacggctgctgctccaggcatgtttcatcgtggaggagtcagatgaacggctcatcataaaccaagccatgctgcagcaactgaacatactaaggaaggagatgtacagaggttattataccctcgacagcttcagatgccatggtcatcaagaatataatcccaaagatcttgaggtgagtagctcttttgcaccatcgatgttcaatcctgccaagcgtgtccggttctgcagggtcactggccagagtgtacaagagcatctgctgcaacaagtttttggcagacttgaagtcaccattgaagatatgagtgaatttgttatgttcctgaatagttatccacgcttttgccgtcagccatatagcatgcacttgcttttagacgagtgcttgttcagtcgccaaatggagatggagcacatcatgaacttcctgctgaaagaggataccaccggtactgaaaatccaggtgtcctgccgatcataggtccaggaaaagttgggaagagcaccctgattgaacatgcctgtgacgacgaaagggtgcgtaaccacttctctcaaattgtgcttttcaatgacgacgatcttgaagatgcaaacatattgactcttagagattctggtgtaatcaagcatcaaaaccatgccactggtggaaaaaggatactaatcattattgaactaaccagagatatcaatgagggtgcatggagaagattgtactcagcttcaaaaagtcatgttgcaagtggtagcaaaattatagtcgcaagccgatctgaaaagattgcaagctttggaaccacacaagctcttagagtaaaattctttactcaagaagcttactggtactttttcaaggttcgcacatttgggagcataaacgcagtggagcacccaaagctggcaccacaacaatnaatatgccaagggaattgaatggttgccttcatgggtgcaagcatctacagtgaacttctaaaagcaaatatcactttcagttttggaggagggctctggccataatcagagaattcaagaagctcaatctcttactctacggtgcatatttttttgatgatccttggcaggcagttgaaccatcatatattaggaccgtaaacaaaattaactcggaatatcttcttgttcttgacgactatcaaatatgttctgctccgaacatgattcattgtcacaaaaactctgctcacagtgaagatgaagttcccatggtgaatgtgaaagattttctatttggaaatgttaaacctcaggaaaattcaaggttctcgcctggagatctcaccttccacctcactacagttacgtgttcaactgtgaggtaaagaggttacatcatatggtcaccagaaagaagagatctcagaagctctgtacctgaccatctcattgttctctgaaactgatgcataatgtaattatcttaaattttaatataaatctgagcatttgtgaaatagtttgacctactgtctgagcaaatgcgtagtccaaactcgtatgtaaaatgtgctatttgtaagagattgtcaaactgaagtctatcagcatctactaacattctatatttgaaatctgaacatgtcaacattcgtgagatgaaaatacattcattgcttctggcatgaactaactgctcctatcttaataaaagatacacaaagtatcaagtgctgctgttgacttctgaccttttttttttttttttgaaaccgaagactgcatttgctggtgttatattaagtaggatataaattaattgcttgttgacttctgaccattcagtgcttgttgtaatttgcaagatacacaaagtatcctaatccttaatagaagacaatgcaaacactttgtagcagtatcagaagctataccagctatggataacacgttggtggcaacgtcagctagggttcttccaacaatgttggcaccggatggcgatgcctccttgctgtctgtgtctgctcttgatccaggtacttatttttcaaggatatgtagcataacatgaactttttattgtcccagataagtgtattgatcaacgaattgaatttcagaaaagttggcttccgctcaaatggttagccataaatctattgttgaagaaatgtagtacctagtaaactgtttaaggagataacaacc

SEQ ID NO: 16039 - DNA, 6850 bp, Oryza sativa
tttagctttcgcctccactgagaagaacctcttttgtcctgcccactgcatacgctcagttcctttgcagatgaaagggggatgttgcagaccctgcacaaagaactacagtcaatcagtggcaaaagaaacaactatacaaaatatgttgattatggtaaaaaaatatttagtgaatatttagacagatagaagagttagagctggggtataaatatcatttcccaccaatcccaaacctgttatccaaacatgcgttagattattagattttaaagtttaaactaggaatcagacaaggtgaacattggtctgtaccaagttcggagaagttaacatgttctaaaagttagtagctgatgctggacatgtcaccctgcctagaagtaattatgtggcctcacaggtagaggcatatgtgctttgtataaggatgcgaatgctacgtacctagcaggtctgttcctagaatgcatgactttgtattggaacttaacagaaagcgtggatggggcagatatgattatatatcacttggcctacaatttcagtggcagataacagaaagctgatgtggactaatctcatgggaaaaaaagtattaagccatgcaatgggtgtcagtataatcagactccaacgtaaagaactcacaaacacataaacataagattacaaataactccaacggttccatgacaagaagaaaatcgagaaaaacaatggtctttatacaatagtcaaataatcagatggcaaacataaaaatagacaaaaacaagaaagagcaaacgaccattcattggaatctgcagaacaatggatcaatgttctatatagcgttgatctgactcaaaattgaaatgacaactttacaaactggttatagcaaatcccccaaatcatgatagacccaaaagttccaagttcgtaaactagatctagatgtgtccaacttattcaaaaaagagcaagacaattataaccacctataagtgaaacccatgtctattcagtactaccacattgccagaaatcatatactagcatacaaggcccaagaacgtagcattgttggcccaaaattttgggctgaggggtgtcatgtcactgatcaccagattacaaattggacaactgaagctaggcctcttcagaaattggaacatatttaaacccacacaccacaatccataagacatgctgagcttctagcatatgaacaaagactgtctgaagcctaaagcaacgtgtctgcagatataccatacttgggaggttgttcgtcaatgactagtagtactacacaacaaattcgtaaacccctcttctgaaatttcacgaacattcgcacgaaaacaagtcactgactagattcaaggagtctctttttttttcaagctggaaaccttatttgaaggagccagctagcgtacgaaattaacaagattggaatcgcggatcaaggcgtgctttttatatatatatggactcacctgcaggttagggatacggcggacacgcgcagcggcggcggcggccggagacgagaaggccgtcgtcatcagctgggcggcagggtggagggagggcagcggcggggcttggcagatcaccgccgaggatcccgagaggcggcgggagatcttccccaacgccgaccgcaccatcgccatcctctctcctcctcctcctcctctctctcctctctctctctctcttcgtgtggataccagggtttgcagagggttgaagctaaattgatgaaaagaattcaggagacagagatgatgagaattaaagctcccctaaaacttacaaggctctgtttagaactttttttctcttccaactttcaactttttcgttacacatggaacttttttagggtttacacacacaaacttccaacttttatgtcatatcgtttcaatttctttaaactttcaattttagcgtggaactaaacacaacctaatagtttttcttttcggattagagtctagaaaataaattaaaaacttgttttttttagcttggtataactctgagtagctcccccataatttaacaacctcattgtttggcatatatgaggaaaaagagaaacgacatatttagaaatgaaaattagtttgtgaattgaacttttatatatgtgtcctttacgatctaaaaacaaaggctgaaaaataaactacgatgaaagatcctcaaagattaaaaattcaaattttagctgataagtataagaataagaaaaatatgaggctgtaaagctccccaataaggtttccctttttttattaagacaaattttatctcggtttttgttatcatgcttatcaaattgttaaatggtgtatttcataaaaaaataattccatatacaaacaccttaaaaatatcaaataaaattcaattttcaattttaaaacaattaaaactaaattaattatatgccaatgactttattgttttatgtgcctacacttaatctcgtcttgagctaaatcgaacgcagcccaagtccaaatttattcattttgtcaaatctttctaaaaattgaacgcaacccaagtccaaatttattcattttgtgaaatcactctaaaaatcgaacgcagcccaagtccaaatttattcatttgtaaaatctttctaaaactcggacacaacccaagtccaaatttattcattttgcaatttctaaaagtagttgtagctgctagaagtatcctaaataggagaaaacccactatgactcggagaagaataataacactgaacctgaattaattattaataaactaatagtgccaatttttgagagcatgagattttagaagacctgaaaaggctgggtttttatcggctgacattagttcagtgacgcgaggtaaacaaagtcacaatgacatcataagtttaattgcttcagagcaataatataatcagcttgaaactgacaggatacgagatgcaatcaacatgacatcatcaggacgtaattagaaaacactggatagacatggtcacaaggacagtagtaccattaggatcatgtctaatttggttatttaaagacgtaagacaagggtcctgcttaaaaacaacatgaccttagacttttggtattcagtagaaaaacagatttgacaattgacatgcactcgttgaattcaactccaccaacataaaattcaaccaattcagtctttggtcccacatgactatacattgacttgcaacaaaagcaaaaataacagcactagactgttggtagtagtacatttgtagagaccacatcggcaataaattatgcatttggaattaattagtaggtatcttcattcaccgctcatcgtttgtcctataacttataaaccattactaaaatataaattttaatttctttttttgaaaatttaaattttaaaatttaattataaagttggttttaacttttttttaacattggtttttaatcaccaagcatacaaatataaaaaatttacccacaaattattctttaatttgctttcaccttttttttttctgatggtctgacccatatggttggacttcttcagtattgacattgccgcgttatttctcaacgtaatgaaacgaaagtaaaagggacctaacggaatggatgttattttcaaccatactattttttttataaagttttttaaaaaatatctacgtttaatttgttgccaaatttagtatatacattagaaatcctgctaaaatttttacatattacaatcttgctaaaattttggtaagagtacaatctaaacatgcccttaaaagaaattaatctccattaaaaatgcaaaaataaaaaagagaaatgccacgtcagcaggaaaccgcgaagctagccacctctcctttctccccctctaaacaaacgcccagaaattgattgaattttttttttaaaaaaaagagaggccgccccaaatggaggaggtcgccgtcgtcgccgtctccgtcgccgcccaccaactccgccgccctcctcctctccgcctccgatgccattaaccctacgcgcacgggcctcctggtcgccgcaggcctccgtgatgccgacgtggtggaagcgctccaagtcggcgttccagcgctcctccgccgtctcctccgccccggcctcgccggcgagggcctccacctcgtcgtgcgcggcgcccggccgccgcagcgccgccggcaggtgcgccgatgacgccgggggcctcctcctcgcgcggcgcaggcagctcacgcggcagcggaagctgcgccacgtcgacgacatcggcgtcgggctcgagagcctcggcctcgtcgtcgcgaactcctcgcctccccccagaggccgcgcctccacgtccgcggccgtcggccaccccgtctcgatcccgatcgcgaggtccgcgagctccgccgagttcagagccgtgcaccagccgccgccgagggccgccacggcggcgtcgcccgtgctgctcccgctgccgctgccgtctcccaagccggtggaatcggacacgtcggagccggatgttggtggcgagagggcgacgaggtaatgtgattatattttataattcttttcccctctgaattattggatcatgtcgaatcctgcgattgaatgaattattatgtatgtgatgatgatcaagagatttttttttgtatttaattgatgcgatgcaaggtaaaatgtgattgttttcctcaaaataaattaagtttttgttatgctgcgaagagattaagacgcataggaaggtgcaaattttgtgattgattaggcatttggatgttgggcatagcaatgttaacctgaaactgcaaatctatgttgtttcctgatgctcacttgtcttgtggttgcagggtgacaagccagattgttcaaaattttcctgataataataataatcttcctgacaatagttcaaagcgtactaccacctctagtcaccacaggaaggtgttccgagagaagttccaagataagagttcaactgaaactgccaactttcggttgaacattcctgctaaaagtgctccaagcagtgggttttcaagccccgtgtgcagccctcgaagattcagcaatgccgaatatacgacaccaactgctcaaggtccccaagcgtggtccgctccatctgtccgctcggtagattctatggcaacttcatctccgcggatttcacctgaaatatatacaggggttacagagcaatcaactttttctaactcattgagaagtcctattctaatgtcgaagaattccagtgcccctccatcacctctgcacccaaaattattcccagaaaataatatgtcacgtattgaaggcaatgggaatgtcagtttccacccattaccacgccctcctggagctataaactcaatgcagacaagcattgttaaccagtctgctccaaaagttgaaatgccctcagtggctggtcagtggcaaaagggaagactcctcggtagcggcacatttggctgtgtatatgaagctaccaatcggtatgtgagtgtttttctttttttggtgttatcaaatttacggatgctacttcatgttgagctttgaatgcaatttactgacattaacatgcaggcaaactggagctctttgtgcaatgaaagaagtcaacataattcctgatgatgcgaaatctgccgagtctttgaagcagttagagcaggttaattgactgtgtcctaaataagattacatgatgtccatttggggcaacataaaaatcttccatttatcactgccattagtttatctaaatgtattgttatattagtgttcctgtttactttttttatgctgagaaataagcttctatgcccaatctaaatacaatcaatcttcctttgaataaaaaaactaaactctaatgccctccattttgtactccatttcttagttcccactgcaagttgaaaaatgcagtattttcccctccaatgacttgacattttggcaatttcctttgttcactgagtttcctatgtttcaggaaataaagttcctaagccaattcaagcacgaaaacatagtgcagtattatggaagtgacactgtaagtccctgtggaaatctgatcaagtatgtccattgtcatgatttattctgaagttgtttttggatcgtgcagtttgaagatcgcttctacatttacctggaatatgttcacccaggttcaattaataagtatgtcaaacaacattatggagcaatgacggaatcagttgtccgcaacttcacccgccatattcttaggggtttagcgtttttgcatggccaaaagattatgcataggtgtgtgcaaatctctatccttgtttactatttttttgttgctacatcatctattagtttgactccaactgctgtgtgtgtgcagtactttacatatccttcttttggtttaaatattcatttcaacatggacaaactgtcttttctcagtttattttggcatgttctgtctaactgtgtcttgctcacctcacaggcctcatcttcactttcacctatcttgctattacttcagaaaatcattatctttatgcaaatcatttatccttttaattgctattttgctgcatgtaaaagttggagaacatcaaactaattttagtttgagtaaagtgtacgggcggtccttaaacttgtaggggtgtgtcatctaggtccctaaactctcaaaatgcatatccaagtcccagaacttgtcatagtgtgtcatctaggtcccaaatcaccacaatccctttacgatcctacgtggcgttgatgtggca

SEQ ID NO: 16040 - DNA, 10601 bp, Oryza sativa
  unsure (1)..(10601): unsure at all n locations
aatttaaggaccgccaatgtactttactcttttagttttttgtgaagatactagtactttctgcacttccagaattttgtttatgttggtctccgcttcaatttatgttaccttatgtcatgtatgtgaaagtaaacatgtcgactcttacagggatatcaaaggagcaaacctgctagttgatgttagtggtgtagtcaaattagctgactttggaatggccaagcatgtgagtatatcctcaaacagagtacagtagcatttgtacatatggtactttattgtgtatatccattttaaacagcatttgcatgtcattttagaatgactgagcaacagcttaagctatcatctaatatttttccaaatctaactagcatcactaaacaagggagttgttggatgcatttgatatgtgcatataacttttatctgctgtatgttgttgagctcttgaatcccattgagtttatgttcattgtcagcactatttgacatataattgtattttgtggtactattagctcagtcatatgcacggaaccgtttgataacatgctctgctttgggtaatttttaaaataaatgtattcccttattacatatattctgtttaatgtactgcttatgttaatctctttcttttagttaagtactgcagcccccaatctttcactgaagggaacaccatactggatggccccagaggtaggcatacacgtttcttaataagttaaaacatcttctatcaaggttcaaagaaaaacaaacatcgagctgtataagcggtagctccatatgatgcagtgtttttctttgaccttatactgttttatccatactaaagataggagctcgctttgtttagcttctcctggatttggttcctgaattgtagggttgcagtatttaaatggatacagaaaaataaaaatactttgtccgacacatgtgcccagcacatgggcttgtacagctccaacccaaactcagtttatgtaacagataatgcaaatgttttttaaagttgataggtttggttttgtcttgtttgctttaattcaattgaaattacattctttaattcagttggtctcagatgattaggctacccaatggtttagtacgacagatgtctgacctgaaacaacctcactaacattgctttttctaatttacagctgtgttggaagttctactttcaatgcaaataaatttagctgtaacattcttcggaaaggagctacggaaattctgttacactcttgtacctttatgcctattgaaatctagattgtttcttctcctgcagatggttcaggctacacttaataaagatgtgggttatgatcttgctgttgatatctggagtcttggttgtaccattatcgagatgtttaatggaaaacctccctggagtgatcttgaaggggtaagaacttggagtgttcatctttacatgaagcttagtaacatgcatgtcatgactgtagtctgcctattgtaatccctaaatatgaaccacttcacccaaccaacatttcttggtatcaattattgtgtttcaatgcaagtgtcacgcacacataaccattgtaatacctatgtaacatgttaatgtgataggtgtagccactgaatggcttggtagtttgggtatgaacaactatacataaaaaagtattattctgaaacactagtcataataaatcatttttgttctacagcctgctgcaatgtttagagttttgcataaagacccaccaattcctgacaatttatctcatgagggcaaagattttctgcaattctgtttcaagaggaatccagcagagagaccaactgcaagtgagctgttggagcatccatttatccggaattcaagtcattacaacaaacatggttccatacattcatttgcggggattaaatccaatgtaagtctatgtctcccagataagctctttgccacccacatgagtatgtgatgtcactttatatgacaggataataataatggaaatggttcaagagacaaagcagcctcgaagagtgattcctgcgtgaaaggaaaaattactgtagggtgagtagtttccttttatttagtgctgtcttaccttaaaatgttattttatttgatttttcatcttcttagatcataacatagctgacatgttttatttgccagtgagccaaccaatgctaggccttccgaatcgtcagcttttcgattgactccactatcaatccaggaagttgcacctaacttctcctctagacccttaggtctaacctccaatcctagtccatcagccaatttagtgaacactgtatattttccgattgcaaactctcagcgtagtcctttgccaagacctaatgaaaaggaggctctgttctaaagatatcaagcatgccatggggagtgtgatttccatctcggatcatgttcatgtgcacaactttgaatgcgaactcggtcctaactgtatttatagaattaaagcagagaaagaataggaagatataagaaggaagataaatcttgtgaatcttggatgttgcgctgttatatcagctacacagcaataagataaatggtggaagacatcccagaagagacataccttgcactaacaatcatgtgatggaagacataaaagttttgcagcagccatctttaactaagttaaccatttttgtgcaatagttgcactatatgaatttgtacagcttacatgttcttgtaaaatagtgattgcctatttggacatgcgactaaatgttgctgaatgtgacggatccatgaaagcatgggatcttcattgttttgggatattctgatggcattttttttttgtaacatacaatcaggaataactgtagataagttgaaagtcccttattctaatctcatctaacaggttccactgctgtgtaatcatatttttgttgtatttttgtacaaaatggtgtgattataaatactagtatttacccaacatgtttcatttgatttattggcggtaaaaagctttagtacagtacttactttgtatgtgcatactgtatgataaattacaaatcggtaaatccattatgaacactagatgaccaatggctcaagtcaaactacctacatacgcgattgagaatgtgctagtttgtaaactagttgtacaatttcttcacaaaattaatcgctataaacagtcgcttaaacagttgtacagtttttccacaaaattaatcgctataaacagtcactttagacataactcgtcaccgctcttcaacttccaaattcaagcttctgaaaatagtatttaaacccacatgaaaaaaaacatataaaaagaaaagacattaaccaataaaaagtctttatcatgggtaatagaatttgtgacactaaccttgtacaggattctgttaccattttgatgtttacatgcaatacagttcataccaaagtatacaacactggaaagcaaaatgagtacaatcaagcaacaagtttagtgcggtgcatttgtcctctggaacatacaaaacctgatgtcgtttgttggtaaatgtaaaaattcatgagtatttctggcctagagaaacttagtaacatctggcacaccttccttgccatgctctcagtgattgaatgacagaaatttattgtcatgtctttcagcattgctgcccaaccgaatagctgcttcacaagagcaatttgatgttcggttcccctgaagttattgatttctacctcatgaaggaatgccaactttagttcctcagttttccaatttggtggaagatcacaagtgcaacttgatgaacatgcagctcgtgcctggaacgaatggcatattagtgtagtaacatcaacttgcctaaagttgccgggctgcctaaacaccctcaggatgcatcactgaacagagattgcataagaatgacaactgcaaactagtttgaagccaacctttcgcagaaattgtagttatgtgctatgataaagttgtgcgaaaaacgtaagtataaaattacctagatcctcaggtatcgcaaaattaataacaaattgccaatcagtatcatccctaaatcctaattgtgtttccaagagcgtgtgatagccatgtgacaactcaaactcagccaaccccatctagagctacgtccaagtattaaaaaaaagggcagtatgacacttgctgagaaaaatgttgtcaagacatgcataagccataatgccatatatttacaacatatatcagtaattcaatatcaattcaaatcacaacctagggtagggaatctagccaaataaaatagcaaatcaagcctaggtgtgacaaagcatgaaaatgcagactgtagtccacaatttccttagtaactctgtattatataagcaaattaaggatagtttttagcttttacctgcggattactagaataaatatctgttgccagctccaaccttcttatactagtgctcattctcagaacatggaatacgctgggaccaatggcatgtccacttgccaatacagtaaggcccaggaacataatgtcagggagcattgtcatttcttccatcaagtattcattttcaaggtcatttagttcctgttgtagaaagtaaaacatataaggacagaaagatctcacttgaaaaaagttattagcacaaaccaatcagttgccatacgttaacactttaattttcattttcttgtatacaatctggagattctgaatctagaaaagaggggatcatatataacagttggagtagagaaacatatcctttggggaagtgattaggggtcattacaagctaacaatttcatttggatttgtaaaaaaaaaaaggtctggacactgtaagttataagtctggccaagtcagaaaagtgcattggttattcccatgagcatactgcatatctcaattttagaatggcaatgataatatatagtgcacaagtacaaatattgtctgtactcggttcacattcccttgattattgaggtatcatgttcccttcaataaataataaactagtactgtattgcatagtgctagcatatgctagttctcatggtaaagtggaaaatgtagcaccatcaattaacagtaagatctagtgggaaagaataaaattttagtgtgatcaaacatgatgtatgggcttgactcttgagcaatgcaaaacatacatgttagtacctcaacagcatttactaaatttcatatgtcttgaccaaatattaagatattatgcaaatgagtatggtgagataatcatctatgaaccaccttgatttgttcgctgcagtgaatacacggtaatgcacagtgctctcatctatgatgctagtagaggaattgaactcaccgacatataggcaagcgtgagggaaagacggtcgagggcatcaaactgaaagcgctgcaacagccttaaacaatcgccattgtggccgaagtcctcttgtccaaatgcaagataaaagtgagttcccagacacttgacatttgccatgttgccaaaccggacggagcttggatcgaaagcatcctcccagtggagagtctccagctgaggggctgagatgtcggccaccggttgactcatagccagaggatcggagaagcaggagatcacatatagcgcgccgagtgccggcgcaacgacattgagctgcttcaatcctttcagtccccccaaacgaatctgcaggagagactccgagtggatgctgagattgctcaacccatgggcattctggatggtgagtctcttcaggaatggggaccgcggtgaggagacggcgtcgccgaggtcgcacgggcggtggaaccggacgttgtcgagtgagaggagggtgagccgggagaacacgccggagcgcggcatggcgacggcaatgaaccctaggtccagcgcgaggttggcggcgctggcgaagcagggcagctcaagaacttctccagcggcggcgccctccccctcgtctctcttcgtcttcggcaccacgttgagaagccctagatagccggagaggcggcgcgcggcgagggggagccattccgcgacggatccagcggtggcgcccacggcggagacgaggaggaggcggaggggaggcgctccatggtaggcgagggcggcgcggatggcgcgggcgtcggctgtggagacgaaatcgagctccgggaggaggtaccagagggagcgccagcgccgggagaggacgctggtccgcgcggcggcgctcgtccctacccggagaaggatttggacgagcaggtcgtcgggaagcgcgctgaggcggtcctcgccgccgccgccgccgccgtcgccggcggagagcttggcgcgcttggcggtgccttcctccccatcgccgtcctccatcgacttgggtgggtttcgtgttcgggggcccaaaatccggaatactggaggagttctagggtttcgatttgatatggtatgaattcaaatctcctcttcgttttgaatttaaatttaaaccttgcgatgaacaaatttggattaggctcctcatttcaccacaaattacaaatcccatatagtactccctccgtcccataatataagggattttgatttttcgcttgtaacgtttgaccactcgtcttattcaatttttttttgcaaatataaaaaccgaaaatttgtgcttaaagtactgtagataataaagtatgtcacaaataaaataaataatagtttcaaaaaaatttgaataagacgagtggtaaaatgttgcaagtaaaaactcaaaatccattatattatggtacggagggagtaattcattgtaacaaaacatggctccatacggaactggagatgcggttggttagtgatggaggcatgtcacgagggtcttcgaccaaacctaccgaaaccaccaactcatgaaatgtcggttgaacccaaggggtgcgtctaagggcctgtttagttcacgaaagaaaatttttgagtgtcacatcggatgtttgaccggatgtcggaaggggtttttggacacgaatgaaaaaaaacatgatttcataactcgcctgaaaaccgcgagacgaatcttttgatcctaattaatctatcattagcacatgtaggttactgtagcacttatggctaatcatagactaattaggcttaaaagattcgtctcacgattttcccctctaactgtgcaattaatttttttaatttatatttaatgctctatgcatgtgttcaaagattcgatgtgatgtttttgggaaaaaaatttgagaaactaaaccaggcctaaggcgannnnnnnnnnnnnnnnnnnnnnnnnnnnnntaatgacgaagaccaaagggttcgctatcaagctcaccatccgcctgaatcatcactaagggcaaaggccataagacgaagcaaagaggccatcgcccgaagtagaagatgccttcggctaagggcttaggaggctctgtggcccatggaggcctttcgccactaatgggctggcccaagaaaatcgccgtagggcccatgaatacaaaagacattgtatacccacactaatgtctctatcataagggtaactatgtaaatttcccttattaactaaaccctaaagggtatgaacctgtactttgtagggtctattcgttttgaaagaattttgtaatacatagaaataggacaaatagaggaataagaatagtaatttttcaagaggtttgattggacggagaatttcttatatttttctccctacaactagtaggagagaaaaatttcctttggtattttatatctatattcttctgaatcgaatgacatttataggaattaatctttagaaatccatgtcctttggaattcctccaaaacaaataagccttattcatttttactactgatttagctggtgagaattctgataatttaaaaatttggaagtagccgcatatgccagaagctctccatgtgccctttgccaccattattaatctaggatgttactcctaacatttcccttagatccttatgtatgtctagcctcccattgttcatcaaccaatttagtgaacacattaatctttcaaaaacaaactctcaggtctcagcctagtccacattgccaaggcccactggagaagaggttctgttctaaagatttacagcatatgccaaggaagcgtgacttccatctctgttaacttgtaccttacacaattgaaacatacaaagataacgagataaatcctgcacatcctccatgttctaactttctatcagctgctcaaaattaaatgatggaatgaaacattactgcatcacatatgagccctgcctgctctaacactcatgtgatggaagatatgccaaagttttgcagccattaactttaagttctaaccaattttgtgcagcagttacactacatgaatttgcacggctcacatgttcttgtaagatagatggctgacctgcattttgtctaatatctgagagcattttgatgtttacatgcaacgcagttcaaaccaagtacaaaactagaaagcaaaatgagtctaatagtcaagcgtcaagtctggtgcggcgcattagtcctctggaacatacaaaaccttacgccatctgtggtaaaaataaattttcatgcatatttcaggcctagagaaattaagtaacatctggcacacctctttcgccgtgctctcagggactgaatgatagaaatttatcgtcatgtctttcaacactactgcccaactgaatagccacttcacaagggcaatttcatgtccagttcccctcaaattattgatttctacttcatgaaggaatttcaacaaaagttcctcagttttccagtttggtggaagatcacaaacgcaatctgatgaacaaacagcttgtgcctaaaacaagcagcattctattagtgtagttacattaactttgcctgaaaaacacctcgggatgcatcactgaacaaagattgcaaaagcatgacaaatggaaactagtttgaagacattgtagttgttatgtgctatgataaagttgtgcgaaaaaacgtgagtatgaaattatcaaggtcctcagaaattacaatatcagtaacaaattgtcaatcagcatcatctcctaaatcttaattgtgtcaccgagagtgatagccatgtaaactcagactcagaaaactttcaatctggagcaaaatgcttccaagcattcaaaaaggaaagagcagtatggcactttgtcaaacttgcagagcaaagtttttccaataggacatacataagccacatgtttactacatatatcattatcaattcaaatcactacctagcgtaaggaaactagccaaataaaatggtgaatcgagcttaggtgtgacagaaaatgaaaatgcaaattgcattctggacttcctcggtaagcctgtagtagataaacaaactaacaatagtttcagcttttacctcgaggtcaagagaaatatgtgttactagcttcaaccttcttacacttgtgcacatcctgagaacatggaataagctggggccaatggcatgtccatttgccaatacgttgaggttaagggacacaatgtcagggagcattgtcatattttccattaagtattcaaagtcacagaggtccttctgtaggaagtaaaacatggcgattatatatagcaattggaaaggaaggatagaaagatctcatttaaagaaagttattagcatagacaaatggttgttgtaagctaacaatttacttatgattttcttgtaaaaaatctggagattctaaatctagaaaacagggaatcaaaaagagcagttggagaggtacagaaacatatcctttagactatgtgattagcgaacaggacatggtcagtagaagctaaatttcttattaaaaaaactatggccattgcatgtctagctaagatataggaaactgcattgctcattctccttaagcacacatggtatctcaatttaaatttggcaatgataatatacagggcatcattacttggtttaaattctctccactattgagggatcatatttcctttcagtaaatattaaactaatgcagtaccgcataatcattgcacataattctcatggcaaggtggaaaacataacacatcaattaagaggataaaaagacataatgggaaagagtgagattttggtgggctgaaatgtggcgcaggggcttgagcaatttaagacatacccgaaatacttcaccgacattaactaagtttcatctgtcctatcaaatatcaggagattatgcatatatgtatggtgataatctaagaacctccttgatttgtttgctacattgaaaacatgagtaaacagtgctctcttctgtgatgctagtagtatgatactatgatgtactcaacataggataggaattgaactcaccggcagaaaggcaagcgtgagggtaagtctggagatggcatcacgccgaaagcgcttcaagagcctcaagcaatcgcggttgttcttaaagtcttct

SEQ ID NO: 16041 - DNA, 4158 bp, Oryza sativa
ggatgggaaccgccgcgacgaggcggcgtcaccgaactcgcacgggccgtggaaccggacgctgtccagtgagaggtcggtgagccgggcgaacacgccggagaccggcacggcgaggggaaggaaccctaggtcgagagagagcttggtggcgctgccgaagcaggggagctcaagaaatggggagccatccttcccctcctcgtcgtcgtcgtccttggcatctctcttcggcgccatgttgaacagcaacagatccccggcgaggcggcgcgccgcgacggggagccattccgccatgccgtgaggggcggcgtcctgggcggcgacgaggaggtggcgtagggaaggcggttcatgggcagcgagggcggcgcggatgctgccgccgtcggcttcggggacgaaatcgagctccgggaggaggcaccagagggagcgccagcggcgggagaggacgctggtcctcgccgcggcggtggttcctcctatccggagaaggacttggacgagcaggtcgtcgggaagtgcgctgaggcggtcctcgccggcggcggcggcggcggcggcggcggagagcttggtacgcttggcggcgccttcgtccccatcgccgtcctccatcgagttgggtgggtttcgtgggcctggaactcaaacgtgttggcccagcccaagtgccttacataactgaagcagcagaggaagtagaataggaccctgtttagatgggactagaaattttaagtctctatcatatcgaatgtttgaacactaattataaatattaaacgtagactattaataaaacccatctataatcttgaaataattcgcgagacaaatctattaagcctaattaatccatgattagcctatgtgatgctacagtaaacattctctaattatggattaattagacttaaaaaatttgtctcgtaaattagcttttatttatgtaattagttttgtaagtagtttatatttaatactctaaattagtgtctaaataaagagactaaagttaaggtccctcatccaaacaccagaaaagacgaggaaataaatcctgcgcatccttgatgatgtaatcctctaccagtctacagatgctcactacgatggagtataattgtgtaaggaagcattgttgcatcactcaatgtaagttccactccctctgtatcattatattataagtaatcaaatattttatagaaaaaattagcaacatctaaaatatcaaattagtttcattaaatttaacattggattttgataatatgtttgttttgtattgaaaatactactatatttttttctataaatctagttatatttaaaaaacgacttataatataaaactaaacgtagggagtaactttttttttacagcagtttgtaatatataaattgatacagcttccttagagagcatggaaactagccaaatctatatccagtaaactagcatactaagtctaaagctcaacacgtaaccataccacgtcatcactcactagcaataattatatatttaacttcatgcaagcatacaacatcatctacagtttatttaattatacaaatcaacatgcaagcatatctaatcatcacccctcacatcatttacataatattttaacaaatctatctatcatttttataatatttaacatatacttattaacacgtttcacatcatttgtttgtttcatggtaagtactgataaacacagatcactagtacagatccttccatttgtgacggcccataacaagactggaatttgcgggccgtcacaaggaagtaatctcaatcgggccaaaatttcgcccgattgagatatggtcgcacagccatggtatatcggcataaaactaaaacccgtcacggatgacacttatctgtgatgggctatagttgaggcccgattgagatgagggttccatatctcaatcgggccctaaaagaagcccgtcacagatgagggtcatctgtgatgggctccaactagaggcccgattgagataagtttattgcccgtcacagatgacactcttttttgattggccttttattaaggcccgatagagattacttgtatgcccatcacggttgattgttttagggccgttacagatatttgttgcacagtataaatactccccaccacctagtgtaactgtatcccacagttcactattttggtgggaggctgtagggggcgaatttttgtcctttttccaaggaaaacagaaattaaattcccaaaagtaatcaaaatggatcaatcaagtgagtaatataaatcattaattgagcaatttcatcacgtcttacttttgcaatactgatcttataatatgtgcctctaatttgttttttttagcaattgatcgaagttggatgtatgccaaaaatttgaaacgtcattctacagagtaccgaaagggcataataaaatttatgaacgccgcggaggaggatcggataaaaagaaacagtgattacatgtgttgtccatgtgcagattgcaagaacgagaatatgtttgatagcggaaaggacgtacacggtcatctgatacaacgaggattcatggagggctatacatgttgggtgaagcatggagagcaagaatcaggaagtggagcagcagcagacagaagtggtgcgcataattaggaagatgaaaatgagcatgaaatgtttataccttctccattgggcggtgaaatggttgatgtggatcacgatctgctgcaagacatgttacgtgacgttgaggacccagcccagaatgagagagatggaatgaaattcagcaggttggtaagtgattccgagacgcctttgtacgctggatgcaaagcaaaacacactaagttgtcagttaccttggacctaatgaagctgaaggcaagtagtggatggacagacaagagtttcacaaatcttttaggaattttgaaggctatgcttcctgttgagaacacattgcccgagacgacatacgaagcaaagcaggttctgtgtccactggggttagaggtccgtagaattcacgcttatcccaatgactgcatattgtaccacaagcaatatgcggacttggatgcttgtcctgtctgcaaggcttctcgatacaagcgaaagaaaagtgctgacgaaggaaataagtcaaagaggggtggtccggcaaaggttgtgtggtatctacctatcattgatcgtttcaagagaatctttgccaacccgaacgaagcgaagttagtacgttggcacgccacggaaagaaggaatgatagtatgcttagacacccagcggattcgattgaatggaggaatatagatcgaaaacacaaagactttgctgccgaccctagaaacatgaggatatgtctttgtacggatggcatgaatcctttcggtgacatgagtagtactcacagcacttggccagttcttattgcgaactataacctcctgccatggttatgctttaagtgaaaatatattatgttgtgcttgttaatccaaggtccaaggcaacccggcaatgatatcgatgtattcctggagcctgttatcgacgatctggagattctttggaaagaaggtgtggaaacttgggatgcatatggtcaggagaacttcaagctaagagttctattgttttgcaccattaatgactaccctgcactcggtaatctttccggacaaactataaaaggaaagaaggcaaggaacatacatgaagccggtggctgaagaaatcacgaaagatggtatacatgggtcaccggaggtggctcccgctacgtcacacatttagaagaaagaagaaaatttttaatggtaagagagaacttcagcctgctcccaaagatttgtccggagatgaggtccacaatatggtcaaggacataagcaatgagtttgggaagaaaagaaaacgtagcaagacaaaggagaagggtatgtggaagaaaaaatccatattttggcggctaccttactggaaagatcttgatgtccgtcattgcattgatctcatgcatgtagaaaataatgtgtgtgagagtttggttggcctgatgttgaatattcccgggaagacaaaggacgggttgaacgcgcgccttgatcgctta

SEQ ID NO: 16042 - DNA, 12883 bp, Oryza sativa
aactaaatgcccgattgagatgaggtcatctgtgacgggctttagcttaggcccgattgaggtcactagtcatctgtgacgggctctagtttaggcccgattgaggtcatcagtcatctatgacgggctatagtttaggcctgattgaggtgagtatcatctgtgacgggctctagtttaggcccgataaaggttagtagtcatctgtgacgggcgctagttgtggcccgatagagataggtcatctgtgacgggctatagtttgactggtcgtctgggtcaaagctatcggtgacgggctttacttagggcccgattgagatatattcattcgtgacggccgtttgcccgattgagataactcttcacatcagtgacttctagcctgtgacggacgctgtgcccgattgagatggggcttaccgcccgattgagatgagggtatccgttctagtggatgttttattatttttttcctttttactcctagcttgattgtcgaaaaaatatattgagaattacttagtaattcccgcaacaaagtacgggaaatcacctagtaaaatagcaaatcaagccttaggcgtgacaaaaatgaaaatgcaaactgcatgcattttgtggcttccttagtaactttgtcctactcatatacttcatttgataagcccaacgaactaaggatagcacacgtgcgaaagatgaatcaacgcgattgtgttcttgtaatatgccattgtccaatgcattgtgaacccaacaaaacgctgttacttatagaagattcacattgcttacgtacaaattataatttacaaacatggcgctaatgaagattgttctcaatggttctgctcagtgctcttgtgaagaacattatcttcttcaaactgttatcttgattcatgagttaagagcttactctagaaattgcacaacagaagtactaatgtggttaaacagggaaaacatacagaatggtgacggccagatgtgaattcctaccgacgcccatcgggatattatcaggcatgaagtctatgcgataaaggtgcatgtatttcagacgattaagagcgaggcgacttgttggctataaggttttttacagcctttttttagcccacacatataatagttagctatttataattaatatagcgtccacttgtttctctcacagaattttttggttcttgcgttcaagccggctgtaggtttataacccacttctcctctctttcctctcttctctcctccacctcagcatttagccgatttatagcctcctattatacttgctctaagggcctgccgaatctccaacgtgcttcagctttttagcgacatgcaaaacaagataagctattagcatattacaactttaaaaataagtttatttttatttgattatttttaaggaacttttatgtgaaatgttttttttaagaaaaaacatagtagtactccctctatcccaaaatgtataagatttgggtggatgtgacacatcctagtactacaaatttggacaagctagaatgtgtcgcatccactcagaatcccttatattttgggacggagggaatatcatttaaccatttgaaaagcataacataaaacagggaagtttagttgggagttgaagttgtagtttgttaattagtcagtagaatgaaggcaaattttgctacagaacatcgcgacttcgtggttttagctgtaggacaccgcacaaactctttttttattttgggggggggggcactttctaaacatggttatttgccagtggacaccacacccattaaaatattaattttcggttgaatatgagagacaaatagcgtgaaaggtcaaaaatgcccctgacctcacttgtcatattcttcttcctccttatttcccttttctcctagtcccacgccgccaccgatgacggtgtccccaccaccgacttccggaacgacgaccgcgtcgagctggcgacgctggaatcggacaggatgtgctgcaccctgaggcgacgcggcctgctgtggggatagccctcacctccacaggaggaggcgacgactactgctactgctgtgactatcctgtgctgcaccctgaggcgacgcagcctgccgtggggagcccttacctccacaggaggagccggtgactgctgctactgctgtgactacaagggcggtggcggtggcagcgtcgggcggtgtttgggaagcaacagcgttagtggtgggagtgaggacgatgccgtggacaatggaggcgccggcacggccgtggtcaggagcaccgacgcggtgtggtgggacatggcgagagatgggtggccttgcacgaaagcgggagagcgtggcagcggtgaggcggagggagcgaagttagtcagcgtgggccgaggcgagttgctgccacaatgctaccgcacccttcatgtgtcgccactgctccttgcactcccgcaccgtgtcctcctgctgcaccttggatgccgtgcatcccgtcgccccccgtgaactagtgacgctaccgccaacttcggcctgtgcaccgcatgctgccgtcggtgctccccgcttccacctctcgcgcctcacttgatctacgccacaactgtcaccgctaatgtcatcgcttcgggcgtgggcgtcgttgcatggtgtccccgcgccgccgccgtcctgattgtcccctttcctccgccgtgcctctgtcatcgtcgcacactccgcctgctagttgcgccgccactcgcggctcgcagtcatcactagagaaaagagaaaggagggagatagaggatgagataaggaagaagagaggatgaggaaaagaaaggatgggcaatttggtcactccgcataaaaatataggccccatatcgcctcgttagcacgaatacattattttaatgggcgcggtatctgctggtaaataaccacgtttagagagtgtttttccttaaaagtgagttcgtcttgttgttctacagctaaaaccacaaagtcgcgatgtcctgtagcaaaatttacctagaatgaaagaatggtgacatatcataaatctatatatagaaagatacggagaccaagttgattatacaataattaacaaattagaatatacgaattgaagaaattttaaaataaagtgccagtgtcctcagttcctcactacctgatcaacaagcatgaggagagacttcaacgaaaatttgctactgcaaatgcggaagaaaaggtcgatccaatcatctaatcatcgcaacattctaactaaatggatatgctgacaagcaatagaaagacataattactgctactcctggtgatatggagtattggtgtcttcactcttcaggtgatatggagtattcctgctactccagtttgcagccaacacattcctgctacttcagtgtgaactcaacgtttggtaggcagaattctaagtgctcagtcataaagtagcaagcataatctgaagtagtagcattacttgtttatgaaaaacagaaatgtaattattgttccaaattatgcacacttactatgctaagtgcagtactaaactactaaaccacaacccgtgcaaaagactcatacaaaatactaacaagcgcaatccatggacaaatcttaatgcatgtcaaaactacaccaaacatataaagcaggacctctctagccacacaaacttttgagtctaaactttacctaaccagaacacacaaagcaaagcgagcaaaagacattttttagataatggaagcttttattgaacctagtcaattacatcaagatgatataattaatctgagaacacttctggcctttgcataattaagatgcacacagccaaacatacaaaaccacactcaaatggaaaaaagaatgacatggagtattgaagaccatcaatccaggggcgtagctacggggggtgcctgagggggccaacatccccctatccaaccccctccctgttgtactaactagcgcattagcatgttaattagtccattatcaataaacatgatatagaaaattaattaataagaaagagacaaagagacaacgcaaatcaactcctcgtcttcattgcttcggcttcacatgtctctccgtactcccattgcgtctcgctgtcgagcatggtgtctcaagtctcaaactgttaaacattgaatgatacaactaaagagctaaattcaagcttttttatagcagaacacatgatattttgttttatcgtcggtattgcttactctgacttacgacttgtttgtcctgcccacacccccctaacgataaatcctggcttcgcccctgcatcaatccaaagactaaattgccaccaatgaacaactctttggccatctcctccaaaagcatagagtattaagagttcaccaaccctaagactagatcgtcacccatatccctaggtaaataattccttgaccaccttcttcaaatggagacaagctccaaatccggcgaaccaggcttctgtaggatagcccatgtacgaagccaatggacaagagaatatataacctgcaaagatgaaggtatgacttttttttttaccaaaaaccacattattcatgcatagccaaagagaccaacaagtagcagctgctcctaataggacacgtgctttcaaattattatgaattccagcaagccagctcctaaacatatgcgctacataatgcggtggaggaagtccagatgctacttggatgatggaccaaataaaatgggcaaaacaacattcgaagaaaagatgtctaattatctcgtcattgcaacaaaaacaacagttcttattgccttgccattttctttttgtcaaattatcctttgttaacaccactccacacacaagtaccaaagaaaaatcttaacttttaggggtatctttaatttccaaagacgcttattattgttgggaatattgatgtgagttagagctagataatgagacttctccgaaaactccctatttgaggttaagttccaatgaaactcatattgctcctaagttaattgaaaaccagtgatgcgtggtaataaattattccacaccgctagttttgatcctataaggtctcttctccatgaaaaagatggaggattgttttcgaagacttgtgcaactgtagcctgcatatgcctaactatgttgtaaaggcaaggatactgttatttcaaagttgaattgcctaaccatttgtcttcccaaaacctgatttgggagccatctttaattataaaggatccaaaatggagaaattcatgtttcaccttcatgaggctagaccaaaagtgtgattcctcggccttccactaaacttcagaaagaggtttatcacttagatacttattacttatcaactgttgccaagccccttccgtggagagtaacttaatcacttactaagcagagccatattcttaatttccaaatcatgaattcccaaccccccttgttccttggggcaacacagtatgttccatttagcaatatgatactttttttttctgaccatcactttgccagtacaacctgaagcgaaagtagtcaagctttgtaagtatccctgttggtatgacaaagaaggacatcagatacaacaggaggctacttagcaccgagttaatgagcgagcaaaaacatatagtacatcacgacataatcaacgggttaattccagttaaagcttgacaatgataatattagtgcaaacatctttactcgtcactaatagatcataacagaaccaactccagagtttggcacgacctaattatttatcagtagaaacaggagcaaaccaaaagtgatagaaacatagtggattgacttagaactagatttctttagcacactttcatctagtgcaccttagctattgattttactcgctgtagctgctctttcgctgttgcccttcatcttagctacacatccattagcttcaacacgagcatttcttcatttcctcttctcaagagtaaaattcttctcatgtgttgtgtattcattttcccagttctggacctgatagtcgtgcttcatgtaggtcttttcccagttagaaacctgatagggaacacctaccgctaccccaaccatgacagaagatcgccaaggttcaggttctcaattttcccgcgccctccaagcactcaatccttcccattatatcacaacaaccacctattctcatcatatcacaacaaccacccgaattattgggtaaaaaacaaaacaaattatacacaaggatgtcaaaccttaaaagattgtcaataagaattactaatgaaaaccacccaaagctttcaaacacacgacgctattcgtgtctcattcatattcctagtcctattttaataaaattactatatcatatgatttttcaaatacattgtttcaatatgttgaaacatatttttgctaatatttttaaggccagttaacatattcatcttctataaataaggtcaattttcattaacgaataaatatgtaatcatatagtgttaattgttaaacgctaattttctaaagctcttatttcgttcaacattaattttctaaagctcttatttcatttcaattgtacgtaagagaaggagtcatgatgtttatactttacacctatttatgcaatgcgacctatagctattttcacacttctcaatatattacaaattataataatacataagtaactaattctttattatgagaccatttacaaatatgcaactctccaatcaatatttatattgtaacataaggattgttatgcggcttatgcccattagatttgtaacaaatgttgtattctgcttttttctaatttaattctagtatttcttggactatctcattatttctacatatggaattaatattgtacactcaatgtgttatagacaactctagtacaacacagaggtaaaatgcttactcatttgcatttgtgtatatggtatacctatgcctagaagattactagatatacataatgtattatagcatatttcagggcagaattaacatagttattatatatactagttgataccctgcattttgctgcggggtatatggatgaatgcatgccactagatatacgtaatgtattatagcatatttcagggcagaattaacatagttattatatatactagttgataccctgcattttgctgcggggtatatggatgaatgcatgccatacattatagaaatggtatatgtatatgtttaaataatatgaaaataaagttaaaatattgatttgacattgcttgcatattgagttctgaaaacacaacaaaattttaaatgatatatcatgtttacatgatatttaagatagtctagataataattgctagtagatgataatgtgacacacttacatgtaatttaaaatactctagaaaataattgctagtgggtgattatgtgacacacttgcatgttgagctttagaagttagtgggcatcaactttatactaagataggataagttttatcactactctggtgtttgaaactgatgaagatgaagattgagttggttcacgtaaaatgagaaagctattagcacatggttaattaagttttaattattacaagttttaatgcaatatatttgatattttaaagcaacttatatatagaaagttttcgcacggaacacaccgtttagtagtttgaaaagcgtgctaacggaaatcgaggtaaaatatgtatcttagtgagaaaagaacattgttaggaaagttttttttttcattttttaagaaactaatcataagcaacatgctttacaacaaaataaaaatatttatatatatgtgaaagatcaattggagatcttgaaaagctcttgtaccaattaaacatgcactaaggactatagatgtcccctagagagggtggatgaatacgcatttcctacgattacaaaaacttgcagcatgttgaccagacattccgatgccgctatagatagtttgacaacacacagtgtcgtacaatccgacaacaaccggataatctgatcaaacacagagaaaaaaggagaactagcctactagagtgtagacccagacagtccgataccgcaccggacaatgttcgaaaatcctagagctattggacaattcggtcctatagagaaattgaaacctatgggagattaagtactttgcacactagttataaactagaactaggaggtggtcaacaagatacaagcgtgcaacaataagatcaccaaatagctcaacatgaaagcataaatgaaaagtgaagatagcaatagacaatgcactgactttgtttactaaagttcggatccaacctgtacacatctccattgagggtcttagaaaagtcggatccctttttcctcttccaagctaccacctccctattgagttgtgatccaaattcatttgtacttaataaaggccagcttctgtcgtagtgaagcggaggcctattcctgggaggcttgggcctaaacggatcgtcatcccttttagggttccaccatatatatacctcttgtaagccaccgtgcggcgatgtaacctcaccccagatatagtgaagatattttgctggttggcgcccgtggtttttttctctcctgttttaggagggttttccacgttaaaatctcgtgtcttctatgattaatctattgttctttatcgtttgtttgcctatcgtttcctaacactcccatggtgtattggtctcttcaagcaatcaccaagggcaagctcatcctccaagcgatccacttggtccaaagctcaaacgccacacaatttccctccaatgaagctttctctaccaagcacccaccgagatgtagcccagcttccactatttcctcttcccttggagaggcaaggtatcaaccttcacaaacttctcttgggcataccacactccacttggttgcctgcaggattctccttctcctcttacaatggctcaagttcttcaacttgaagcataccaactccaaattactcccaaatccactccctaacaagcacacaagctctagccttcttataaatgtgcaagaactcactctcaaggataaactctccctaaattcctaaaaggatattcaattagctcttggggctcttgggcaagcactcagcttgctcaagtagaagagggtccaaacgtattcaaacaactccatggcaccgactatatatagcctcaaaggaccctttgatatcgactgaagttctcactgcagggagtgcagcaattacctgtcctctacagggtatgaagtggtcagagcacaagaggctcctctccaccaaagttaatttgcaacctgacgcaaaactgatggaattggaaaggtgagtaaacgatattataaagactgcactgtttaaagagggctctcacactggattagtaactagcaagtctactgtaataagtgtgcatacccccatttgaatccagtaggctgcatttcaaattgatggaccatgtttcttgtttcatttatccaatggattttaaaacttgaaaaattgtttggcgctagctctacagtatatataatcgtgatgatcaaatcatcagttaataacacccctacccataccctttttctcatgttttttgttttttttgggctccttggaatgctgccacgctgttttattcgaagcagtgctcctcaattgggtaagggagactgacaacactctattccaacagtcatcccacagtttgaataaagcaagcggtcccctcgtgtccggtgtgcttcactggttatgggcggtgagggcttgcatggaggccacgcaccaccctacatatttgtcataaaagcccctgataatttgagaaagtaagaagcaacccttccatcatatttttctcgttataacttttatgaaaataaccatatacttctaagaaatataacacgaagaagagaaaattcggtttttaaggatggcgctgtaatccgaaccagaataaggatatttttgcaaaataacctcccaaacatatctcctcttgtctacctacctcatccccaacccgtcactggcgctactcccctcacgcgcctcctcctagcgccaccgccgctccaggactcctcctcctcagccttgctcgcgcccctcgtcatcgccgtccaccccatctcctgttgccaccctcctcccatgcccataaacgccgtcataatcccccacatccctacctccgtcatgcgtgcccgcgtgagccgtcgccgtctagctcatagatccatcaccaagcaatgcttctttcgtccggtttgtcagtgcagcgataacccagtcgacgtgctcttcgggcagcggaccgccacatcaggtctatggaagcctcaagcctgggaggtgcaacgccgtcggatctggcagcggcaagtgcagtttgggtacagctgcaccccctgcaattgcatttcaagcactatcctcctggctgccgttccacctcttccctatcctcgtcgaacaaagaatgcgataaagtgagcgagcaagtgaaacgagatgagacttcacggtgcgcctcctacgacgcgccatcgcccgcgacgtgctagtcccatcatcaacgcggcggcgacgccaaggtacgagagccgcgcgctggtggtggccagatccagacattacctgcccgcacaggcggcgcaaacagctgacgcagcatgggaacatcgggtatatatgtccttcgcagactcatctccatggataagaagcctgcgaggaatctcaccggctttcttgccaccactgctggcactgtcgtgaataacaacaatagtggaaagttgcctggtctatcacggaagttgttacagaaggcgctgtcagagcacaagaagaacgcactgacaaaggtcaagagcagtggcaacacgcgggagcactccatggtgctgcgcgacgagtgggaggacgagatcgctacactccgcctccagttcgagcagaaggacattgaggtacacacatagacacatccacctcttccccactcctctgtgccttctgtgaattccaacgtggccttacattgattgcagggacactaaaactaatctaattaatcttacagggacaacaatgtagctacacaagtctcatgcaacaaatattgaagacaccaaggtgtagtaaatggcaatctttatgattttgctttccacagatatcttacatacaccatctggctttgaggtaagaaatatggcattatctcaggcttttaaaaaacataaagaaaaggatagtataacttgaataaatgtaagatgttatctacactactgctaattctttatgatggtatattgatattcttgtagaactcaatgatatcaacaagcaaataggctttttgatatgggcaattggctgataaaacaagagaaggggtttaggtaaactacacacatcattacatgcatgtcataaaatattctgcaacactgaaaagtaacaaaattttgcctatttatttttcaatttgattctgttttgtttcaaggcaatttctgaacaatggacaagcaacaatattgatgaattacaacagcaatagctacaatcagcaaggcttctcttctaatcacaccatgctacaaacaacattcagatttaacacgcaaaaatatgcagtttagcaaagcttccctacatgtacttgaaaaaaaagagccatccaaaaaatatactgatacaaataaaaactccatacccatattcaaaaatcccagctagaaccaaacctaaaaccaaaaacagagggttcaaaaccagtagatgaatctgtatgccacagcacactcacaacatatacagatatacaaatcaacataagcagggcccccctcaaaaccaaagaatataaaaatgggggaaaaaaagaaacccaaacacagggaaaaatcaccttgaatcccaaagcagatagagcaagcgtgggatctaaaagcaaaccatctcaaactagaagaaatattccaaaaacaaaaccaaataacaggaggaaaatgaagggaaaaataacctaaaaccacaaaggggtggagcaaacaaggagcagatccaggctggagatgggaggaactaaaactagagaaaacacagtaggcaacgagaaacgcagccaccgagcctgtcgcctccgcctaggcctcattgccaccaagatgtctctaaagaaagccgaaagagacaagactatgacgcggtatttcactgttcaaaataggggaaatgctaacaggccggcccaaagtgaaacccaaaatgctcaaagcggattcggacccaaaccgtaacacgaatcttggcacaagactgaatggatgaaaaattgaagttttggacctcgaaagctatcaacagcaccatagcaaatctattaaaataaatggtttgattaaaaaatgattagcaaacttacatggtatgttcctccaatgggtataaaggtagaaggaagttcattagttcaactgaataaagaacataaaaggaaaatgtaatgtcaataagttaataagctttataaaacaaaaatcatgtcttgtcttccgatagttctgccttaattgaaaaagacagtgtttttataaactcggcaaatttcttttgatctaattcagctttgatcttctgaaagttactgttgaagtcatgtagaaaaatttccacctcaacctctaaaaccttgaaaatgaataaacttttgctgatttgaagtccaatgcgagttaca

SEQ ID NO: 16043 - DNA, 8689 bp, Oryza sativa
ttcctgcagcccttggaaatataaattgaagatgttttcgcggtccgttatccgtgtttgagtcggttataaaaattggaaatgtttccgtggttcgtcatccgtgtttgagtcggttttaattttatgttttggttttaatctatatttcttctctatctctatctctactattataaaaattgaagatgtttttgctggtattttggtacatcatccgtgtatgagtcagtttttaagttcgtttgcttttggcaatacatagccatatttgagttggtttttaatatcgttcgcttttgataatacagaaggaattatataagaaatctgttttaaaaaaactcgtatgctaacttgagatgatcggactcctaactgcaactcatgattttctaaaagtatatatccaagcgaactcacacagtgaatttcatcttaactaaatcatattataataataataagattaaaatagacttcacccgttgcaatgcacgggtattttttctttttctactaaaataagaagataaagataagcgatggtgaccggacgttttggcccagctcaaaagaaatggaaaaggatcgcatttgtggaggtaatttaggaccatcccaactgcagcggctcaacatcaatttgaacataattcggagaagatcggagttcgatttggcatcggtttgaatttttatttttccaattctaaacctatccatatacctgatacacgcactcgtgtagtcccgaggaggcgcaagatccccaccaactcgggagcaacaggggaggaagacagacacgtacgagccaaagatagatggcgccctggagcaccatagcagctcaccgtagggataattctttgttgccatgaagaacatgtggtaggccaacgccacagagaaccgcccatcactcgtcagtttccatctgatcgatctcatccgccgactcaagttttctctccgtttctccagctcctgatacaccaacagaggttgaggaaattagggagccaaaatacactctactgttgtacagacaagaattaacatacgaactaattaacaagctgctatttagagcaagtttaatagtatagccaactactcactccaattcatctatagctaatctaatagctcattcatacaatagttacatatatataatacactattaatacttggtcccacctgtcatacatacactgtgtcttggagtctgtgctatagctggctacaaatctgtagtccactgcttttctctctccttatttatcttcttaaaatatgtttgtagctggcttatagtctgctattgtacctgctcttaacagccagcgaatcagcaactagtaagaaaaatcaggtgacatgtaccaacattgtgcaataaaaaccaaccaatggaaggaaaatgtaatacttagtacttatctatttcacagtcggatattgattatcttgtgcccctgaccgactccgatccgaggggaaattaaagtggaataaaatctatataagtatttttgagctacctacccacggagagagatagagagatagaagaggatggcgatggcgcggtcggcgttggctagggtttcccgccgcctcttcggatccgtgatgtgcccacgcccactcatggggatccccccagcctcgccgcttcccggaccagcagcagcgcgcacctggcccatccctaacctccaggtgaggtgatcgattcactttaggcgcttggtctattcagatatactacttccttcgtttcacaatgtaagtcattctagcattttctatgttcatattaatgctaatgaatctagatagatttatatgtttagattcattaacatcaatatgaatgtggaaaatgctagaatgacttacattgtgaaacggagggagtatttgttaagtttggtcaatgcagtgaagacgcaacccccactgtttttcacaatccctgcaggttttcagtgaattatcaacgcttttaagttctgcctgattttcctttttttcttctttggtatcaatgatttgtgttttgcatggcgctggctttcttgagttctagtttcacggaatcattctagtttacaattgaggtttcactattgtttgtatgggttccataacattggagtaccacccaatggagagcttgatagttttgcatgtgaaaatgtccacttggtcatgggatttctctgcaattgaaagtaggttaagtgatagtactgtcttccttgtcccactattttttcccaactgccggtacaaactgtaaggatctgcgctatgcaatgtaggagtattcatcttcttacaaagaaacagtttctctttgcccatcaccctataacttgtggttagggtgcaattacaacttggatgttggaaaaattttcctatgtggtcctctgaatcaaagaaatatctatccaaaaatcctataaattttctttcgattggctcaaaacataagggttttggaggaattttaatatcaggcccaaccttcttggggaaaaaaaatcctttttgtgttatctcttctctactattataaagattgaaaatgttttttccggtattttggtacgtcatccgtattttgagtcggtttctaagtccgttcgcttgtgctaatacaaatccgcgtttgagttggattttaagcttgtttgcttttagaaatacaaaaggagtcataagaaatctcttttaaaaaacaccacatgctaacttaaggtgaaagtcatactcctaattgtaactcatgattttctaaaatatatatatatattcaagtgaattctcacactgaatttaccctagctaaatcgtataacaataataaaattaaaattgcattcacccgttgcaacgcacgggcattcttctagtctcttctgaattctatgtttttatgcactctacagttattcctacggttgtgcactctaatcttgcatttttttctctatttctatgtgtctgagaatcctcaaaagaaaaaaaaagatcctacattatgaaggaccctttgatatcgaccgaagttctcactgcggggagtgcagcaattccctgtcctctacaggggaaccaagggtatgaagtggtcagagcacaagaggctcctctccaccaaagttaatttgcaacctgacgcaaaacttatggaattggaaaggtgagtaaacgatattataaagactgcactgtttaaagagggctctcacactggattagtaactagcaagcctactacaatcagtgtgcatacccccatttgaatccagtaggctgcatttcaaattgatggaccatgtttcttgtttcatttatccaatggattctaaaacttgaaaaattgtttggcgctagctctacagtatatataaccgtgatgatcaaatatcaatagtaggatgctagggctatagtcttataattgttttcatgctatattaatatgcattctctgctaccatgtgtatgcaagcattgtgtactagttatccatttcaatcacatatacttttgtaggtcggcagtcaagaggacaacagcatggatcgataaaccgtgcaacgcacgtgtggtgattttagtgttttgcactggtgctgcagttgcttacgcttggatggcgagactcgctttttttcccgaaagagctaaacttgatggtgatggaaaagctcatccgattaagcacgcatgacgacttagtaacttaattgcttgttgtcaggcagagtcaattacgtttcatgtccgtgagaaagtgtagttggacggtcgagttctaatcgttccggcaaagagcattattttatctccttctccctcctctgtttcatattgtaagtagcccgtttcatattgtaagtagctcttaactttttctctagttaaatttttttagttcattaagtgtaacattgaatatattttgataataagttggtttgtgttgaaaatattgttacaaccaatctactccgtaattattattgataacttatctagttggacggttaattacctgatgaatcatttgtcagttgattggctttacttccccacaaaagaaaaacaagagtttattggaattacaggtagatgaggggaagaactacactttagtggaaacaaaaaggagaacaattcagagttggaaaaaaaaaacaagttctcgatatacatcaacaagagtagttttggatttacttcaaatgatggtgaccacgaacaagatataggcaagcggcaggaacaaaaacaaacaaattttatctacactgaacaagtaaatgtcagatcgtcctggttggaatccgtcagaccgtctcagacctctgagcaagtagaagtgcctcaagttcttctctccgtttctccagctcctgatacaacagaggtcgacgaaattagggaacgaaaatacactctactgttgtacaaacaagaattaacatacgaactaacagaatatttagcagcgaatcagcaactagcaagaaaaatcaggtgccatagaccaacattgtgcaataaaaaccaccatattctgaccaatggaaggaaaatgtaatacttatatcctatttcacagtaggatattgattatcttgtgagcacgcatttacttgatgtcatatgttgtgactcaaaatacaggctcagtgtcatgattactaaatgaaattaggaaccaaagtactcacctccagatccttgactgcttgttctcgtgatgttgctttctgctgcctagaacgcttcaacacaccaatgcacagcacaccctacatattcatcaaagcttttagtacacataagaaaacatgtggcatgcagtataaacagggtcaaaattggattatttgttcaatgtgcattgcaagatcatcctctactacatatcattagaggcaatatctcattttatgatgctgatgcctgtatggaaaacgtctgaaaccacatttcaagtttacaacttcataatgttattagtcatttaaacaagctcaattagctactgaactaactgtccaaacaacaatgagaacaaaattgcaaggcatcaaattattctgccccagtggggaattattttctgctgaatttaatatctaggcatctgaaactaaccatgttttaaagttcagaattttaaaggctattacatggtactagtaatatttaaacacaaatgaacacccaaaattttgtagactcaccgagattatatagatcagtccacatgcaagaagcagatagctggcaatgtcttcaagcaaaatcaaatcacccctttcaacatttgggtatgcctttgtcatgacagcaacactgcaacaaaccaaatgaaaaacattaatccaccacaggaacagaatggagtacaattcaacaaggacaataattattattgaagtttttctactattcatctgttcattacactgttcacatgcaaaaacattacagttaagatgttcacgatcccaaaatttatggtgcagttggtgcatgcaacagttgtaattcatggttcatgtactgtgagtgcaaagaggccaatatggtgaatggcagttgggtgattacggttttactctttattcatggactaaacaagttctctgcagaagaatttttaaaagagactcaaatttgtacgcaaaatactactgagttgagagtatgttaatgtactaatgttttgagacctaggtaagcatgtgtgagatatttccagcaaaacttaggtgcatcctgtgttcaataagccacaaagggattcttgctgttcatcctagaatgggaaacctctggttcacagattgatgcaaatcaacatgtgagaagtacaacacactgagaggagcacagttcataatataccttatcaccttaatacagaactgttaagaggttatcactcatcaatataatgaaacataggtgctagctgggcaggcttaaccactttatatagaaatagcaccaatatggaaagagcatatcatattgtgaatttgtgatagtccattttagagccaggttctgaaggtactctgtgctcgtcatgttatatcaaaacaacatggatgtagagtgtttgtaaaatattcaacaagtattcttgcaccctgttacaggcttacagctaacccacctgtttgaaatttaataacccagctaactaattttattgatcttcaatttctcctattacttgcaaaaaagcaacaagaatgaagcatatgcactgagtagtctgtgcaatcatatattccaataaaaatgcagaaattgagaaacagatttgggatcataatagaaggaataggaatctaaattcctccaggatacttacaagatctgtaacattccccttgcaggccagtactccaaaatctagtcacatcaaagagtataaaacatcagtaaactaacgggtcaataaaattatgaaaaaaaaaaactcgagctaactagttgaaagatactgatacccacacaagacaagtctgcaaacgttccatagtattaccaaacaaataattgtgaggattcagcagaacaagcaagatttggaggctcaaatgcaaaattattcacaggttaacagcttagcagtaaataatttggatttatccacaaaacagctcatataggaaaaaaacaagctttacataattaatctatgtgtaattaacaaacatactcatatgaaacaacaagtgcaatcgcaaaacaaaatattactgcaaagttcattgccatctgcgaagtggcactattaatgaacaaattggacactaataatcgaaggacgccatccaataaatattttttttgctgtaactcaagaatacttattgaatcggaaactgtagcacctgaaatgtaaatcgagtgaaaaatggcgtgcaaaacaagaaggaagaagcaaaaccttgcagaatttcatgatgaatccccactctgtctcgaccacccccacgaacagcgagatgaccaccgcgtagcaccggaatatgcccccgaatatctgcaacccaaccaaacagcccaaatcagctcgtagccgcgccatggccggaaaaacgaaaaggaaaggcaggggcctacgcacgtcgaggccggtgcggaaggactgcacggcggagaggacgttgacggcgacgcagagcgcggcggtggcggcggtgacgacattaaagcagcggcacacgatgaggagcgggtcggacctggaccgcgtggggcgccgccgccgcggcgtgtccccgccgccggagagctgctgctgcgcctccggcgcggcgccgccgcctcccgacgccgacgcggcccccttggccatggctagcctttagggttagggttagggttagatttccgagaagcttcgagctcgaggcctcctcctcctcctttagtggtgaggtggccttcttctcttctattctcttctcatataaagcggaggtggaagaagacgcggtgcaccgtggacccggtccacgggtgtacgtggaccaggagactcaggctcagcggtgttggtgcacccggtccagggaaagggtggggtgtgaggggagggtggcagaatgtggggccagatgcgtcccgccacgtgggcgagtgaggtggagggatgagccaatgggaggtgagctcgtggtagctgacgtcatgaatgctccatgctgttaggtatgggaagcattgataaataaatctagtactacctcagtgcagccgtggatatccgtgtctaatgtttaaccgtccgtcttatttaaaaaatttacgaaaaatttaaaaatatttagtcacacataaagtactatttatgtttatcatctaatagcaataaaaatactaataaaaattttttcaaataaaagaacagtcaaacgttgaatgtgaatagtgtaaaactgcacttattttgggacggggattagaatattccgatggatgatgattaaatttccagaacgaggattagtagtgtacatgtgttcaaatgaggacagtaggagcatgagagttgctcagatgattcagcatttcaagaagtgtgttcgatttttgttcgctttctgaataagtattactagcagttttaggttgtgttcttaagctatggttattaacctccactctattatctcccgcgcgcacgtttccttaactagtaaatagtaaatagtattctttttaaaaaagaatctataaacaggctgctaaaaattcatattaatgaggttaattaggttttgaagcctaaaaagctcaagattacataaaatggtaaaagtataatttaatcatggaaattgcaagttaggcttcaacctgaacaaggtatagttatatatggaagcaagggataacttgctaactggtattccgtgcagctcactctgctagtttatgtttttttctctttttctatcgtagcaaatgcacatccattctacctatgcaacctctgcactgcaatgcagtcagctaaggtggtgtttggaaaggagggactaaagtttagtccctctcacaaaaattttagttcctctcatagagacttatgcttttgtgagagggactaaaatttggctgcagg

SEQ ID NO: 16044 - DNA, 7561 bp, Oryza sativa
cacctaaggttgtgtttagatgtagggatgtaaagttttggcgtgtcaaatcggatatacggatatacacttgaagtattaaacgtagagtaataacaaaataaattatagaatccgcctgcaaactgcgagatgaatttattaagcctaattaatccgccattaacaaatgtttactatagcaccacattgtcagatcatggagcaattaggcttaaaagattcgtctcgcaatttacacccaatctatataattagttttttttatatttaatacttcatgcatgtgttcagatatattgtaatcttttaaaattaatttcattattacataatggtaatagatttgatcacaacgcagtgtacatgacactgctgagtacatgagcttaatgcatgaaacaacagaagttccatccttctttgacacggacatttttaccataaacttttcgcatcatttcgaacaatgcaagcaaatcaattccaagtccttactccccaggtgcaaatgcagcggcgtcaaaggtcttgcagattccggcgccactcttgaaggtcaccttctccggcgacgcctcggcggcgtacacctcgacgatgctgagccagagcatcagctccttggtcttcacgccggtgatcttcttcagcttccccttctcgacgaacgccgtcacctcaccggcgtaggacacgttctgcttgatcttcttgaagacgtgctcgatcttcttcttcctctgcaccatccagatgaacccggtctcccggttgtagccgaactcctcgatgtcctccaatggcaggagccccatggggaggccgagctctcccagaagctcgatggacttcttcctgcagatgtcatcgccgttgacgatctccgcgccggcgcggtggctctcgatctgtgaagccattggagcggtagtttcagagaaaattagaagagaagtttttggtttggaaatgtgttgtgttttgtttgtgcaaatgggttgagagattggtgtggtggaagatgagatgtagggttctgtttatatagagttcccaagtatcatgttaatttgtttgttcattgtgatgaagatctgtccaggctgcagatgttgcgagatcccccatgactgagaatctgagatttagtgtatcccatagtgtcatgatattgaagaaaccttatgctctttataataaaatcagtcattatcctagagtgttgtcgtcacgtcgtgcattaataaatataagcaagtataaacgtgtatcatcaactattaccattgtatcaatgagtatcatccaaagtgccattctgtatcatcaaaggtatcctgaagattttaatagcttgagacgaaaacttcattgattctcaaattaaaaaggaaaagtagaaaagaaaaagagataaataaacaactcccttaccaggcgtgtgtttctagaaaaaaaaagtctctctcttcccaggcgaaggttggagtgatcgctgatgatagcaaattccaaccaaaattcagcattcagagatgcttaatggagaacttaatttgcagagaaatacgaagccatgttatacttatgtcgcgttgagttgagggattcagagatgcttgggaaagttaagggccgctgtctcacggcggacaacctggcgaagagaaactggccgcatgacgccatttgcttcctatgccaacgcagaacgaagactgtcatcatttgcttgtgtcctatgattatatggcggcggtttggcgcaagctgagacgttggtgcaacattaacattgcaatccctgcggaagatggcaggccgcttgcagattggtggatcgcgacaagacggcgttttcagaacacgtatagaacggatttcgatagtctgttcatactaatttgttggcttatctggaaagagagaaatacaaggatctttcaacacatcgccaagtcggttgaccggctagcggatgacatcaacgaggaaatcgcaatttggagggcagcagggatttttttcccaggctagcgagtaatcccgattagaggcgggacttgccccattttttccttttctttccgggcttgagtttgcttgagaccggcgcgacatccttcatgtcgttgtaattaaaactttatttccccccgatcttaatgaaattggccggcctagctttggccgtcccggcaaaaaaaaaaagatgcttgggaaagttgcagaatgtctgaataaactcagggatgaaagcatagcgattctccgatgaaccaactccgtggcggtggctgcattacctctcttcttctctggatccggcgaccgtgaagcagcggcgctccggttggctgactatgacccccttgggccgttcgataaaggccgtgcggcccagatagaagaattatttacgacccgtgggcctcacgagcaggcccatcttggccaatcgcgcttcaacgccggcatgtgaatcaaaggggttcggcgtttaaaattccgacccctttcgagggatctctttccgccgtttgatcaccctgtacggtccagatgatccaacgatttcttgagattatttcagcttacttgcccatcgtggtgatcatgaaaacatttcatcattctgatgcactctgttctgctgtgttgcggttaatttgcgtctccaagagtagttctaagttgttgcatcactttgttgcttgacttgtaagtctgaatttcaagttgcctacagtaagggctgaaactgtataatatctgccactcacccagtagtataagattttactgaaacacgtcgcggtgttggggttgtgacttgtgaggattggtcgcttgctgatgcttgcgaattccaagtaaaattcagcattttatccatacatgcaacctaaagcgtactcgtcgccggtggccggctgcaaatctatctgatcaaggcgcaaagtgggttcggagtttaaatttccgaacccgctcggtatcttttgatgaacaaatgcttacgaaatatgcaggctccctatatctcgctttatatatgttcgtggcagtgattttcatatctggtagtcctatactttcccatgttccctggcgatcaggaattttgttgttgtgacgcacccagctttttggaatggatgggcttacatgaacactggtttgatcaacgttttggaatgaatgaattcttcaacatttgtatttggatgtagtcgtatctggcacaatggctcgaggacaatcagtacgtcaaagagactaatacgcaaaggttttggattagctacaggagactgaaaaacttgcagtttgctgcagagtggcatcaaagcacaaaacaaatcatcaagcgaatgtgctatatccattcagtgttttcagaatagctacaggaacaggatcaaacatctcaattcaccatatttacccatctgaaaggataaaaagaaagaacccaacagaacctgctcataaagttcagagaagatgaagacgacacagttatgagttatcgacatggctcacctggcagatgggacaacccagaaccaatagaattttcaacaagttaaatcactcctagttactggcagtgtgcactagtctatcaaagcttacaattttttaagtggcctgtcccagtgttcattaaccaagttgactagggtcttgtgcaaaacagtggttttttaaaacatgaatagatacaggaatatactcatatatgtttgcaattgaatacaaaaagatggtagatgtaagatagtggctttaagcctttttacataattaatattatgagtcttgtcatcatttcttactccagcttattatagctgacctaagttcttactccccgagggcaaaagcagcggcatcgaaggtgtcagagagcccagttcccgtcttgaaggtgaccttctccggcgaggcatcggcgaggtagacctcgacgacgctgagccagagcagcagctccttggtcttcacgccggtgatcttcttcagcttccccttctcgacgaacgccgtgacctcacgggcataagacacagtctgcttgatcttcttgaaggtgtgctcgatcttcttcttcttctgcaccagccacatgaatccagtgtcccggttgtagccgaactcctcgatgtcctccaatggcaggaggcccttagggagaccgagctctcccagcagctcaatggacctcttcctgcagatggcatctccattgacgacctcagcaccggagcggtggttctcaatttgtgatgccattggatgtgtagtttcaggcaaagaagctttgggtttggagatgtgttgtgtgcaaatggttagagagattgttggtgatggaagatgagatatggggctctgtttatatagagttcgtactgataaagatctttgcagactgcttaggcaaaggttatgaactttggattccaacttgtttatacaccagccttttctgaccatgcagttgataactgcatagaaattctgacgcacaaagtccctgaccaagtccactaccgatgtaatacatacacttcttcagcaaaggatgactctttatttattcatttatttatttttgcaaggagccagagatgacttataccaattaattagcagtgttcaggtccaattcgttgggctcatgatcagtactccctccgtccccaaaaaaaagacaaaccctggtttccgtgtccaacgtttgaccgtccgtcttatttgaaaaaattgtgaaaaaaatttaaaaagataagtcacgcataaagtattaatcattttttatcatctaacaacaacgaaaatactaattataaaaaaatttcatataagacggacagtcaaacgttggcacgggaacccacagtttgcctcttttttttttttgggacggagggagtactagtctactagacactagtgccatatcaccaatcaagtatcaacatcatttcaatgttttcagaaaagctataggagcaaaaggcagagcagagcacaaaatcaaaatcataacattatcagctttttttttttgccaggtcggcagaaagagtggccgaccaaatttcattaaaatttagggagtttattacatggttcatttcacgacagtatcagcttcaatcagcaataaaaggcaaagtgctgtgttgtcaaagcggttcgatcacaaatgacaaactaatgccacagagttccacatgggaggcaggctagtctctactctatttacaacaaattcataccttgacgagtcatccagtcaaatccatttaagagtaacacggcctaaaaccccagttccattaactgaaactgttacagcagttttttttaccgaactgttacagcattttaaggcacagaaaatgcagtcaactctctcaggtttttgtgttgacgatttcgtcaagttataattcagtttatttttacagagcaaccttgtcactactcatccgagcaagaaccaagaacaaaggattcagtatatcaattccaagtgggcttccaaagccattatttctcacttgcattacagactgaaatcaaacatctcgaccgagcacggtcagatactactctcttgtctcttcatacttcaactccccatctgaaacgacaataaaaggactaggtctgtgtcacgccccaactagctccaaacggaaaccaatgtaagacgatccaaattaacctgctaacctataccagtcccagaaaatagagctggtacaataagaagataggatatcacaacgacagggattttattattatgagtagagatgcattcattgttggaactgcgaacagactccgagttcatagctgcattacaataaggcagaagtggagactaacccaaagccacaagtatgacttgggaactaagccgaaatcgtaatagggctcgaagctgcttgctcctagaaaaactcctcatcagctagatcaactatgtcaaaagagcaccatttttttcttccttctttgcttctggggactctggaatcatcgtcatgatgtgatctttcgagggatgtcgatatctctcccgcgcctagttgcaaaagacgctgctctctgggcagagcgtctgaagagatagaagataggattgtggtttccgtttggaaggaaatcatttcttcctcccttcgaatccccccctccccccgcgtgtaatataaacttttgtaattttcctccccttactaatgaaattcaggtggggatcctccccctccccctgaactttctaaaaaaaagagcaccattctcttaaaaaaagaccatcaatacaatgttatttattcgatctactccctccgttttttaatatatgatgccgttgacttcttgatacgtttgactatttgtcttattaaaaaaagtaattatcatttattttattgtgacgatttatcatcaaatgttctttaagcatgatttaactttttttatatctgcaaaaaaaattaaataaaacaaatggtcaaacatatataagaaaaatcaacaatgtcatatattaaaaaccgaagatagtatataataaacataattaattaaactatacataaattaatcccaaatcattccatgtatttctctacactcacctcttcttctttgtcatattcaactcctcaattagaagaaatcatttttttccttttttttaccctccaaagaacgggagttgttactgttaaaaaaaaaacattttcctccctaagcctgcgaagtgccaaggctagcaaaatcaaaacttcgatttttggatgggatctagtagtgtgtagcaatggcgacacgggatcgtctcctgttcgaagtgcatttggccggcgagctgctcgtcggcgggggacgaaaccaagtgcttggcggtcggcggtggagcagcaaaggcagccggatctggagattccggcgacaacggcggcgctgtacggacggcgatgcctctacaaccatcccgtctgacagacaggtgagccctgtctgctcttcattcaggtactcaatttccaaggatctggcgatctgtagcatattcagaatgttttatcttcccagagaaaaaggtgtattgatcccaaaaggaatttcagataagtggttagtcagctgctgtccaagtgattaaccatgattttttggtttaaggaatgtagcactattcagcagtttaaggagagagcaaaccacggtagaaaaataaaaacattttctgaatgtttcttctccgttcatatcatttttgcttgtcagaagaagtagaacaagtagaagtgaaacctgattgtatcaacctatataacgtggaactcaacaagtcaattatataatgttcagatcctttttttttctttgtcaccaactcaccattgtggaagtataaggccattgcattgtctagtatgggtgtactggtcaaccaaaaattcacatgcttttgaaacttgatgagagatctatgctggtcagtcttgtatggttatac

SEQ ID NO: 16045 - DNA, 11841 bp, Oryza sativa
caattagaaacacacatgcttttgaaacttgatgagaaatctatggccctgaaccaaatctctagaattttcttacttctttggttgtcttcgctgcatggtcaatcttgtataattatacaaaagcaaattgaaagaaaaacaaaacctctaattcaataggttgacgccaaaaatttgatctaagtttcagaaaaattctacatacgtgtggaattggtttatgtaaaccacagtgcaattctagcatgtggctcagtgactgccttagtttgtgctccgcttcagattatatagttcctctccagtctcagttcttgtcaacctattgtcgagagatcttcaaaaatattagattgcataattacagatggagacatttttgtctgcaattctgagtgatcttgccactagatccttatctttcctgatcaacaagtgctcaaaaccgacatcaccaaccatggaggagaaactgcaacggctccttcttcgggtccagatcatcttggaggaggcagaggaccgacatatcgcaaaccaagccatgctgcagcaactgaacatactgaggaaggagatgtacagagggtattacatcctggacaaattcagataccatgaccgtgaagaagaaaataccaaagatcaccaagtgagtaactctttcgcaccatccaagttcaatcctgccaagcgcattcggttctgcaggacaagtggccagagtttacaacagcagctgcagcaagttcttgccagccttgaagccaccattgaagataccagtgaatttttcatgttcctgaacagttatccacgcttgaaccgtcagccatatagcacgcacttggtcttagacaagtgcttgtttaatcgccagatggagatggagcacatcatgaacttcctgcttaaagacaatacaagtagtaatcaaaatccaggtgtcttgccaatcatcggtccaagcaatgttgggaagagcacgctgattgagcatgcctgcaatgatgaaagggtgcgtaaccacttctttcaaattgtgtgtttcagtgttgatgatcttgaagatgcaaacatggtgactcttcgaaattgtggtgtaatcaagcatcaaaaccatgcaactggtggagaaaggatactaatcatagtcgaactaatcagagacatcaatgagggggcatggagaagattgtactcagcttccaaaacttgtgccgcaaatggcagtaaaattatagtcgcaagccgatctgatagtatttcaagctttggaacaacacatgctctgagagtaaaattctttactcaagaagcttattggtactttttcaaggtgcgtacatttggaagcatggatgcagcggagcacccaaagctggaatcaatagccgtggatatggccatggaattgaatgggtgcttcatgggttcaaatgtttacagtgtacttcttagagaaaatttcaatgataagttttggagcatggccctggcaagaatcagagaattcaggaagctgaatctcttactctgcggtacaagtaattttgacgatccttggcagggtgttggacctgcatacgttaggagggtaaacaaaatttgctccggaaatcatgtgattcatgaggactataaagtatgttctattcagaacatgattcattgtcacacaaactctgctcacagtgaagatgatgttcccatggtgagtttgcaaaattttctcttcggaagtgttaaaccgcaaggaaaattcaatgttctcgcatggaggtctcaccttccacctcactacaactacattttcaactgtgaggtacggaggtcacatcatttgatctccaggaagaagagatctcagaagctttccacctgaccatctcagatgctgatgcaggggagcgttgccatgttgggccaaagcaaaatgagcattgtcattacagagtgcatgcatgatagtctctgattgcaagcacatgattggttcataggaaattatctgataattgtataggaaattgtcttgcctactccctctgttcaaaacaagacaactggatttgaacatgcagagggagtatgtgtggtataactagtttgtaaataattgtataggaaattatctgatactctcttttttttttgaaaaaaatgtcacatagaattaaatgattataatacatttgtctatgccaagttaattaaatccctacaagttaatagtgatgaaatcgaaattgcaaataaggagtttatgttttacacttttgttctggttattacagtaggccatgctaagactttgttcttaaaattaacatccccattttggaagcgttctcctttcacaaaattttcacgagtgaaggtgcctctgcctcctggaattaggttggagggacttttggtttaagcaatctctcaagtctctaaaaaataaaactgatattgactaactagcctattcaatcatgtccatatttttttctggttgcatactattcctgaaaacgatagcgttcacaatttttcaatcccataaataatggatgcattttcattggtcttctagtcaaacaagttggcataaaaaacacgttaccaaactacaacacttggcattacatgattcctctcaacctccttatctatccattgagtagtatctgcaaagtcttgatggggaaaagaaaaattggtttcattcccagaatgaatactctcttgtctgcaatcctaggagagcttgcaggtagatccttctccttcttgatagacagatgctactccaaactgccattgctgtccaacgaggagaagattcagagactcgaaaggatgctgcaccggctcgctgctgccatcgaagaggccgatgggaggagaatcttgaaccatggaatgcttcgacatatcaacattctgagacaagacatgtacagagggtactacattcttgactccttcagattccctgaagcccacgaggaggagatcatgagcgaaaacaatgacaaagtgagttactctttagctctgtctaaattcaactctgccaagcgtgctcgaatccctattggtactagacggcatggagatagaggagagcttgagcaggttattgacaacctagagatcgccatggctgacatggttgagttttttctgcttttgaacaactacccttccattcatcgtcagccatacaacagttacctgttcatggacaagtgcatgtttgggcgtcaaatggagatggagcatatcatcaatttcttgttgcgtcctgaacctccaaacacgctaagtgttgataaccttggtgtcctgccgatcattggtccagccaaagttgggaagagcacacttgtcaagcatgtttgcggcgatgagagggtgtgcaaccacttctctcgcatcctttttcttactgagggcgattttagagaggaaaaatcattgcttacactaagggattcaggagagataaggcatatgcacacatcatcatcggtttcaagtggaggagaaagattgttagtcatcattgagttagctgaggatgttgctgatgataaatggacaatgatgtgcgcttctttgcgaagttgcatttcagctggaagtaaaatcataatcacaagccggttagagaagatcgcaaagcttggaacaacacaacctctacgtctgaagtttttgtcgcgagaagcttactggtacttctttaaggtgctcgcattcggaagctcagatcctaaagaacaccctgagttagcatctgtatcaatgatgatgttcaatgtctactttgatcatgaattgtacaagaatttcactggaccattcatggacctaaatatcatggccagcttgatccaagctacattttatgagggcaactggctcagcctccatgcacacaccaggagttattttctgcttaggagaggtttaggtgatgattttgagttgaagacgaagtgcgtgcctattcccaagaaaaatacagttgtgcaacagtattgtgtaatttccgactattgccgagtaggggttgctcatgaagaagatcagaaggttcccaaaattgacatgcaagatgtcttgtcagggagagttgcacctgatgggagatttgatgttgtgctatggagatctcacctgccgccatattacagctacatatatagctgtgagatccatgagtacaggcctgtattagctacctgcaagatggaactccggcaaaagaggaaaaaaattagattgaactagatggttttccatatgtataaatgataaagagtctgtcctattttatcactgaattcagctgtatgattaacactagattcatctttttatgctgtctcttgtaaacttatcctacaagctctattagttgctgtcttattgtttcctcatgtgaatctgtccttgataagcaggtctgttgaaggaacaggatcagccgcagttgtagttttgactgcaacttttaacttcagcagtcaccatgatccaatcattcaatactcaaccaagatcaagaggctatttcttttttcattcctttgattagtttgcaggttaagtaggcgatatgtatgaaaacatttatacatggggtaaggataattacttaattacctagttatgctcgtttgtgtcaaattggattttagattctagttcagagaaaaactagcctctactaatttcatgctgaaagagtgccctacttatatcaaattatatttatatgagtgggggagcccctcacctcataggctagtttttggggtggaaaagaccctttatgatcctacattaaacaacagtcaaatagtttttttatatagagtcttatatgaatgaattttcaaaattgtaattactaaataattaacttggaagttcagaatgaattgatttaagtgtggtaaataactataataaatactactccagtattcaagaaaggcgagaggagagatgggctgttgatctagagccattggttacatgttgggtggttggatgtagggactgctaaagttgcagtcacaactgcaactgcagtcgatcctggtgaacagatgctcactgctcatttccgatgcacataatctctcatattttttgagtgaacaatctctcatattcaactcttgagaaaaaaatatccacgaattgagttgttacacatttttaagtccatacatctgtttacatatgaaatgtttttatttgtgcgattgactacatcaaaagtccattattctttttcacacattgcatcccgaaattcaaataactacaactagatcatataaattaaaactaataatcatcccatgtattcttttctcttcttagcattcctcttatttcatctcctatatcttctcacataatttctcaacttctgtaacaatatgggtcacacaccttctctatgatatgattttggctcggcatccatcaatagtatatatggggctaattatcaaaggtaaatgtttcagcgataaatcaaaccatatcctaactacaggcaaataattttttttatattttcagataatgggatctatactgtccattatccaaaaaaaatgttattttctttctttccttcattctgagtttatgactaacttaccaaaggctgccgaaattaaagcttcaattttggatgtacctgtggtgatactactgtgcctccaagctccctgatttggcagtgatcgacgtcgtccgccacgaagggagaaggaagcgagcatcgccggtggtggtgcagcaaaggaagtcgacattgatacagtggtggtgccggcctgatctggagacatcagtggcaacggtggctcgggtacttccgacaattggcagcatggatggtgatgcctcctctcctcccatgtctgctcttgatccaggtacttaattttcaaggatctgtagcctattctgaatattttatttcccagagaagtatattacaaaaagaaatttcagagatgtggctagctagtcagctgccgtacaagtggttaatcataattctattgtccaggaaacgtagctattcagctgtttaaggagataacaaccatggtatgaaaacaatttatgaatttttcctctctgttcatgtcgttttctttagtctttcaggtcagacaagtagaagtcaaaacttaactctaaattaacaaagagcaaagagttgaatttggccctgcaaaaaaaagaaggcttgaattttgtattgaggccttggaggcattgtccttagcaatgatacattttattgatatggactggtccacaaaatctgctatggtgcatcgtgaagtctatggactggtcaacaaaaaatacacgtggttgtgaagtctatggtgctaaacaaaatctgtagaattccctttactgctttcattgtctctgctatgtggtcagacttgttatgctaaagcagactgcagagaaaaatatagaaacttgaattttaaggagatgtggagtttctggagtatgtggctgccctaattctcactctgttttatcatatcctctaaaagttctgtgattacatagtttctctctggtctcagtccttgtcgacctgttgagtgatttacaaaatttcagattacatagttacatatggagacatttttgtctgcagttttgagtgatcttgccactagatctatatctttcctgatcaacaagtgcatgaaacagacagagtcagccatggaggagagactacggtggctgctgctccgggttcggatcatcgtggaggaggcagatgaacggatcatcacaaaccaagtcatgctgcaacaactgaacatactaaggaaggagatgtacagagggtatttcaccctcgacatattcagatgccatggatacaaaggtgacaatactaaagatcaccaggtgagtaactctttcgcactatccaagttcaatcctgccaagcgtgttcggctgagcagggtcagtggccacagtgtacaaaagcagttgcagcaagttcttggcagccttgaagttgccattgaagatacaagtgaatttgtcatgttcttgaacaattgtccacgtctatgccgccagccatatagcatgcacttgcttttagacaattgcttgttcagtcgccaattggagagggagcacatcatgaacttcctgctcaaagagaatactcccggagctgaaaatctaggcatcctgccgatcatcggtccagagaacgttgggaagagcaccctgattgagcatgcctgtgatgatgaaagggtgcgtaaccacttctctcaaattgtgtgtttcaatgacaatgatcttgaagatgcaaacatggtgactcttagaaatcgtggtgaaatcaagcatcaaaaccatgccactgatggagaaaggatactaataattattgaactaatcagagacatcgatgagggcgcgtggagaagattgtactcagcttacaaaaattgtgttgcaaacggcagtaaaattatagtcgcgagccgatctgataagatagcgaactttggaacgacaaaggctcttagagtgaccttacttactcaagaagcttattggtactttttcaagttgcgcacatttggaagcacagatgcagcggagcacccaaagatggcatccatagcaatggatatagccattgaattgaatgggtgcttcatgggttcaagtatctacactctacttttgagagcaaatttcaacgctcagtattggagcatggctcttgcaataatcagaaaattcagaaagctgaatctcttactctatggtgcatgtttttttgatggtccttggcagagggttgaaccggcatatgttaggagggtaaacaaaatttgtcctgagtatcttgtgcttcttgatgactataaaatatgttctggtcaaaacaacatagttcattgtcacacaaactgtgctgacaatgaagatgaagttcccaatggttagtttgcacgattttctcttcggaagggtacctcgaggtaaatttaaggttctagcttttagatcccaccttccacctcacaacaactatatgctccattgtaaggtacagaggtcatatcatatggtcaccagaaacaagagatctatgaagtttttacatgaccatcttaggagctgatgtataatgtaattatgtcgaactgtaatctgaatctgagcatttgttgaaatgctttcacctactgtctgagcggctgcgccatttgtagtccaagctcatgtgtatgtgctattttaagaggttgttgaactcaagtcgtcagaatctattaacattctgtatttgaagtttgatcatgtcaccatgcgtgaggcacaaagacacttgtccagaagtcaatgataattgacagcaactaatatattgatcctgtgtttactgtttctgaacattcattgcttgttgcagcttgcaacatacggaaagcatcctaatacaaacactccatggcattatgatcacactaattacaccagcttcagttagaggttcagtactagcatcagcactaactctcaacaaaaaaaaagaaagaaaagaagatatttctgactagcttcttcaaccctgtccagagggaaaagtgtactgatcccagagagaggaatttcagagaagtgattaaccataattctactgtttaaggataacatttgctgatctcgttttctccgttcatgccattttctctactgttccagacagacaagtagaagccaagacttaaatctaaataaaagaaatagcaataaacttgaaatttgtcctggcaggaaaagaaaaagagaaacaagactggatttgtgtattggggcctttttggcatcatcctgaggaatggatacgttggattgattattagcaataacagcggtagtgacaagaagttcagatcctttctttttctgtcaataacagtggtagaagtagatggtactgactgatgaactgaatctgtacaattctttttgttgctttcattgtctgcgccatgtggtcagtcttgtacagtcatgttaacgctaactgtagagaaaaacagacacttgaattcaaaacagttcactctgaaaaatatattccaagtacgcatggaacactgtttgtgtaaaccacagcacaatgcattttcctggagctacttgagtatgtggttgcctaatttctactctgcttcaccagatcctctaaattttcagtctacatagcttctgtcaggtcccagctcttgttgatccgttgagttatgtacaaaacttcagattacacactttacatatggagacatttttaactgtgtttctgagtgattttgccagtaaatccatatctttcctgatcaacaagtgctcaaagccgacagcatcaaacatggaggagagactgcaacggctgctgctgaggatccggattatcatggaggaggcaaaggaccggctaatcacaaaccaaggcatgctgctgcaactgaacatactgaggaaggagatgtacagagggtattactttttttttttgaaaatagagggaacaaagtacaacccctaggggtaaaaaaaggagaaactgtacaaaactgagaaggcctatacacaatttgatagaaaatcccgtagcctccttgctcccgccatggtccaagttcttgcctcctcttttatttttgccataagactaggggccgcagtttccttgtgttcgaaaacccgccgatttctttccttctagatctcccaaactattaaaagaattagggtccgaaggccttttttgggcacctcctttgtattggctagcatttcccaccaattttggacactctggcatggagcccagtggcacgagtccagttgctggtaagccacccaggcggcagtcaggctccagatccttctagtatatctacaatggacaagaaggtggcttgctgactcacttgtcacgcgacagagggggcacgtcccgttgtttggccatcctctagctgctagccggtctgaagtccacaccctgttttggatcacaagccacgcgtagaatttacattttggtggggcccaggctctccaaattaaggcgttgaagttggtgccagtggttcccaggcattgcgctttgtatgtcgacgaggctgagtattctccatggtttgaaagcttccaggtgatttgatcgggctcgctttgattgagaataatgtactgggttgcttcccatagggagacgagctggctaatcaggtccacagtgggaggaatggtgccgctgaggtccaggtcatcgatccaagagccgttctcaatgccttccctcagtgtttttcctcttttttggatatcgcataggctagtggcatggcgtcttttggtctctgtccctccaaccaggcagagtcccaaaatcgaattgtgttgccatccccgatcgttattttagtggccgtagcaaaaagccttttatcagtttcatcacacggtgtttcgaggcctacccatggcttagtgggatcttttcattcatgccagagccatctcagatgaagggcccttctgaacttttccaagtttagaactccgagccccccttgcgcggttgggaggcatgtcctctcccaattgatcttatgtctcccgtcccttgccaaaggagccttcttctcttcgcatcgagttggcctagagcttctttggttaccttgagtgcagtgagaaggtagatgggttgcgctgtcagcaccgatttaaccaaggttgaccgtcctgctggtcccatgtttttccccctccatccagccgttcgctttgcaatcttgtcaaaaagtggttgaatatccgccttcctcatcctccctaggactagcggcagacctaggtattttatcgggaagtgtgctcgcacagctggtacaccgtcaagaatggtgtcgaggtctatgttttgacatctgattactgccacctgagatttctgcatatttgtgaccagcccagccgcatgcctgaagcgtgtaagtatgtcagtgaaggtctggacatccttcctgacaggattgatgaagaccactgcattgtcggcgtacatggagattcttaggcgggctgctcttccccgtagctttgtgatggcattaagctccgttgcttttgaaagcagccattgtaggggatcaatcgccaggataaagaggagcggtgatagcgggtcgccttgccttagacctctgccatgctatattttgccccccgggattccattgaggagcacttgtgaggtggaggtggaaagaatagatgagacccagtctctccatttctgtgggaagccataatgctgaagcatagctagcaagtagtcccatcgcactgagtcgaactctttgggtatgtcgagcagagggtattacacccttgacagattcagataccatgcccatgaacaagacaatagcaaagataacaaggtgagtaactctttctcaaaatccaagttcaatcctgccaagcgtgttcggttcttctgggtcagtggccatagtttacaagagcagttgcagaaaattgatctaagagatagatttggggatttcaacagtaacattgatctagtcctaaagggcaaatataaatgtatacaagaggtgcgaaaaatactaaactacccctaatatcttaacagttggcagtatagaagtcacccttgaagatgtgagtgtgtttgtcatgttgttg

SEQ ID NO: 16046 - DNA, 13292 bp, Oryza sativa
  unsure (1)..(13292): unsure at all n locations
ggcagtacgagagctcatcgtggctcaagaaagctctagggtttgtcagcttcaagataggacaatgttgctataagccagtgtttcatttcatgctctactgcgtgcggtgcatgatgcgatggccaaccatttgctgcccatgctatgtggtgtgctctccgctctgcaactgggtgttcaaattgcagcctagttggcagttgctcccaggcccttgttgggtgatatactccgccctctacaagttgtttggcctgcagtacattcaacaggtgctgacagacatgttgggcattagcactgcaagctccattcagctgcccattgaggtgaagagtaccgtgattgatgccctcgttgggatcctcatgcccaggcccaaccatgacagtgtcgtgttgtccagtggatcaacatcgctagccaagaatggcttgcaggacaagttcataaggcagtacgcttcgacaagttaccatggcggtagcgctagtaccattatccccgaatcaaagggcaatcaagccagcatcatcttgacctggcacgctgcgacaggttgctacgacaaagactatgagcaaaggaagaagatgaaggctactacagaatcgccgctacagcacaggcagtatcgtgttgtggccaccgctctatccaagtactgcatgtacttggtagcttatgtgcctcagctgctgcccgggcagcagtcctacacaacatctgtctacaacgattttgtgcgctcgccgtcctacatcttgcagagtggtacccagctgaaagatgagctctgcgaggcggtggtggaagatgaactgaggtggaaggtgctagctgatttctgggtcgagatgttgctctacctcgcgccttctgacaatgtcacggctcacatcgagcaactcgcacaaggtggagagttcatcacccatctctgggctctcctcttccacgccggcatcctgtaccggccgtacaaggaggaggaggagccagctgcagccgggacagtgtgacgaataaccacttaattattaattatcttgtgtttagcagtttgtttccatactttttatgtttgtagatgcatgcaagatgctgatttgcctgcgggaatcccaaaaatattgcaaaaaggaaacggataattaagcaagtttgtagtctcttctgtccactctagcactagcactgaacactgatgagatgtagggatgaatcgtgctgcgtgtcgcccgcggagagggggtggcggacgctccgcgcgggagaccgacttttccgttttttttttctttttctgtgttttccgtttctgttcggttggctgttttttttttctgttcaaattggttttccctttttttttctcttctgtttttttcggttttttagatgtatgaatacaaattttgtattcgtacatatacaaagtttgtatacatgatgcaatttcttgttttttttatttttttaatacgtatatatataaagtttgtatatatcgtacacaaagttcgtatacatcgtatacaaagtttgtatatgtcctaaataaactttgtatacatcgcatataaactttgtatatatgtatatatttttatgcattaaaaaatatttataaatatatatacacacgtgtatatatatatatatatatatatatatatatatatatatatatatatatgtatgtatgtatgtatgtatgtatacgtatgcatatgtagtatatgcataagtatagtagatacagagaagagactagagggggggggcgaactgaccgtgcgcgtgccggggcgcgcggctgattgcgtatcagcgccacccatatatgtctactccaatccatcaaaaatctcacggatggtcgcctggtcggttttctcccacgatgatcagtttgttggagcacacacacacgccactgaaataattgcatgccaaagcagagtaacatcagagaagctcccggtttcagtttgcccctcctccacagccacatcatgggccttttactgttacaagcccatatgtatgtattgattgtttgcaaactcggcccaactagacgggccgcacattcctcaaattgccgttccggcccaactagaccgtgctgttggacaacatatggcaccggcaacaaagcgtttccgggagttttgaattatactagaaaaattacccgtgtattgctatggaaagctaaaattataataaacaattgagtagagttcaattttcatgatccaagtgctttaagaaaatatttttcatgttgcgtgcgaacacaatctcgtgtcaatgtctagacaccaggtttttttttcaaaacaatctatttcacattacaacgggtaaattattttatttgtacaagaccgtggcacaaaaaaattgaatacggacgtactgttacatacagacatgaccttagtggtgcgcaatcatttctcgcaaattgtgttcttcactcgagctgatcttgaagatgaaagcattgtggatattagagatggcggtgtaatcaaacatcgaaacggtacctcggatataggaaggttgttggttattgttgaactagatattcagaaggactagataagaatattggtaagggtttattgcaaagattattatacttaacttacaaagctcgcattcctcgcaacagtaaaatcataatcacaagccgatcagacaagattgcgaggttaggaaccacaccacctctcagattacagctccttccaaaagaagcttactggtacttcttcaaggtgtgcacatttgggagcatggatgcttcagagcatcctgaaattgcatccgtagccatggagctagcaatggagtctgaaaggagcttcatggttgccaatgtctttggtagattactgaggtcgaataccaacacgctttactggagattggttcttgcatccctaagagagttcaagaagaagattcgagttgttctgttaggaggtgctgatcagcctcaaggaagatttgatgcacttggatggaaatcccagatagcacctaactatagctacacgtatagctgtgagatacagaggccaatgtgtattgttagtagataaaccttgtgtgtttgcattttaaatttctgttatgcatgcgcgcgagctccggtttgtggaagccgtgcgaatagctgtcatgccgcgagaatagctcggcgtggcgctagcaacggggagtgcgcgcgtactgcggatccgtggggatggacacgatcaatccgcgacgtgggaacgtttctgaagcccatgtttctttctgttgcatacctatcccctgtattgctctgttcttcattttcggatcagctacagtgcgtttgcaaagtgttcgtccaggtgttcgcgtgtgttccactcgccgattcgttgggattttcctgacatgtatggtcgccaggaagaagaaaatgcagaggaatggcggctgaatggctgaccatcttaggaatttatctgatgcactctagtattgttacatgtaggaattgtgtctttatatgtaacctctaatatgtaaaactttttccgataaccaaagaaaatactccaggcctctacatcccaagtatacatagttgttctcttgtggtggagcctattcatccgagttaaggaattaggtatggtgctcacgtttaaggctattttttttaaagtagtaagtaaagtacccattgacagcaatgcgtctgtgataactttatcaattgtaatatatgttggcccaatatctgaaggtgcttatattgatatggtttgcgtgtgtacatgcatttgtaagcatcggcatttgaactgtactttttattaaaaaaaaaagtataacatatatagctagagctaatattcattttgcatcacattcaaagtgagttttttattatgaatggttattataattgttattttctggaaaaataatattatggttgttttaatgtattctagtactttctcttgatgataaaagaaacttgacataaaatgagtgtcaaagagaaaaaggcacaaacggactacttcctgcatcttaaaataaatcaatctaacataaaatgggagtttacttagtacatgaatatagacagatgtctatctgcattcattattatataggtatttccattctattttaggctcgcttattttgggattgggacggaaggagtagtagagaaagatgggaagcacactgtattgaagtgctagaagatatgattgaggtgagatcttgtagtggtaaaaagtaaattgcagtattggaagaatacacataaagtttagagtcaaaatgttgaacttttaaaaatctatagcgtttcaattctggaactgagaatatttatcttgtttttttctgaatgaaaccagcacaagattgtgcttattcattaaatatagcaggagaaaaatacagcccctaaggaaaaaaggaaagcaagaaccgggaaaagctgtacactattcaaagcgcggaatagttgaggtttgaggttgcggcctccttgtgctcatatatccaccagtttcgctccatccaaatttcccaaacaatgagaatatttatcttgtgaattacacatagcaagaaacaaatgtatttgtttaaaagaatcaagaaacaaacgtacaaaagatattttcagtaataaaattttttaaaaataaaacatgtaggtatgatgtgaccactggcatgactagtctattttggtcaaaaagcttgcaagagaaacatataaagtcaattgaccgacctacattgttgtttctagaaagcgcaacaaaaaactgcacatgaaaatcaaaattacccatccagtagttgactgattcctatacatggaaatcaactttccatataactaactgcattccaagtcattcttccaaatctggctacattaagacggctaattatttcatttaatttgtggcagtcatctgcgcaggggtatacaagactattacactacagcttcgttattcttggattaagataaaaattttaactcggtttgagttagtgcttccgaaattactaaacaatctagacattgcttgataatattagataaatttattttcaaatttaaatttattaatacttaattaattatgtgctaatagttttttttcattttatgtctggagtttgaacgggacaaattaggggcgtgttcggtaatcattcctttacgctgcagtgcttgtgttgtgcggctgcagctgcagaaaataccagccgaataggtcctaagacaccaaaatccagccctgcctaattggattgggcttatcaacacgccaggccttacacggcccattacattgtttggaatgcgtgaactctacttttttttaaaaaaaagaaagaaaaatgatgacaaacaattaattcacttctagcaggagcgtacattttttttaaaaataaacacaatgcaaacatagatgcttaagtgcatctccattctaagcatgatgatcgtacttctgaaaatggtaaaggaaaaatacaatcatccatggtcgtcgtggttttggcattcaccatggacaagagcaccctaaaatattaaatgtgagaggaaacgctattaataatattgttgtgtggtggaattatatatgttgtccataagtgcatttttagttggtactggtagaaagtagaagcggggccagacatgggtcaacttaggcttgagcctcaggcttgactcgaaaaactccatataaatcctttagaaattatatagacatttcaaaaatatataatctctaactaaagttgtcatatttagtcttacaaatattttttgggctccacaaagaccataagtaatactccatatttttatttttttacaaaagagacttatagtgaagaaaatagaaaagtaattaatgggccattcaatctttatcatccatccaaacatctaatccaatacctaaaaacccatcagatctttcaccaaaagatacccaacgcccatctaatccaaccgcacgtacgagagcactaattaacaagttttttttagcatgatcaataattggggtcatcacaacacaatgcacctagccatcaatacatgatggaacatctaaaggtaacacactccaattagacaaatcacattagccccatatcatggaattaattaaaaggcatggcactttgtttttactagtactaaactagaagctactactaccaaaaatgggaggtatgttggtgccaggtggaagacaggtgggcccccaccaacccctgcaaagggcaagcagacatgatgggcctcgaaagcgtagctccatgccagtttgtgggccaggcctcttcttcttcttcttcttcttcttcttcttctccattcgccggcaaaaagaagagaaggcgacttgcaatttcagctccaatccgaaatggagatggccaatcaagaaggttgtggtgggcccagcatgtggcccaaaaggcctaccaagattaagaaaagaagttgtaaaagaaaggaaggaaaaatgaaagagaaagagcttgttcactttgatgaaaaaaaaccttaccgaattttggtattaacttcctttcaaaaaaaaattttggtattaacaaaaaaaccttaccaacttgctaaaattttgacatgatttcttatatagttaccaaaatttggcagcaaactaaatgtagccacttttttggcaactttatcaaaatttggtaaggttgaaaatgacatcaaaatgaaaaggcccgaaatttactcaacagcaaggctaataaagaaaagaagagatttggtttctagagagagaaagagaaagatgtctccatgatctttgctctagatttctgtgtaatatgatctctcttttttaaaagggcaagggtgttggaaaatactagtgattcttttatttcctttttcttgcacttatcaagcagcctgccacgctgacctgagaactaccggaaaacaagtgttgtcaaaattgattgcttcctgcactaaatccatagagactttttaaggtccaacagtactttacggtactaaatcttggtcgttggatctggtccgatccaacggctggtagtgtttggtaccgcgaggtaccaaatatgtccctattgcggtacctctcgcgtagaagagaggtggaagagcaaaaatgtaactttgtgtgcgatagatgggaggaatagacgggcggaaccaattttgtcacattttacatcctcttctgcgttgccgtcgcgtttctcttccccccgccgccgatgtgttcctcttccgccccaccgccgccgtgttcttcttccgctgccgccatgttcctcctccggcgccgcgacttcgatctgggcccttgcgccgaagcgagatcgattgcggcgtgcagggttgtcccctctcttctctgggattcgtggtcctccgccagtcactgcctggattgatgccatcaacgccgccgccgctaccgccgcctagacgccaactccgccgctgccgggatcgaccgccgccgcctcctcctggacgtcaactcggccgccgctgggaacaacgacttggacgccaccaccgccgggaacgacaacttgaacgccgcatccacccttgctcatcttttttctcccgctcctacccatcccagattcaacggttagatatcgatgtgttttggtaccgagcagtaccagtaccgaccggtacaacctgctggactgtaaagacgctcaaatctataacttaaacatcgcgatcagagtctacttagtgagtggacaaacctgttgtcgcagacatatggccacatatataggtggcctttttatttttctctctttttctctattaccttaaaagagggagttttatatgtatccgctacctttccctatccacacgacgcacaacaataatattagattatattagattgtatgggacatgttttgttgtttcatagcaattcataggtagactaattaaatgaaaattaatatttattttttatatggcgcctgccacctggtgagggggagaaggcatgtgttgctttctttttttttttggttttgtctgaactgatgagactataatactcttcatttctatcactggaaatggggagcaatgctctcctagtttaaaaaatatatttttttaagataatggaaatgagttacatatctaacctctgtaagatagggacataaccatagtattcagttttctaataacttgtatagaaagtatttacatgaaaattgctgcgcaactataactatgcagactatatatgcatgcacttccggaaaaaagaacaaatatatgattgatacccatgtatacataatgcatatggtgaaaccgtgaggagtcaaagtactgtcaaacatcagtttctcaaattcctctgaaactgttgagccatctgaatacagaaagagggagagagaaaggacacacagtactaccactgataagggaaaacaaaacagtagattaacgaataagcactgctgatgcaacttctgcaatcatcatgtccagggagctaaaacgaccttactacccttgccactattggccgccatatatcaatcaatccttttctctcttttgtggaagaagaagaagaagattaagatgctggtgttgagtcgtgtggcttttgctactgatcagattgttcagttcggaattcagataagaaactcatctcaggatcagacaaacaatgggtgggtgccagttcagaaagagagaatatatacggcagcaagtcagcaaccatatgcagaaaagagcagcatgctaatgtctttacaggatgcgcataaaatcactctttttcagttcttttctagcctagtaaagattttatgccttggggacagatgagattattattgagatcagaacatcatgctaaggatctcatcttcttctttgagcatccgaaatataagtctaaataagctagattccatattttaggactagcacaaagcttagactatatattcctaggatttcacttctccatgccaagtaaaaagcacataatatatacctcaataatacatctaaaaaaaatatacctatccaacatagtaggatttttctgggcattttacaattctcccatatcagtccagatgttaaccattttttctcttgaattccttcatttcaagctacatgtgcatatataggggaattaatctccctgagttaattttgaagatagtattttgtagtaaaataaatattaagtaataagatatgactatgttcatggcatgatgcagagtttgagatatttttactccattatttatttttgaatgaaccgatatcggcatgtctatttcattaaatatagtaggaaaagaaaaagacatttacaggtgtaaatagaaaaaacatggttacactgtaatatttgccaaaggactaagatatatagaaaggtgactttaccattctttaaaaaagtatcaagatgtatcatattttctagcgtaaaatttagtgcttttggatactaggtaactcgaggttgtaaaatttaggtttctcaataaagaaccgtaaaatttatcaagatagaaactagtcgctttgcgccagccatgcatctttttactccattatttaggatgtcaattattaatagctaagggaatttcactacttgtgtgatgcattcgatctctccattaacaagatggatgtggacctttgatgcctatgcaaacaccatgattgagtgtgtccatcaagtagctagtcggttagctaggtcaatatcttcaagttaaacacgtacaaatcgatctatctagcttcatctctttctttctcttccacagtgtcaaagacaatgtgtcggcatggcagacagctaccgtccgacttgaaagccatatatattactaattgctttcttcttacttaattattctatcctaattaaagtaaagatcgagataataaacagattaaaactattgtcgagatggattatattccctccttgggtaatactattaacatgaaagagaaagagataattaacgatggagatatatatacatacggatacacttgagcatcaacaatataatgcaagttcatgggcaactactacatatatagctgactaataagagcaagttcaatactatagccaactactagctccaattcatctatagccaatctaatagctcattcatacaatagttatatactacactattaatacctagtcccacatgtcatagacacactgcgtcttggagtccgtgctacagctggctataaatctgtagcccgctgctcttttctctcctgatttatcttcttaaaatatgtttgcagctggcttatagcctgctattgtacctgctctaatagtttaaattatttggttttggaggagtgtgtgtttagctttcgttttcccgggacttttgctgcaacagattgcaagggcccccatgcttgaggctgacacgacggctgcaattggccaaattcgagtgtctctctcatggcgcacgcttattagctttgcattgttgcccactaattaattaatctgatccattacatgagtaaaaccaaattacaacttgtgttcaatttatccaagtcgatcgatcattgattaattaacggcttgttcgatcttcatcgatccattttaaatccgctagttgctaattattaataagtttcatatgcttaatatacttttacttagtgcgtgctttttgtttatttgtcttatatatacggagagagttcaagtcgttttcctcattgaagctattttgtatcaacttaaagttttttgtacattctaaatacaaagacatggaatgtaactgatcatcttttaatttaattcttacctaaaagtatctcaatcatcgtaggatacacacaacccccatttgatggaggcactcaacctaattaaaaacaaatcaagatgtatatatatactagaaactaatccatcaatctaccccccatcaagccctaattaacttgtcacttaattgccgttaccgatcaatcaatcatacaaataaatccatcgtccatgcattgcaatgtattgcatccatatatctcgattgcgagtggctagctcgacgataaagttaattaactggtcgacgccatggcatggcccagcaggtctctcgatcaagatgttgaaatggaagttgaagggcaccatgaacacaataaataaaaatccccaatttgagatgctgaaagagacttcataattagcggtaactatgatagcggcacactatgtccatcgccgtagtttgtttttgacttttcagtgccctattcattaccgtcactatatactagtacgatttaatgatattcccggtgataagaataataaataaattgcatatgattgttaatatatactccctctgtcccataaaaaaaccaacctaatactggatgtgacatattttaatactacgaatctagacatacctctgtccaaattcgttgaactataatatgtcgcattcagtcctagatttttttttggacagagggagtatatgtcaattaacttatatgggaagctcgttgttttcatggatttccaccaaccaaactatttggtgagaaaatgatcattcctaacctcttaacataaatgtgtaagggttcgttttccttccttcctaccttcacctctagtggagatgacgtaatgccaaacatcggtgccttagggttcaaaatgaagagcaagagttagggatcatacataggtgcagattgatatatagtgagattgtatgataatggcactattgaagctatcgacgaggaagctaatagttggtaggctctacaagatctataagaatgagtggttttgaagcgacacctaatggtgccaacagctagacattgctaaataagatgacgaaagggagctagtaaatggaagatgcatgtttgtccgcaatgagagggccaacaccaatagtaattttgtcgaaaatgttcgagtggtttctaggagaggatatatataggtggtcgtggctagaagtaggagagggaatggctagaattgtatagggatggagtggcgggcttgaaccattcgataacacaaattcaatgccccaaaatttaatatagttctttgagaaaatcaaatagctgtaacataaaatccgatatatatatatattttttggtgcacgattaattgatcagttgtcgcagttttggcactattggaaactccaagtagaatggcatagctcacctccttattaaatgcatattactgtgcacaaacatgtggtttaattgtgcaaatcataacacacaccacctgcaacatgctgatggtcaagattctatttcatgtctcagatgattgtgcagttgcacaagtacaacacacctgttgctctgatggccctactaaaactcttgacactgttttgctacatgcatgtaaaacaaacagctgcaagattttaaaattagcttggaacattccatttccactagaacttcgtttacacaaaaggaggaaaaaaaacagaggaacatttcactaaagcatgcaaagacaaccaagatcacaccattaacacaaataattaagccaaactatatttataaaagtccattggtatattccactgatgtaagtatgaacacatcattaattacaccctcacaaaaaaacagcgaaattacacaaggctcccctcgacaaccctgtgccgtcggatgcgtgatctacggtagaattagcatcaaagctaaaactcccttgggttctacgaaaaattggaggtccccgggggcgccttgttccaggcgccaaccgcgcccgtcccgtagccgtcggccagccgcttgatccaccagagtcgttggccccaaggcccggccagtgccgcaacgccggcgccgaaccggctcgcacgcgccccaccttcgtgggnnaaatgacggcgcccccccgcgccgcgccacgtttgtggccgtgcccgaacagcgcccgcgccatgcgcgccgccggggggccgccgccgccgatgccgtagacgaagtggaagccgaacggctcgaacaggttcgggatggacgggatgcccattcacggcgc

SEQ ID NO: 16047 - DNA, 2042 bp, Oryza sativa
cccatctcccggaaccactcctccatcctctccaccagcctcctcccgatccctcgccgccggtggcgcggcgagacccggaggccgagcaggtacgccaccttggagaagagctggctgcgcccgcacgccacggtcttgacgcagccgcgcacgacgccgacgatctccgtgccgagcgggccacccacagcctccgcgacctgaaaaccacattccaatacccgatccagcaccagtgtgaggtctcgcgatcaacaatggcggacaagcaacgccccccgacgagacgtacgagcatgaggtaggccggcgagtggcggacgcggcagagcgggtcgccgaggaggtcggtgaagaggcagagcttgccgccgctcggacccacctcgcaggcgcgctcaaccagttcgacgccgggacggtcgcggccgccgtcgaactcccgcaccaggaccacctcgccgccgtcctccggcaaacaagccaccgccatccttgctccgatcaatcaatcaatcaaatccccttcttcttcttgatcgatcgagcggtgcgttgcaatttatagcggcgatggagtggcgggagaggagaaggcgcgcgcgatcgatggagatggaggtagtggcgcgagtggaggagtgggggagtgataggatgggggccacgtccccactttcccgccatctgtacacctctctctctgtgtgctccgggtggggcccacaccccaagttaaactgccccttctgctgctccatgctaaaactggatcgacttgctaattatttgtgtgatttaacaatgattagtgttgttggagtactatcatttttggctcatcagattggaggagtaagagagagctagataatgtaagattcgatagatctttgtttgctgctgtccgatcttgtcatgattattagggtaattaattagttgtttggaaattatctcttttctattatcatactcggggggatttaggagaagttattttctttttctatcttaattatattgaatgacctcctctaatcattctcacataagttatctttttttctagaaatataggagtatatgacatgttgaaattttgtagccagtattttggataatctttttccttaaaaatgaaaatgtttcacatcttccaatagacacatgttctaaaagcccaataaaaagaacttttcaattagagccagaaaacctttcaaaacaataggaatacaaaagaaaaatgtatatatcacaataataagagactctcggttatcctctatgtcgtaatactatatatccaactaaatataaactcaccacatgagtacaaaattaaaaccgacggctaatgaagtcagtcaaacacaacagtgcatacaatgactaaattatttggttggttagtctcattctctataatcggctgttatatctaaacgtagtcttgtcgctcgtggagaaagaaaacacatcgctacttttaatattgtcgttgccaatcaaataggaaaatataataattaagacgaatgctttaaaaagcaacaagacgttgcagcggcgatcggtagctaacgcaaaacaaacatttggtctgagttatcttttttggaataataattaaaaaatggttcaaatatttggcctatgctaaataattacccatgttgtaaatgtcaaatagaaaactcttaaggttatgggagttaggaactatctttgacacaatattagaaacatttcaaaataaagaaaaagagagtatcataataattagaaactctcgatgatccaaattatccgactgaatataacctcaccacatagaagcaaaattacacagctatatgcatcacatgatgtagaggctgagatttttatttgactatcttaaatatattgagtacaaaattgcaactatatatggactaacgaagctagtccaacataacaatatatataggtactacatcgtcatttggtcggttaatattctaatcaagcaggtctcactccctataattcta

SEQ ID NO: 16048 - DNA, 25833 bp, Oryza sativa
  unsure (1)..(25833): unsure at all n locations
catcgccatcgacgccctcgagctcgcccgcgcggcgacgccctccccttctccaacgacgctgcccccgccgacgccgacgtcctcctctttctcccgcctctcgggcctcttcgaccccgagacggtgggggaggggagagggcgagaaccgcggcgacggcctcccgcgcctaccctcccccgccgccgccgccacccagctccttccccggtggctgccgcacgcgccaagctccaccccaccggccgtgcactgctccacccccgacagccgcgccctgctccgtccccgacggccgcgctcagatccttccccggcggcactggcggcgtgggaggacggccgcgagaggccgtgcggcaccggcgtggcctccgctcctttcccgccgccctgagagaagagagtgagagagacgagaagagggggaaagagagggtaggctgacatggcacgatgacatgtggggctcacgtggatcccacgccgactcagcagccacgtaggacaaaaccgggatcaaaaccgccgagagacctattgtgaccggttttgtatagttaagggacccgtggtatctggttttgcggttcgaggacgttttcgtatcccgataacaagttgagggacatctggtgtactttttccaagatatttttcttcactattttcagaagtactaacacactacgtttggaatgcaggtaaattccctaagctcctcctaaaagtgaacttttttttactataataataacattataagtacaaaggcggtgctggaccttgcagtcgaacaagcccttgctccccggataatattgattctcacatattatgagaatatatagttttaaaatgagaaatatattaaaagccaaaaactggaaacaatatatgagagattagaggctaggattatatatctcgtttagttgtaaaaaaaaaaggttctactacctattactattaggggttacaatatgaatacatagtgcctacatgtgacaataacagggtgcataaaactcataatatgatcagccaccattcttcttcattttgttcttcctagcggccaaacactttggcctctgtatctcacaactatacatgtagctatagtaaggtgctatctgtgatttccatccaagtgcatcaaatcttccttgaggcctaacacttccaaacagagcatctaccagtgatatcttgggagcttcagcttcagcttcacagtgggaagatgcatgtgagcagattgtttgatagttatcaagaatcacaagaagttcagttgcttcttcacttggttcattcacccgatccaaagctttaatttgatctgcagcatacatgaatgaccaaatatgctggttcttcttcttgaactctctcagggttgcaagaaccaagctccagtaatgactgttggcatttgatctcagcaatctactgaagacattggcacccatgaaacacccttcagtttctattgcaatgtccatggctattgatgccatttcagggtgctctgaagcatccatgctcccaaatgttctcaccttgaagaagtaccagtaggcttccttggataaaagctgtaatctgagaggtggtgtggttcctaacctcgcaatcttgtctgatcggcttgtgactatgattttactatcgcgaggaatgcgagttttgtatatcgagtatagtctttccaataaaaccccatcgatatttttatctagtccttctgaatacctatccccatctagttcaacaatgaccaacacccttcctacacccgaggcacggtttcgatgtttgattacaccgccatctctaagatccacaatgctttcatcttcaagatcggctcgagtgaagaacacaatttgcgagaaatgattgcgcaccctttcatcgttgcaggcatgctcgacaagagtactcttcccaactctccctggaccaataatcggtagaactcctggttctagtgtgctatgattcccaggttgtaggagaaaattgatgagatattccatctccgtctggcgcccaaacatgcactggtccaagatcaagtacatgctatacggctgacgatgaaggcgagggcaactgcttaagaatgcaatgaactcagtagcatcagcaatggtgttctccaggtccccaagaactctctgcagctcacccaaactctgactgctactgtcactgcagaaacggatacgcttggcatgactgaatttagagatggcaaaagatggactcacttcaccatgatgatccttgccttgatgagctctgcacctgaaggtgtccagggtgtagtagcctctgaacatctccttcctcaggatgctcagctgctccagcatggcttggttggtgatgcaccgttcttccgcctcgtcgacgatgatgcgaaaccgcagcagcagcctttgcaggttctccaatctttcatcgtcgcttggagccggcttttgctgattcaggtatttgcttacaaggaaagatatggatctacctgcaagttcagtcaggatgacagaaatggttgcctccatgttggctggagaaaaccttgcagaatggttctgcaatggaatgagttacctctagctagaagtataacttatattatgtgatctgaaacttctgattgtgccaaaacaagtttttgtattatctttcaattaggattaggattaggagtacaagttgtaacaactaacaacaagcaatgagtgatcagaagtcaaaattggcaggggataacaaattacatagaatcaattagttgatgtcagttctcatggtgttctgcatgtcctgacgtcttgcgcatttgacacgttcaagcttcaactaatgaaagataatacgatatgctgacgaattgagtttgatggcctctcataaacagcacatttacataacagattggagtactcattcgctcagacagtcagacagtaggtgaaaatatttaaaaaatgctcagaactattacagtttaagataattacattatacagcagcttctcagataaacaggtgcaaatcttcggaaaacaacaagatggtgttaacaccaaaatttgacacctcgaacataaatagaaaaatatggccgaatttaaaaaggacctggtttcctttatggggctagtatgaccgccaccgtagagccggtcaaaccggtgatgtgggaccggtctgactggtggcatgtggtcggtcagatcgggtgagtctgactccgagttcaatttcgccgggtctcgagttcccttacttgagaaggtattttttgagttctaattggtcactatcctcaataaaacatggaaagggtcttgtaacaggaccgacccctttataagggctatggtcggttcgattctaacccccaaaccacaatccctataatctatcgaattgttcttttacctttacttttcagccatgctttctactttattttctacctaacaatagttcatccatctttgttgatttgcgccacaaatcatccgacttcactgcaagggtgcgatatctctttgtaggtttatcccgtaaaccttccgattcatccacgagacggtaaatcagtctagaggctaattttgatatctaaatcagctccgctagccagtttagttttgtatcaaggtggttggcgaccgcaagatgtttaggtgtcccgatcgtaattgtcttcttgctataagaaagttaccaacacgattttttgtgactatgctaggaaacgtaaaaaaaatttcggctatatatccgaccgaaatcaatccacatacattcactgccgccgtctacgtattacacactggatcaatgtattcggcagccacactgtccggtcatccgcaacagcaatcggattgctctcgatctgctgccaaaaattaaagaaaatcaaatcaaggtgagtttacaggaatagatcaacaccgtgagtgagtccgaggaaagccgccgtcgctgagtatttttcctatatatctgcagccgcgtgacgacgctgcatagatagatacggacatcgatcaattcgtcaaggccatcaggacttcagcgcttgccgtttcgctcttgtgttcctattttggccgatccagaaaaactaggagccgattcaacgtacgttgatcggcatatacaagccaactaggaagcctacccatcagtacgtggttgctctctgttgcgtacatccattgaaacaaaaaacaaaattcaatcaaagccattgcattgtttttgggaatacgcaaggagcgcatcattgtattaagaggaataaagtttatgcacatcggaaacgaaaaagagagggggacgaggtacaggagggtgactagaaaacgctaaatcttattctcgcaaccagttgggcgacctactaggcggagtttgaagaataagagctggcatagctgctctgccattgcattgtatcggctaaccaatattttggaacttttgctacctgcaaacgaggagaacagggaatatcagttagctatcttgtgtacacatctatttccctattcgcctacgacgggtggttaattatctccatatcaatctaaatcattctagaggctaattttgatatctaaatcagctccgctagccggtttagttttacaaaacccatcatggtttagcttcgtctaaatcgaggtggtttgtaaatccatatcaccgcaagacgtttaagtgtcctattcgtgattgtcttcttgtaaaaaaaaaagttgctaacagatggttaagtgcaaagtttgggcaatgccttgagccggacactcgatcaacgatctaaaaatcaggcgcccaccccgccccgccccgccccacccgtgcaccactctgcctttgaatataacttccctctcatcacttctcttattttgttatgcagagttctcttcacatgcatgtcatgtcatgtctagccatgcatgttcatgtaaatttttgatatatcattttgcgcatttttctctcttcttcatttttttctctcctaaaataatggtccgttctacgatccgataataccgttgtattgtttataattaaatctttatagtaagatatcacatgattatattttagtaaaaattcaaatgttgtttcaccccttgaagaaaattgtttcagtagtgttcaagagaaatgcaacatttaaaaataccaactgcaacaccaataaccacctatatagaactaggggtacggaaacggacggaaaccatctttatcgttttccttttcatatttctttttagaatcggaaacctcggatacgaaaacataatcgaatattatcgaaaccgaaaacggagcgaaaacgaaccggcgcgaatacggtaatgaaaatttatcggaataaaaaacccctcaaactgataaatccaattgaataaattatctatgtttaaaagagtaatgttgttgataaattccaatgtagaacaaaaaatattcttatgtaattttagatttgcataacaaatatttaaaaaaaaacaacagccaaacaccatggtattcactatttattgcttaaaaaaagaatccagggtatttcaatcacaaaatttttggtaattccgagaaaatttccagaattctgagaaaatttccggaaagtttccgaccaattccgagttccgacggaaaccgcccttagcatttccgattccgtttccgagaaaatatttccgaattcgtttccgttttcgaaaaattccgaccgacagattccgttttcgaaaataggtccagaatccgaaaagttttcgtaccgttttcacccctatatggaacattgagtaccaagaagcgaaacaaaaaagtcatatgagagatacaatatatttgaaaaaaatgatattgttgaaatattttgtattattacgaatattaagctgtaactattgaaataatataaaatacttgccaaaactttcctggaacaccgcgtgcaatatttacaaattaactagtgaaatatcatacgaatactagttgaaacatacacataaaacatgtgcaacattgaaaaatatccatcaaaaaagctaaatattcttttcatcgaaatataacaatgtgtggtcttgttctaaatatttaattgcaatgaatttaatagtgcaatcaaattgtagattgaagaagttatttaagagaaaaggatagttcaaatattactaaaaaaaacttataccaactcaactaaccatattttcttttttactaaacgcatgcatgtactagtagtgacttggttaatttctagtaggctttacaggctgcagctacaccatgtctctgtagcagctagctgacagagtgacggaggatgaggcgggtgcccgatttttagctaaaaaatcaggcacccaatccgaagtcgcgtccgcaaagttcccgaggtcgcttatttcttgcaactatatgctgcgacttcagtacctcacagctgaacatgtagtcgtggtaaggtggaaggtgagatctccagccgagaaccttgaattttccttgaggcctaacatttccaaattgaaaatcttcgaaactcaactggggaacttcaacttcactctgagcagagtttgtacaacgatggagcatgtttggaacagaacatgtctgataatcatgaagaatcagaatatattcagaggaaattccgtttaccctcctaacatatgccgattcaaccacctcccaaggaccatcaaaatttgcatagagtgagatattcaacttcctgaattctctgattcttgttagaaccgtgctccaaaaccgagtgttgaaatttgcttttagaagttcattgtagatgcctgaagacatgaagcacccattccattcccttgctatctccatcgctattgattccagctttgggtgctcctctgcatccatgcttccaaacgcgcgcagtttgaagaagtaccagtaagcttcttgagtaaagaactttactcgaagagcttgtgtcgttccaaagcacgcaatcttattagatcggcttgagactataattttactgccatttgcaacacaacatttgcaaactgagtacaaccttctccacacaccctcatcgatgtctctggttagttcgatgatgattaatatcattttgccaccagtggcattgttttgatgcttgattacaccagaatctctaagagtctccatgcttgcatcttcaagatcatcctcactgaaacacacaatttgagagaagtgattacggaccctttcatcatcacaagcatgcgcaatcagggtggtcttcccaactttcccggggccaatgatcggtaggacacctggattttcagcaccgggagtatcctctttgagcaggaagttcatgatgtgctccatctccatttggcgaccgaacaaacacttgtctataagcaagtgcatgctatatggctgccggcacaaacgaggacaaaagttcaagaatatgacaaactcgcgcatatcttcgagggtgacttgtagtctgccaagaacttgctgcagctgatcttgcaaggtctggccaccatcccacaagtatcggatgcgcttggcaggatttaacttggatggtttaaaatagttactcacctcatgatctttggcattgtcttcttcatggccatggcatatgaagttgccgagggtgtaataccctctgtacatctccttccttagcatgttcagttgctgcagcatggcttggtttgtgataagccgtccctctgcctcctccacaatgatacgaacccggagcagcagtcgttgcagtctctcctccacggatggtaatgttggctttgagcacttgttgatcagcaaagatatggatctactggcaagatcactcagaatcacggacaaaaatgtctccatgtctacttctcatatgatcagcaaagatatgatctgaaattttgtaaatcactcaagtggtgaagagctggtacctgagaaaacacaatctgaatgtttatagagggtattgcactggttacatatacaaagaggggatatgatctgaattaaggcagccacgtactctactaactccaagtctccataaagcgaaaggtattgccctgtggttacatatacaaagttacatgtatatctagaatttatttcaaaccatacttttcagtgtgaactgtttggatcctaatttctgttttttctttgcagttccaataatataaccgtacaaggttgactacatagcggagacgattctacaggtttggttcagcgccatggaattctcgtcaagtttcaaaagcacatgcattttagttgaccagttcgcatgctagccaatgctacaacagcgacaggttagaaaaggaataaacattcagaaaatggttttcttcttttgtctcttttgataagggtcaagttttagcttctatttcttttaactagcaaaaaacattcagaaaatgatcccctacagcggttgttatgtccttcaatagctgactatctatgtttcttgaacaataaattatgagcatttttcccatccttgatgaggtactatgaggtaccaatctaatctaaccgttgatttagttggggcatgatggggctaacaaaaataagatctctcttctaggtcagaaatcgccgcatcctctcttccaggtcagaaatcgctgccgccgtcgcgcatcgaggttgccgccgtcgcgcgtcgaggccgccgccgtcgtctcccatcgagcctgccgccgccgccacgcatcgagcccaccgctgctgttgcgtatccagccgccgccgtcgagcgtcgaggccaccgccgtcgtcgagcgtcgaggccgccgccgccgacgattcaccgcactatcccatttgtcctgtccagtcattcagaacattggtgctcgtctcgaatttgtggcaagtttccaaatgacattaaaggtgggtattaaggctctatagaatgacatcacatttgctattgagtcttatttcaccctagcaagataatttccaagatctaaaagcaggggaacaccaaattcccagctcggagcacaggaacgccaaatctgagcagccgaggggaggaagatggtactgacttgccgagcgcgggccccatcttgttggtgagcgtcccgacgatgatcatgcagtcggactgtcgcggggatgggcggaagatgacgcgaaagcggtcgaagtcatagcaggacgcgccggcgtgcatcatctcgacggcgcagtaggccagatcgaccccctccgcgcccagttcatgaggtcgtctaccttggagatcactaactctgcccgaacgacacccgccgccgccgtcgcgtaaccagtagcccgccgccgtcgcgcatcgagcccgccgcgcatctggctgctcctgcctctcgcggtctcgacgccacgccatctctcgcggcctcgacgccacgccatctctcgcggctctcccgagtcccgacgatttttttcttctcgtgaaacaggaaaggacacaaatcacattatagaagtgggagcaggtttcttctcttgttaaaagaagttaattaatgctgacaaattgagtttggcaacctcatgaaaatatcacatttacataggagcttggatgtacacagatgctcatatttatacaacagtttcagacaataacaagatctcgtagcttagatactaaaaggtaccacaacctaacaatatggattactatctgagatggtcaggtgcaaagcttatgagatctcttcttactggtgaccatatgatgtggcctccgtacctcacagttgaaaatgtagttgtagtgaggtggaaggtgagatctccatgcgagaaccttgaattttccttgaggcttaacacttccgaagagaaaatcttgcatactgacctcggggacttcaccttcactctgagcagagtttgtgtaacaatggaccatgtttggaacagagagtgtctgatagtcgtgaagaaccacaagatattcagaggaaattttgtttaccgtccgaacatatgcaggtttaaccgcctcccaaggaccaccaacaagatacgcgttgtatattaagttgttcttcagcttgaattctctgattcttgccagcgccatgctccaaaaccgagcattaaagtttgctttcagaagcacactgtagatgcatgaacccatgaagcactggttcatctccctggcgatatccatggctaatgatgccagctttgggtgctcctctgcatccaagcttccaaatgtgcgcaccttgaaaaagtaccaataagcttcttgagtaaagaaatttactctgagaacttgtgtcgttccaaagcttacaatcttatcagatcggcttgtgactataattttacttccaactgcaacactaattttggaagctgagtacaatcttccccatacaccctcatcaatgtctcccattaattcgataatgattagcatcctgtctccaccaatagaatggtttttatgcttaattacaccacaatctctaagagccaccatgtttgcatgtcctacatcatcgtcgttaaaacacacaatttgagagaagcggttacgcactctttcatcttcgcaggcatgctcaatcagggtgctcttcccaacttttcctgggccaatgatcggcaggacacctagattttcagcactgggaatgtcctctttgagcaggaagttcatgatgtgctccgtttccatttgacgaccgaacaagcacctgtctaaaagcaagtgcatgctatatggctgtcggcataaatgaggacaactgttgaagaacatgagaaactcgcgcatatcttcaagggtgacttgtaggctgccaagaacttgctgcagctgatctcgtaaagtctggccactgcccgtgcagaatcggacacgcttggcaggatttaacttggaaggtgtaaaatagtaactcacctcacgatctttgacattgtcttcttcattgttatggcatctgaagcagatgagtgtgtaataccctctgtacatctccttccttagtatgttcagtttctgcagcatggcttggtttgtgatgaaccgttcatctgcctcctctacgattacacgtgcccggagcagcaactgttgtagtctctcctccacagttggagttgttggttttgagcacttgttgacaaggaaagatatggatctactggtaagatcactcagaattgcagacagaaatgtctccatgtgtaagtatgtagtctgaaattttgtagacctctcaatagatcagcaagaactgggatctgagagaaattatgtagtctgaaaaattttaaaggatcaggtgaagcagagtaggaattaaggctgccacatactcttatactgtggtttacaaaaacacactttgaatgctccacatagtccagtatcccaacctagatatgctttttaatgtgaaccgtttggattcaagtatctgttttgtacattttgcaacaatataataaccatacaagactgtccacatagcggtgacgatgaaagcagtaaagaaagttctacagattggttcagcaccactggtttctcgtcaagtttcacagtcacatgaatttttagttgaccaattccgcgttctagacactgcaatggccttctatttctacaaatgtgacaaaaagaaaggacctgacgaacatgaacaaaagaaatggcaaacttcttcattatgaaactcaacatgttaaaactgttgaaatttgagaagtgcttgtggtgcagctggcatggatagtccttgttttttttttctctgggtcaaaattcaaggctttgcttctagttaattccaagtcaacttttattttcaacttgtctgactgcaacactagtgaaaatgtcatggacagggaggaaacattcagaaaatgttttcctaccatggttgatggatgtgcaaggaatcagctgacaagctaaccacttttttttttctgaaattccttttggggatcaatacgcttatatggagaattgaagtattctgagaaatatggctacagatccttgaaatttgagttacctggatcgaaagaagcagacagaacgttgctgtcagtcgccgccattgcaggaagaacccgagccgccgctgccgccgacgtctccagatccggccggcgccgcagctgtcgccgccggcttccttggccgctccatcgccggccgcgctcggcttccttctcacttcgtggcggacgtcatcgctgctaggataggggaagtacaaccttgccgccattgctggagagtggggatccatccagtcatccagccaccagcgacttgaacccaaaagctttaaatatcgtaacctttgtccttggtaattaattaacttccttggtagagttaaaaataaagagaaaaaagatttttaaaagatatatttgagaaaataacagtgcctttgccttgatgtttggaaggaccagctacagggcgctttcgacactcttgtgctgctaatctgcgggatggtttggaaggagagagatgcgcgtgtgtttgtaaagaactgttttattcctcttaatgcaaaaatacgcatctagcgtattcccgaaaaagagatgtgcgtgtgttccagagttagagccgagtggcgggcatcctctttgccttgattaaagagtaggtcgtgatctgaaaagaagctgggggtttttaaagatttaggagagtagcgtcttgctgtagcttgtttttcttttcggaagttgcttatgggacaacatcaatcattcacttcagcagtctcttgtctaaatttgaactttgtgaatgtgtacatacctttttattaagtaaatttggtccacctgtttgttttaggctgggctggctaaaaaaaatagtgcccatttgatacggttggatgaatgatagggttaattaaatctcctattacaaatttgtcatattggaaaaatgatattattatttatcaaattggctcagtgtcataagtattttgtaaaatttaaattatgccattatatatgtatgtacgagacgtacttgaaccaatattttgcgtaacgtatttttcctacccacaaccattgcgcgctggtctcctcccagccagattcatacgtggggggtgttacgaaaatagatgcacaacggagacacgaatttttacgtggaaaacccttgcgggaaaaaaccacgggcgccgaccggtaatgatcactatagaggagtttattacaaacgtaggggaataacaatgggaacgtcaccccttcccatacggcttacaagagtatatatacgggataatagaaagacacctaataggactctgttgatagaaaacacagggcctgggagatctgcttaactccagtgcatgtccaaaactcgccttcggatgtatgagcgtgccagttgatttgatcctgcaatcaacaagaaacaaagacaaagaaaccgtaattaaatccataaatgatagccgatcggctaaatgccgatgacatgtcatttatctttgagccgatgtcatatgtaaatcgatcggcaattgttaagaaaacaaatcagaactaaatctactcgatcggctgcaaatatcaatgatacataatccttatatcgatatataattgaatcaagtgattgggatagatcggtcaccttgccgagacagtataaatcacttagatcgaaatatatattaataatgagattatatatatatattcatagcatagctgatcagatagatctagcgtgtatcggctaatactccgatactactttatattaagatattaaagcaaatagaatatactaaacagaaatctaatatacttaaatgcaacaagatcttaacatgaaggacagatctaacatgttaattgagcatgtagaacaaaagcaattggatcagataagatcggctgaaactccgatactaccctaatcggcaaccagtaggcaggctagagattgaaattctaagcacggcttaatagatcaaactcaactgatacagcattaagtatgaaaagaagaacaatatctagacgatcaagccgctggatgtttcatagagtggtggatatctcatataatctaagccaacgtcgttatttaacctaatcggctgccttctggtagcagatgttagccgattgtaggttaaatgacgatattgtcaaggattatgcaagatatatgataatttgacggactacataaacaagattagagtatcataaagatggaagcactaatctcgagaacacaagccgccataacaagtttacctcttgttgaagatcgaaaccgatgcagctcaacccgaaagcaataactcgtcgaaataaaacgaaagcaaaaagagtggcgatgcgccgaaattgtattgaacgtgtgtgttaatcattacatagggctcggggtctatttatacccgagaaatacaagatatgtccatattggacacgactcttatctctaacaaactctaagataccacaagtctttgcggcagacttttgctcacatttatctctaaggaatttacataaaatatcctaattaatagatacaattgccttcccaggactctatccatgcgtggcaatcatcttgaagcacatcaactcgaacccaatgtcgcatacgggtcgtattgtcggaatcggctgtatcacttaaccagtccgactcagacttagccgatcccagtcgtagccgatccggactccagccgattattactctgtttccgaaaaaacccttatcttcgattctacttcgatttcattttcatctccaatactgatattaccaaatttggtcgttaacaggctcctactaggaaactaattcgaatatattgtgggcccaaaattcggatcacatatttaacaatatccaccttgagacgaatttcctcttgtagcataaaaacatcaatcaccaaaaatacctcatgtaggtaaaatcaccgcgcgccaaatagtctctaggactatactgtaacacccaccaagcttgagcaaagctcaaacttagtagcaggaactggctttgtcatcatatcaactgggttatcatgagtacttatcttgcataccttgacatcaccttcagcaatcacacctcgaataaagtgatatctcacatcaatgtgctttgttctctcatggaacatctgatcctttgtaggcatattgcactttgactatcacaaaatatattaatgcaagacgtaactccacaaagctcagtgtacaaacctctaagccaaatagcttctttacaagcttcagaaatagccatgtactctgcttcagtagtagataaggcaacagttgcttataaacttgccttccaactaacagcacatcctccaatagtgaaaacataacctgtgagcgatcttcttctatccaaatttccagcaaaatctgaatccacataaccaacaagtccatctctagatctcccaaactgcaaacaagcactagatgtaccacgtaggtatctgaaaatccattgaacagctttccaatgctctttgccaggattagccatgtatctactgacaacactcaatgcatgtgataagtcaggacgagaacataccatggcatacataagtgaaccaactgcacttgaataaggaactctagacatgtactcaatatcataatctgactgtggacataaatctgaagataatctgaaatgtgcagctaaaggagtactcactagttttgcgtcatgcatattgaaacgatgaagaactttttcaatataacctttctgactaagatataacttgccagaatgtctttctctagtaatttccatatcgagaattttcttcgctgcacccaaatccttcatctcaaattcactactcaattgtgccttcaattttgttatctcttatttgtcttttgcagcaatcaacatatcatcgatataaagaagcaaatatatagctaaatcatcaacaactttaagataaacacagctatcataattggatcttctaaacttctgagaaagcatgaaagagtcaaatctcttataccattgtctaggtgactgcttcaacccataaagagatttcttcaacctacagactaggttctcttttccagaaacaacaaaaccttcaggttgctctatataaatgtcctcttctaactccccatgtaaaaatgcagtcttaacatccatttgctctagttcataatcatgcattgcaacaatactaagtaaagtgcgaattgaactatgcttcacaacaggggaaaagacatcattgaaatcaatacctggaatctggctataacctttagcaactagccttgctttgtatcttgcctcatcacttggagacatacattcctttcttttgaagatccacttgcaatggataggtttcttctcctttggcaacttcaccaattcccaagtatgattcttttcaagtgactccatctcatcatgcatagcagttatccatctattgcaatcatcagaaacaatagcctcagaatatgtagaaggttcggcattaccttcaatttcttctgccacactcaaagcataagcaactatgttcgcttcttcaatatatcttggaggaggtttaatatttcttttgggcttatcttttgcaatagaacgttttggagattgatgaacaatagaagaatctgaatcttcaataacaggtgcatcttagttaatagcaacaaattcgttttctggtgcatgtcctgaactgatcaaatgctccacctgcacacttgctttctcctgactctcaacaggaacattagtagaaggtttgtcatgtaacataactgattcatggaagacaacgtttctactaatcacaaccttttttgtttcaggacaccataacttatagccttttacaccagacggataaccaagaaaaatgcacttaatagctctaggctccaatttaccattatcaacatgagcataagcagtacaaccaaatactcttaagtctgaataatttgctggggaaccagaccatacctcaattggagtcttcttatcaatggcataactgggtaatcgattgataagataacaagcagtggaaacggcttccgcctaaaactgtttaggcaaacctgcattagacaacatacacgggcctttgatataattgtcctgttcatacgctcagctacgccgttttgttgaggtgtgtgaggaacggtgtagtgacgcacaatgccttcagacttgcaatatgatttaaatatcttagaacagaactccatcccattgttagtacgaaggattttcaccttcctttcagtttgtcattcaaccatagttttccactccttaaacacatcaaaagcttgatatttgtgcttcaagaaataaggccaaacttttcgcgaataatcatcaacgatagtcatcatgtaacgagcacctccaaaagatgtcttacgagcaggcccccataaatcagaatgcccataatcaagaataccttcagtagtatgtgtagatgtattgaacttcaccctcttatgcttgccaaatatgcaatgctcataaaatttgagcttcccgatgctttgtccatctagcaatcttcgcttgctcaattctgccaaaccaatttcactcgtatgcccaagacgcatatgccaaagattagtagcatcggaattagataatgaatcagaaactgcagcaacattacctaatatagttgtacctcgcagatggtacaggttggcagatttaatatcagctttcatcacaacaagagagcctttagttaccttcaaaattccgtctccaccggaatatttgtaccctttgccatcaagagtacataaagagatgagacttctcttcaaatttggaatatgccgcacatctgacaatgttctgatacagccatcaaacatcttgatctgaactgttccaatacctgcaacctcgcatggtgtatcatcacccatcaaaacagtaccaccttgaacagcttcataggtggcaaaccaatccctatttgggcacatgtgataggtgcatgcagtattaagaatccactggtcactagtttgtgcacaaccaacataagcaacaagcaattctgcatcagatttctcatcagtaacaactgcggctttaccttcctcttctttcttaccttttggtacatattttccggttctcttgtctttgtcctgtagcttccaacactcagatatatcatgtccatctctcttgcagtatttgcatgacttatacctgcctctggactttgatcttccatggtagctacttgaacttttatctcttgatttgctgtttgtgttcttctcctgttgcctgccccgaacaaccaagccttctgcttgtgaatttgaaccttcaaagggtaccatcttcttcatcttttctttggcatgcaaagcatcataaacttctttcaaagttagagtatcatggctataaagtatagtatccctgaagtttgcatatgagctaggcaatgaacacaatagaataaggcctaaatcctcttcatcatactttacctccatagactcaaggtcagcaacaatttccttgaaagcagagagatggtccattacagacccatcatcttgcaacttgtgtaaaaataacttttgcttcaggtgcatcttactggtcagatccttagtcatgcatatctgttccagcttcaaccacagcccagcggttgtctcctccttaagcacctcctgcaaaatattgttagatagataaagatgaatatatgacatagccttacgatcccttttcttctcatcgttggaccaatcctgagtcctcttgtcaaatccagaaagcgcatcatcgaggtcttgttgtgcaagaacggctcgcatcttcacttgccaaaatgagaatcttgtgtcttggtccaggagcggtagatcatacttcaaactcgccatgggaattaatcctgaatttgctagaaagaaattagggtaaatctagcaaaaaaacgcgaaacccggtacacttctcgtgtgcacgtagcgtagatctgaaacttcctggtacacaagcttgtgtgcgcgtagcaattccacgtgaatagaaaatcacgtgaacaggaacctgatcgcttccctcgttgacttccttttcagcctcgggaaccgtgcgatttagtagatgtattgacgccggctgctactcctggacgtgcgcgtagacggcttgctgctgctgcttgccaatctcctgacgcgtgcgccgattccaggacctgggctgctgctgccctaatttcgcgcgggctgtagggatgacgccgatcagatcgatccggcgactcgacgatccggcgcctcgacgaaccggcggcggctgcgtgacgtgtagatcgatctccaaagctctgataccacttgttatgaaaatagatgcacaacggagacacgaatttttacgtggaaaaccctcgcgggaaaaaaccacgggcgccgaccggcaatgatcactatagaggagttgattacaaacgtaggggaataacaatgggaacgtcaccccttcccgtacggcttacaagagtatatataagggataatagaaagacacctaataggactcctactaggaaactaatccgaatatattgtgggcccaaaattcggatcacatatttaataggggggagtggaggtgggcaggtggccactgcccctgggcagtggcaaggtgtagaggttctagtacttgtgccgactacctcgacaccatcactacgctcctcctcatcctcagcgcccatccttgcgatcatcacattcctcaccactcctcagtcggatcccaccagagaacacatataaaccatccgcgtcgatggagctcctatctcgccacttcgctattgcagggagtggaatctaatccggggatgtccctttgtatattttttctttcaagttcatgtaaatggttatacaaaatgtaaataataatttgacaatgtagagtacagtaacatctatcgctccaccaataatcaacttcaaacttgatctatacattgaaaaaaaacaaattatgggatgaataatactatattgttcatatgttgaatttgcccttttcatttctcaatgtgtgagttgagtttaagtttaaattttattttaaagtgatatatgtatgtcatatgaatgttattttttgagatttttttaataactatttgagtggtgtttgagcaaatgagaggacatcccctcaagagtttaaaagtgtttcctgctattatgctattatggtcgctcaacatttagtctataatcgagtttgccgttattcattccacatccacaattgtttgctagctcacgtgtcttgcatgtgcgtcgtgggcaacgttgaggaaagcctcttgaaagcagcacattttacataggagcttgaagtaaacacatttgctcatgcactgggtgaaaaacaattgaaaatttctcagatttagattcagattcagataattacatcatacatcaacatctgagatagtcaggtgcaaagcttctgaggtctctcctccctggtgatcagatgatgtgaagtccatacctcacagttaagtatgtagttgtagtgaggtggaagatgagatcttgacgcgagaaccttgaattttccttgaggtctaacacttccaaacagaaaatcttgcaaactcaccatgggaactgcagcttcactctgaggaaagtttgtgtgataatctaccatgtcctgaacagaacatgtctgatagtcgccaagaaccacaagatattcagaggaaacattgtttatcatcctaatgtatgtgggttcaaccgggtgccaaggacagtcaatattggcaccgtatcctaagagattcttctgcttgaattctctgattcctgccagagccatgctccaaaacctaacattgaaatttgctttcagaagtacactgtacatgcttgaacccatgaagcacccattcatctccctggccatatccatggctatcgatgccaactttgggtgctcctctgcatctatgcttccaaatgtgcgaaccttgaaaaagtaccagtaagcttcttgagttaagtattttactctaagagcttgggttgttccaaacctcgcaatcttatcagatcggcttgcgactataatcttactgccttttgcaacacaccttttggaagctgagtacaatctactccatgcagcctcatcgatgtccctgctcaattcgataataatcagtagtctttcttcaccagtaccacggttttgatgcttgattacaccacaatctctcagagtcaccatatttgcatcctcaagatcatcgtcactgaaatgcacaatctgaaaaaagcggttacgcaccctttcatcggcacaggcatgctcaatcagggtgctcttaccaaccctccacgggccaatgataggcagaactcctgtattttcatcaccaggaatatcttctttgagcaggaagttcatgatgtgctccatttccatttggcgacccaacaagcacttgtctagaagcaagtgcatgctatatggctgacggcacaaacggggacacctgttcaagaacatgacaacctcacccatatcttcaatggtgacctcaaggctgccaaaaacttgctgcagctgctcttctaaactcttgccactgaccctgcagaaccggatgccttggcaggattgaacttggatggtataacatggttactcacctcgtgatctttggtatggtctgcttcatggacatggcatctgaatctgtcaagggtgtaatatcctctgtacatctccttccttagtatgttcagttgctgcagcatggattggtttgtgatgagccgttcatctgcctcctccaggatgatacgggcccggagcagcagccgttgcagtctctcctccacggttagcgctgtcggtttcgaggacttgttgatcaggaaagatatggatctactggcaagatcacctagaatggcagacagaaatgtctccatatgtaacaatgtaatctcaagttttgtagtttgagacaagaactgagacagagagaaagtatgtagtctgaaagtttttagtggatctggtgaagcagagtaggaattgaggctggcacatattccagcagctccatgtcttcataaaaggaaacgaattgcactgtgatttacctcaacctagatttatttttcagtgtgaaccgtttgaatataagcttcaggttttctctgcagtttggattaatataatcatacaagactgaccatattgtgaagatgatgaaagaagtagagtaaattcttacagattnnnnnnnnnnnnnnnnnnnnnnnncaagtttcacagacacgtgtatattttagttgaccagttctgcatactactactaggcaacacaatagccttctaatgtgacaaaaaaatatttgttttgatgcgggcgttatcttggtgacttagctaattggaaagaacgcaatgctcgtgtctttgaggggcacgcagtctcaccggtgaatctttgtgcgtcaattgaggatgagtggaaattgtggtaagaagcgggcttgaccacctctctttgagttgtatagtgggtgcgagggttttcccccatagttgttgtgtatagagggtttctttcttttttgttgtgatagcacgccgtttcctctcggcgtgctttgagacctgtaaattctttcttacctcttagtatattccggccagttattgccgaaccagcgaaaaattgtgaaaaaaaaggacttgatgaacatgaacataaggcatctcaaactttttttttatgaatgtcaacatgttaaaactgttgaaaaatgataaatgcatgtaacatgttaaaatgaaaaagcctgttgtcccaaattaattttccattaaactgttaaaaattttccatcctattacaagttaataaattcccctgttatgccccagtacaaattctaagtcttctttttctttttttttgttgggccaaaattcaagttttttttcattttgttaatttagagtcaatttttttgctgctacttgtctgactgaggagtgaggaccagcaaaaacgacattcagaaaaagcaattttacagtccttaaagaggtaccataaggtaccactttttctattgtaaatttggtatctcttgctacctaggtactataagataccaaattttacactaaattttgatatttgctccgatccagcaaaaaataactcgaggtaccgataccccacggtaccaaatcgtttccgatcgttggatctaacaatgcccatcctgcccagctagacccaacgatcgcaaacgatttagtaccgtgaggtaccggtacctcaaggtactttttctggaccggagcaaatctcctaaatttttggtacctcatggtacctcctcaaggaccgtaaaattgctcttcagaaaatgctttccctactaccatttctgcctatttatacatctgactagctacatttcttcaacgatagaattatggtacatttctggactatctagacactttctctgaaatttcttttggggatcagtgcacacttcaatggtaaatcaatatattctcagaatatgctacagattcttgaaaattaagtacctgaatagagagcagacatggatgtagaggagggatcgccgtcagccgccgccattatcgccaacgtctctagattcggtcggcgacatagcagctcgccggccaagttacagggccatgaagcaattcagaaattccccatcaataatcgacactttaatttcgttagtttttgggagtactacctccatcccaaaatgtagcaacctagaatgggatgagatccatcctaggataatgtcatgtctagatacattgttctaggatagatatcatcccctcctaggttgttatattatgggatggagggagtaaaaaaatgttttttttagagtcgacagtataagtggtactcactcccattccaaaataaaatgattattcgactgtactatatctgattatatatatagtacttgccactattgactctcactgattccatttcgacccctgattttcaaaatgttttttaataatggattaaataaaacccggtctccacatcccgaaggtcggatgtacacaaccacagtattacatcaccaagcacttgggcttacaaataagtttaaaagcaaacgccatcataggagacaaatagacgacaaagacatctagaacaagtctcacaacaaaagatttcaactaacaattcaatcttcctatccaattccacccagattttgagtagaattccataatggtaacttccaatttttggcacccaacagctttctcgtcactctctttaagaagcaaagaccactagcaagcccagcgtgtccccctgaaaataatctgcaatatagagttaattgttgagccattgaagactacatcattcctagcaacctaaagtgcccaacaaatagccacaactcccacgaaaagttgatccctaagcttagatactaatccccatgaccaaccacccagaggattagcaacggaagtaggcacttgtattcccataaccatgaaaagaatattccaaactgaatgtgcaacatgacaataaaaaacagatgttcaattgattcttcagagttacagaagcaacacttaccttttcgtctccttttaaccaaattgtcttttgttaagactactcctttgatataccaaaggaaaatcttaatcctaagtggaattctaagtttccagattatcgactttcttggtaccacattatggtacataagagccttgtacatagaactcaccgggaagactctcttcccattggcttcccatctaaaaatatctggactattagataagttaaacaagaccatttagcataccagcttgtatcacgcattcaggttatcccccaccaaagctctactaaagggcacatttagaggaacattgcccagtacatcgcttactctcgcatgcttgtttattgttagtaaatagagggagggatataacttatcaaaggagttagtcacccacccagcgatcctcccaaaatctcacttgttctccgtgtccaactaccatagatcctagttgcaaaaaatctttcttaaccatcataagcccggccctaaaatgtaaatccccagaccgcttttccacttgagtgattgttcaattggctaagtacttccttttgaacagattttgccacatgcttccctcgttaaacaatttatagagccatttgcttaataggcacttattttgaatgtctaagttttgaatccccaccctccatattccttaggcttacatagaatactccattttgctaccctatacttctttttatgttcatcacattgccagaaaaatcttcttgagaatacctttagttatttcaaaaggttaaactacttgcacaaaaaaagtcagattcagcacttctgataatagagcaattttacggtccttgaggaggtaccat

SEQ ID NO: 16049 - DNA, 4286 bp, Oryza sativa
aggaacctcatggtacctcatagtacctaggtaccatgaggtaccaaatttataatagaaaaaatgatacttcatggtacctcctcaaggaccataaaattgctcttgataatatgtacttcccctggttcgataataggttgagctcaagctgaagccccgcaaaatagacccttagtctggaatcgagtttcccgttattcattccacatccaaaattctttgctagcttttaaattgattttatggtcctttttagatggtaccatacattattgttgacgtatggttttcatataaaaagttgcacgcttcctctcctttgtccaaccaaaattttcttttcacatgaggaggctaagtcctctagtgtggagattttgcaaaacaatgaaaacttgaaaaaaaaagaactttaatggaaaaaccatacaactgagtgtaataacaatagatttttacatttatacatggcaaaacagttcgatctaaatctttctcttctgacggagcctaatcctgcaggtagttgcagacttgaactcatgaatctcggagctatatatgtagctgtaataaggcggcaaatgagatctccacagcacaagatcaaatttcccatgaggttcaactctccctgacaagatatcttgtataccaatttttggagccttctgatcttctgcatgagcaagctctactcggcaatgttcaaagatttcacagtagtagttcacatttccatctgtcctaggaataaccacacacttgctcttcatcccaaaatcacctgaacctttgttaggcagtaactggctctttgattccttggtcctgaagcgctcacgcaggctaagccagtcgccattgtaaatactagcttgaatgaaggtagccatgttgttcagatcaatgaatggtccaatgaaagtattgtacatctcacgatcaaagtatccattaaacatcgccattgataccgatgccacctcggggtaatctttaggatctgagcttccgaatgcgagaaccttgaagaagtaccagtaagcttctcgagacaagaattttaggcgaagaggttgtgttgttccaagctttgcaatcttctctgatcggcttgtgattatgattttacttccagctgaaatgcaacttcgagaagaggagtacatccttctccattcgtcatcggaaacatcttcagttagctcaacaacaaccaataatctttctcctccacttgaagctaatgatgagttgtgtttatgccttatcactcctgaatctcttaggataagcaatgatttttgctcgctcaaatcgctatcactaagaaagatgatgcgagagaagtggttgcgcaccctctcatcattgcaaacatgctcaacaagtgtgctcttcccaactttggcaggaccaatgattgataggacatcaaatatgtcactatatggagtttctggatgtaacaagaatttgatgatatgttccatctccatttggcgcccaaacatgcacttgtccatgaacatgtaggtgttgtatggttgacgatgcatggaaggatagttgttcagaagcataacaaactcagccatgccagccatggtgatctctatgatgtcaaccatctgatcgaactctctcatatctccatgtcgtctagtaccagtaaggactcgagctcgcttgatagagttgaatttagacaaagataaggtgttgtaactcacttcattgtcatcgtcgtcgttcatgtcctcctcctggtgtttctgaattctgaaggtgtcaagagcatagtagcctttgtgcatatcttgtctcagcatgttgacctgacgaagcatggcttggtttgtgatgtgcttcccctctgcctcttcgatggcggtggcgagccggagcagcatcctttccagtctctgaatcttctcctccatgaacgtcgccgccataggcggcgatgacggcttcgaggagcatctgtctatcaagaaggagacggatctactggtgagttctcctaggattgcagagaagagagtctccatttgggaaatggaactttccttctccccttgcaagatggttcagacaacaatttgatgaatggatcaacaaccagaataagaggaatcctgcaatcgtataatggcaagtgctctagcttgtctgagtagcatttttttgatgccaacttgtttgactagtaattaaaatgacatcgattgatggtgaacaaaattttgtggatgcagtggttctatagaaaagtatgcaatcaatcaacaccaattattctttttggggttgagagttgagagatttgcttaagagttctgtttgatgactcaagtactgaatctactataaagcgagactttcgttgtgcatgatattttttcttgtattttctgaccagtgttgaccaaatacagggagactacacctttctatagacttttacatatttcgtcaataactaattcctccaagcaattattgacctatacagatttaattaacttgttgtaaaactactcattttgcaaacacagaagaaggttaggctagttatcatcccagattaaaaattcagtcagaggaaccggaaaaaggcaacgctggaatcattgtttgcgatttcatttcgcacatttctacttgtaagtttggttggttgtgtacatctgtttggatgtagaggctggtttaatccattatctaaaaaaaatgtactttctattcacggcacgggggttcagagaaatttcagaaatcttgggaattttcagaacgaaacaatttgaaatttaaacaattttgactaaatttggaccaaattcacaaaaaatgaaaaaaaaaagggaagaaattttccgaccaaattggaaatatcagacctatgttatgtgatcttaaacgtctgatcgtgccaatacgtgtttgtactgtatttcgttaaggattaggatgctttcttgcaagttgcaacaaggaatcgatggtcagaggtcaacagtggcaggtaatacggagtagcaattaacataggatcaatcagttgctgtcagttgtcatcgacttctgaactaatatccttgcgtcttagcatgttgacatcttcaaacttcaaatagcagaaaattattagatgctgactagttcagtttggcaacctcttacaaatagcacatcttacataggatcttggatgacatactcgctcagatactaggtaaaaacatttcacaaatgatcagttttacattacagcataagataattacattatatacaacacatggtcagcaggagcacagcttcagaaaacaaccagattgtcagctgcaaagttccagagatctcttctttttggcgaccacatgatgtttcctctgtacctcacagttgaacatgtggttgtagtaaggcggaaggtgagacttccacgcaagaaccttgaattttccttgaggtctaacacttccaaagagaaaatcttgcatgctcaacatgggaacttcagcttcactccgagtaaagtttgtgcgacaaagaaccatgttctgaacagaacatgtgtgatactcatcatgaatcacaaggtattcggaggaaattttgtttactgtcctaacatatggaggttcagacgcctgccatggattctcaaaatatgtaccgtatactaggagattcgtctgcttgtattctctgatgcttgccagagccatgttccaaaaccgagcattgaaatttgctttcaaaagtccactgtagatgcttgcacccatgaagcacccttgcaactccctggccatttccatggccattgatgccatctttgggtgctcctgtgcatccatgcttccgaatgtgcgcaccttgaaaaagtaccagtatgcttcttcagtaaataattctactctaagagcttgtgttgttccaaatcttgcaatcttatcagattggcttgcgacgataattttactgccatttggaacataactcttggaagctgagtacaatcttgtccatacaacctcatcgatgtctctgattagctcgataacgatcaatattctttctccaccagtgcattggtttccattcttgattgaaccacaatgtcgaagagttaccatgtctgcatctttaagatcatcgtcactgaaacacacaatttgagagaagtggttacgcaccctttcatcgttacaggcatgctcgatcaaggtgctcttcccagctttcctcgaccaatgatcggcagg

SEQ ID NO: 16050 - DNA, 3731 bp, Oryza sativa
ataatagataccctgagtgaaggtccccttagagatggcaatctcttgcatcatgagagtaacaacatcgaactgacggccctgaatgatggcatcgataacgtgccaagccactcccctaatgtcatcattgttacccaggcgagggaggatgctagctctcacaatcctgttgaccacacttgggatggtcctcaacccggcaaccttcccatgtgtgtaccgcgctccaacttcataaaactgagagaggtagtcgatggagagcggattatgggtgtgctcctcatgcaagtcatctccaaagtccaagcgaacatttaggagccgccggaattgcctcctggagatagagcactgaagggtgtcggacatccacttcatctcactatagtccccggccacccacactgtagcataaaacttccggatcaaatcttcattgtaatcttgcttaagagttaaaatccggtcaatgccaacagtcctgaagagatcctgcaagcccttaaactcggtagtctcattaatgtctctccaagagatcaacttatgttctgcaaaagctttcccagcatagacttgctcatacacactcttctggaaagcagtatgaaaacggggatccggggtgtcccgaggcctcaaaaactgatcgtggtgcctcaagatggtatattgggatggattcctcatgtttacaacaaactggatggagggatcaatattcatctcatcacttccttcatcctcatcctctccacttccactgtcatcatctccactttccccctcgctagccccctcaacattggcctcaacctcttcatcactttgagcatactcatctccgcttgactcctcactcacgggatcaggagtgggcgcacgacgaccatgacgggtgcggggaggcatagctgaaaaacaaggagcaaaggatggataagcaacaattttagaaaccacatagtgaagtgggaggaagggcgagtgctgcctatcaggggcggtcagactgagagccacggccggtcagaccgccggccctcggccgatcagaccgcgtgccctcggccggtcagaccgacggccaatggctggttagaccgcctttggtcagaccaccactgacaagagcacacccaaatccttccacaatccacataaatgattctaaaaattgctaggacagtgttgcacacgattggaactagaacatcaaggtgtgtgtcacgaccggaaataacccaacgggcgttccttacgtgcgtgcattattccttgtcccaggaggcaaggtacaccaaaagttgatacaattcagagtttaacaagcggaagcgcaattaattaattattacatgggcggcgaagacccagcacacaagaagacaaacgaaaaacagcggaagactagggtgacgaccacagacgcttgacggcaggcacgagctagacaccaaagccttcatcttccaggaactcctcttctgggtttgggaaaaattgagcaagactgagtacaaccaccgtactcaacaagacacacccacaagtgcagaataaatgcaagggagtacaagggagccataaattaggggttagggtttgcagtaaatagcattaaaagacacttagttgctcaaagctattttgtaaacatggtcctagagctatacaatattattaatcaaggccgtgaacccacacgaacctgccttaacccaaggcctacgatgattcagaccgaactggcaacccgaccctgggtcccagctcgtcccaagccaacccaggccaaccattccacattttagttgttaagcaggttttaagaattaaaaacactaacttgggtacattgctcggcttgcccataaccgagggcgcggctattcgaataggttatactctgatcagaggtgtacatctttacccacaagacacatcttcctcacgtgtaaccacgtgccacataccaccacggtatacggacggaagacgtgacatagtttccaacccatcctagccatagaaaagagtaccgacccaaccccacctacgcccggaacccccgggacaggtaggcaggactgagcccctaacagcaggacaccggtcctgtgccatgacatctcgactactgggccgcagctcgtgtagcattcatttgccctagagatgtccatcgacccccgacttcgtccatctccatccgtgtacttttgtttataaccagactgagccacaatctaagccttacccactagacatgtggaagtacggtagtgttttgcaacagaggcccgaagaccggtccttatatggccgaggtgctactatcaaaaccatgcaccccgagcccagccaaaaaccattttgagggttttgaatagagggggaggtgtgaatccaattccaaaataatccatccattccgtagtgtccaggtgatgagaatattcccaaagtctagagttgtaaaaccacctaatgttgcctaattaaccagcgaagcatttacctaaaatcatactagtggtaccatgagtagagtgtccactagttggggttctgtttaatctagggtgaacaaggtaataatatcaataacaataataataaggtcataacaaaggtacataggcatggctagataaaacagtgataacgcgggaatttaagtaaagcgataatgcaataatttaaatgaaaataattttataaactgggtttcaatatgttcaaggatgatgtaacttgccttgctcgctttcccaaacgtcggcttcaacctccaccaagagcggatcttccgaagctgcagcgtctacacgaccaacagaaaagaaaaggcttttactctaataaactccatataacaagcaggaacaaagcacaaaaatgggttcttgacttcttaaggaaaaattagagacttgaacggtccaattccgagttcaaatggccaagttatggccatttgaagtttatatgctctttaaatgaatatttgcgaatttcttcatttaaattttaatttaaaaagggtttattgcgtcagccgagggggaggggcgcgcggaccgggtccacgggagtagggcccacgcggcagcctcatggtccacggtggaccgggcgcacccgggctcgcaccggccggcgccgtgggccccacgtgtcagccacacccgagggcgcgggcggctgacggctggaccccacgcggcagccactcggcgcgcccgacggcggccactcggcgcggccggcgggaggcggcgcccgcgcccctatggtcgccggcgacggccataggcacggcggagcggcggccgagagaggggaagggaagggggaaaagaggcggcggtccacggctcaccctaggtcgacggcaacgacgaaaaaggcagccagagcggaggaaggcggcggcgcggctcgggtcgacggggtcgacggcgttccggcggtcggcggacccggcgagggggtggacggggtcgatggcggtgcggcgaagccggaggaggcgacgccggggcgggagacggtcccggcgagcggagaaggccggccggtggtcgtcggcgacggaggagagagagggcgacggcgcgagctcgattccggcggagagacggtgcggcaaggggcggaaacgggcgggggaggcgcggggccagtttaaatagggccggggcgagagagggcggccggag

SEQ ID NO: 16051 - DNA, 4510 bp, Oryza sativa
tatctttatggcaccatcattgtcacataggagtggggttttgggaaggatatgccatagtccaacaatgtttgtttcatccaaagcaattgggcacaacaactacccgccgaaacatattctgtctcggcagtaagagggctacggagttttgtttcttggatgaccatgacacaagggatctaccaagcatttggcaactactggatgtgctctttctatccactttgcaaccggcataatccggatcggaatagccaacaagcttaaatttagcaccttttgggtaccacaagccaatagtagaggaatgctttaaatatcttagaatccttttcacggccactaagtgacactccttaggagcggcttgaaaccgtgcacacatgcaaacactaaacatgatatccggcctagatacggtaaggtaaagcaagctaccaatcatagaacgataaagctttaaatctaccggtttacctccctcatcaaggtcgagatgcccgttggttgccataggtgtcttaatgggcttcgcatcctccaagccaaacctcttgagtagatccttgatgtacttggtttggctcacgaacgtcccattcttgagttgcttgatttgaagtccaaggaagaagctcaactctccaatcatggacatttcaaattccctagacatcatatcaccaaattccttgcaaaatacctcattagtagaaccgaatatgatgtcatcaacataaatttgatacacaaagaaatcatcaccaatgatttttgtgaaaagagtgatgtcaacttttccaattttgaaatcctttgacaaaagaaaatctctcaatctttcataccaagccctaggagcttgtcttaaaccataaagagcttttgagagtttgtaaacatggttaggatatttagtatcttcaaaaccgggaggttattcaacaaagacaagttcggcaatttcaccatttagaaaagcacttttcacatccatttgaaatagttttatatcaaagcatgatgcaaatgcaagaaggatgcaaatagcctcaagtcttgccacgggggcaaaagtttcaccaaagtccaaaccttcaacttgtgtgaaaccttgtgccaccaatcttgccttgtttctcaccaccaacccgttctcatcttgtttgttcctaaagacccactttgtccctatgacattgtggtctctaggtctttcaaccaaagtccacaccttgtttcttgcaaagtttttgagctcttcatgcatagcattcatccaatccggatcacaaagagcttcatctacatgttttcgctcaagacaagaaacaaacgagtaatgttcacaaatcgaagtgacacgagatcgagtttgaacacccttactaatgtcacccaacacttggtcaattgggtgatccttggaaagagcggtgtgtatccttggtggcataggtggttcttgtgccttctcctcctccacttcaacttgagcttgacttggcatagcggaagtagatggctcatcttgagtggaggtggatggcttgtcttccacttcaataggcttgacatctccaattgacatgttcttcataactctcatcaagccttcatcacctacatcatccaaattctcgtgcccctcttgggagccattagtctcatcaaattgaacatcggcggtttcttccacaatacctttgttcttgttgtagacccggtatgccttgctttttgaggcataacctagaagaaacccttcatcacaccgactttcaaatttggttagtctaacaccctttcgatgaatataacatttacaaccaaaaactcgaaaataggcaatattaggcttcctcccaacaattacctcataggaagtctttttcaagacacgatgcaaataaagcctattggttgcatggcaagcggtgtttatggcttccgcccaaaaggaatcggaaacaccatattcatcaagcatagtccttgccatctcaatcaatgtacgatttttcctctccactacaccattttgttgaggtgagtaggtagcgaaaagttcatgtttaataccaagatcatcacaatagtcctcgatattggtattcttaaactcggaaccaatgttacttctaattttcacaagagtgcaactaaattcattttgggccctttttgcaaactttttgaaaaggtcggcgacaatagacttatcatgcaaaaagaacacccaagtatagcgagaataatcatcaacaatcacaagacaatgactattaccaccaatgctcttataggttgttgggtcaaacaaatccatatgcaagagctccaatggtttagatgtggacatgatactcttagtaggatgagaacatgcaacttgcttgccggcttgacaagcactacaaagcttatctttctcaaacttcacatctttcaagcccataactagatcacgttttgaaaatttgctcaattgattcatgccaacatgggctagccttctatgccaaagccaacccaaagaagtttttgcaactaaacaagttttcaaatttgcttcactagaattgaaatcaaccaaataaagatttccatatctaaaacctttgaacacacaagacttgtcaagaaggctagaaacaataacttcttgcgggaagaaagcacatgacaagctaagatcacaaatttgagcaaccgaaagcaaattgaaatttagagatttaacaagagagacattatcaattgacaaatcattggagatagcaattttacctaacccaattacctttcctttgctattgtctccaaatgtcactttctcttgttcattccttcctacctcaaatgtggtgaacatagccctatcaccggtcatgtgttgagtgcatccactatcaagcacccaatggctcccaccggtgtggtagttcacctacaaaagaagatcaagctcttttaggtacccaaacttatttgggtccttggaggttagagaccaaagctttgggcacccaaatgtcattctttttaccaccgagtataggggaacccacatatctaggaacaatgctaccatcatgagccttcctaagcatataatgagaatcaaacatgcatgtcttaggaggcttaccaccggggcaatcattcaccaaatgcccaacctcacgacactaggggcaatacttaccattgctcttgacaaaacgagtggcacggtgagaaggtttcttacccttctttggaatgaatccaagtccctccttgttaaggatgcaccgttgctcactcaaaatcttgtcaagagtgttcttacccttgaagcacctctccaacctcttgttgagcttagccacttgctccttaagctcattgttctcaacaacaagtgaggcatcacaaatagatacacaagagctagagctagagctagacatatccacaagatcatcacaagaggtagaaatgctagatgatgcaacataagcaatatggaaagtagcactatcatcaagcaaatcacaagatatgccaacatcaattagagctccatgttgagtagtggaaaggaggttgtcatgagcttccttaagcttctcatgagaaatggtgagtctctcatgagaagtctttagctcctcatacaagacctccaaagaagcatgatccttctttagggccttgaacttgacaatctccttctcactataagcatggagctcctcaaacatactcacaagctcatcataggaaacatcatcacaatcatcatcactctcactatcactaagagatgttaccttagaggagccttttgccatgagacaaagtggagcgaagagtgatggagcctccttgatggcaacaacggccatcttcttcttcctggagcttgcatcatcaccatcttcttcctcggacccggatgaggcgagctctcctcatttgagtcccattcctcgatgaaggcctcaatcttcttgccttccttcttgagcttcttcatgagcttgtagcctccactcttcttcttggatgacttgtctccatcatcatccttggaagggcacttggaagcaaagtgtcccttctcaccacactcaaagcacctcaagttggagagagtcttgttgggtcttctatttcttctcctatttgagttggagccctttcctctctcctttctccttcccaagaaatcattgaaccttctagcaagaagggcattctcttcttccaagttctcattgacttcattcaccttgcccttgcccttgtcttcaacttcggcttagagagtaatgcacttcttggaaggtgaggcttcctccatttcctttttcttcaacttatacatgtcattggtgttgatcttccccaagaggcttgccggtgtcatccttgacatgtcggagttgatgagcatggtgacaagggtctcatacttctctggtagagccctaagcatcttttgggcaacctcaagatc

SEQ ID NO: 16052 - DNA, 13633 bp, Oryza sativa
agccttcccttcgtgtttcacctcgttcgacatcttctctctaggcggtgaagcccaatcaggagagaccaagctctgataccacttgtaagatcgagatgtcgactagaggggggtgaataggcgatttaaaactaaatgacacctaatcaaaactaacctaagttgctaggcttggtgagggtcaactctaactatgcaactaagttaggttttgcaaacctagggtgatagaggctcaattatatctctaggaaagtaactcacactcctatgtcaatgtttagcaatcctagggtgatatgatctcaagtttgtctctagaaaagtaaattgcacaaaagtaaatgcgacaatcaaatgagacaaggagacaagagatttttcaccgaggttcggaaactcgtcggtttcttactccccgctgaggcgagcccaactccaccgctcaaccacgtagcctccgcacgcccccttcgtcaaggggtgggcatggcgggagccggcccatggagaggactacccaagcctcgatcactaggttagttctttcttcactccgaaggtggtgaactccaaaccactcacaaaccggcaccgggcctcctccacaatcttctcggagaggtcaccgggcagggcacgccggtgagaccgccactatgtggccggtctgaccgcccctggtcaggccgaacccagtgaatgtgtttgtgtgtgatgaaaaagtgagcacaagtgataatgcaatgacctaatgtggcaattaaaatcatctctttgctaggtcattacccctcttaatagtacggcgaaactagaaataaactagcaaatttgatcgccctacaccctgatcaattctaaattaaagcactagttttaccgtcttctttctctttgccttgcgccgtcaattttaatccatcgatcgtcatccatgtgcacacatgacgtggacctaacttaaaatattatctcaaagacaacggttagtccacaattagcgcttgtcattaattaccaaaattaacaccgggggcctcgatgcttcaacgtaggtgttagaacctaatatcacaagtgttgcaatacctcacaagtattacatgatgccccataggaatcatctgagaaccataggtatcagaacgtggtatcacaagtgaaaggatcttgatatcacctgcggaggggggggggggaggttgaagaggcgtttaaaactcgtaagtcaatgaagaagataaactttttggatattttggaatattttcggatattttggaatattttccgatattctgaaatattttgggatattccaaaaatctcagattttttagcaagctagaaaggcaaacaaaaagggatggtgtaacaggtagttaatgggtttgcacaaacaacgactaaactactagcggcaccaaatagcaaagctagaggagtaagaaaaagatatcatcaggattcttgcaagttgatgtgttaccaaagatcaaatccttggggggattctacactttgttgaggagcccataatgggccgggtcttttccaactctatcctcgctcttccctttcggaggtaagatccgaccttcacatactccctcggcacaccacaaacaaatcggtatctcgaggtttactcctaaccatctaggtgtcctcaaccaccaagagtaacaaatgccacagagatttcttggcgatgaatcgagtgctcaacaaatcttcacgaagtcaacaccaagcactcaaacaaactcaaatcaaccactcacgcacacacacgaaatctgagattgaagatcggtggagaggaagaagtgagaaggcaaaggctcaaactgaatctcaaatcaacacaagcccagggcaaagaataagaaatagagccagcagccctagcttgtgggtggagggggttatttatagccacagcctcagatatgcccgttgatggcaaagattaaatttttccaaaattctgaaaatcacaagaaggcaattgcatttcagcagcaatttttgtaaattccaaaaagtgcataattcagcagagaaaaaagcattttggaaataccaaaaatattttagaaaaatccaaaaatcacaagagaacaaaatcaactttcggaaattccgaaaaccattttcggaaaaatcctaaaaacaccagagagcaaaatcaacttttggaaattctgaaaaataccagagggcaatttgctggccttatcaattttgaaaattccgaaaagatctttcggaaattccgaaaatcaccaaaatgtaaaatccaataatgagaaacacttcgaaaggatttttgagcaccaaactcaaaagcagatagaaaagttgtaccaatatgaacaccttcacaccatcttctttctttgcttttatcgatactaatatggttgatacttagcaacttatgacttcctatggcctcgatcggtccattggtgtttggcaaggcattttctccttcaccactgcgtcggttcctttgcgccaaacatttgcttgatcttctcccatgcatggtccatcgcgtagcaagtcttgccaacccttcaccacctcttgccattttccgtcacttgtagaattggatgacaatgaaacctcgttgtattgcatatttttcttcatcatcttcattggttcttcatcggacaaatcccttgcttatacattcaataagtgcattaatcccttaatcgtttgtcatcaattaaccaaaacccactaggggcatagatgctctttctacaagtattgcttggtacctcgcaagtatacctaatatctcatagtaatcatccgatacacatcattatcaaaaactgatatcaagtgtatcgcctaatacctcgcaagtatcacctggtagctcacaggaatctaaagcacgactgattggagacatccccaatgcctaggtagatgaaggctgagatttgcctgattctcaagttcagagagaacccttctatgttgcatgaggtatccctggttggcttcagaaagaccttgtcacgaaccttccccgcttggctagtgagggagtaagatcacgtctcgtgggtaaagcatgcaccctctgcagaggattatcaaactattcgaacggccgtgaccatggtcatgggcaaatgtgaggtgattcctctttgcatagatttgtttgcctatactttgtgaaaagtgtttgtgggattgggaaccattactagaatcagtcatgatgagtaatagaggaccattacgtggtctgaaaatgatcttgtgtagatcggggtgtcgattggcattatagattaggcttccctagtggaagcagtgtgtgctagagattatggacaactcttggagccaaagagatgagtgatgagatgggctacccgatggtttgaaagtgaaaagaaactgatagttgagaacggagttagaagctgcttgatggcagaataatgttaaccaactaaaatttgcttcgtccgtttgagttgttgtaaagcaatttgccaacagtatctaagcaaaaacttctttctgaccccatgattgagggcacttagtggttcgcaaaatgttcttttaaaaagaaatggttgcgaagtaaacccagcctcccttcgaagtcttcatgctcacgtttctcatgacttgctgagtgttggtgatatgccctagaggcaatcatagagatgactgtatcacatactatgtttacatatttatccgacattgttccttgaaatagataactcattattggttaataaatgtttgattctttcatgagactcttgatgttgaatgttactatttctaaaggatccctgatcatatatcatatgtggaacaaatatgtttaaatgatcagcacatgtattagttgatgatcatgtctcatggatcatggtatagagataccaaattgataatgtggatgatgtgggaggtgaggtcccgaatcaacttctttgatcatccatgcattcgttatgctcggcctcttttccttcgtccaagcaagtacatctgtaaacgaaaatgtttgttcaagtatataacaagcaaatctaatatagaacatatgcacatttggttgattaatacctaaggtagtcatggttatatccgagtgttaacaaccaaatttggtaatttcagtatcggagatggagataaagtcgaagcggaatccaagatggagatcgttccgcaaacagagcaagaatcggctaaagtccgaatcggctgtgaccgggatcggcagagtccgaattggataaggttagctgattaagccgagtccgataatatggtgaggtacatgttgtcgggttaagttaatgtgcttcatgaggattgccacgcatggactaagtcctgagaaggcaattgtatctattaattaggatattttatgtaatttccttagagatatgtttgggcaaaagtctgccgcaaagacttatggtatcttagtttgttagagataaaagtcgtgtccgacacgggcatattttgtaaatcttgggtataaatagaccccgagccccatgtaatatgataacacacgttcaatacaatctcagcgcaccgccacccttttactttcattttgtttcgacgagttcttgctttcgggttgagctgcatcggtttcgatcttcaactagaggtaaaacttgttatggtggcttgcgttctcggaattagggcttccatctttatgatactctaatcttgttcatgtaattcgttgagttatcatatatcctatataatctccggcaatatcgttatctaacccccaattggctaatgtctgttactaaaaggcagccgattaggttaaataccaacgttgactaggattatataggatatccaccactctatgaaacatccaatggcttgattgtctagatattttccttcttttcatacttatagctgcatcagttgagtttgaccttgtaagtcatgattagaatctcaatctctagcctgcttttggttgccgattagtgtagcatcggggtttcagtcgatcttacctaatttaactacatttatcttatatgcttgattgacatgttaaattgccctttttgttaagatcttgttgcatttaagtatattaggctttcgtttgatatattttacttgctttgatatctcaatatagagtggtattggagtattagccgatacatgctagatctatctgatcggctatgctatgaacgtatatagtcttgttgttaatatatatttcgatctaagtgatttatactgtctcggcatggcgaccgatctgtcccaatcacttgatttaagtatatatcgacacaaggattatatattgttaatatctatagccgatcgagtagatttaattttttcttacttgttcatgattgccgatcgatctatatatgacatcggctcaaagatgaatgatatgtcatcggcaattagccgatcggctatcgtttatggatttaaccgcggtttctttgtctttatttcttgttgattgcaggatcaaatcaactggcatgctcattaacctaaaggcaagatttttggacctacactgaagttaagcagatcttccaggcctcgtttttttacatcaacaccgagctagttatgttctcatcagtggacacacgttggggaacttgttgttggatagacccaactcgagacactgcaagagccatatgtgttgtgtcatcagtgatttcatttagtgttggtgttgaattcttagacatgagattatcatggttcccaacatatgtagtagcttacttagggactgctaaacgctaccccataattgggtagttataaaagtagttttcgggtatgctatgaaacatgtagtgggatatgaataatcatagtgtgatttgcccctcctatggagagatatctctgggcccctcaatgttatagattatagagtgcatggccatgccaaaggtgattgaggagtgtcacgccctaaaaatcctaaatgtataaactgttgtttaattggaattgttagaaattattttaaaagcctacaagctaaactctaattttctaggaaaattttcaacataaaaatgagctccgtcgttccggagtagagcgtttccattgaggaaggttccgaagcgtttgcggaagcccaaggcaagtcacacagatcccaaacaaccctttgagcatgttgaacccgtttaaagctattattttatttcaacttatgcattattttcgaatgtcattgggtggtgaacctttcccagttaattgttggccgaagatgactttattttcctatgggttataatttgattagcatgaaccttatataatggattggtccagctaaatgctatatatatgtttgcttagccatgcttagaaacattagctaactaaagggattaattataaactatgttatatttttattaatgatggttatattaaatggtagctcacgatggttaatcgtgtgaggttaattaattgataattaaaacctggttaaggtgggttgtgagcatatggttttgatggttgtgctcatgacaattaaggaccggttcgcgagctactgttgtgaaacatttatcgtgccagccacaagccagcgtgggcaacggctttatcttttgtatagcgtgattcattatagtgcgccagactgagaagtggcgagaagtccacgggggtcgctggggagtccaggtgtcacgaccggaaataacccaacgggcgttcctgacgtgcgtgcattaatccttgtcccaggaggcaaggtacaccaaaagttgatacaattcagagttcaacaagcggaagcgtaaatagttaacttattacatgggcagcgaaggcccagcacacacagagacaaacgagaaacagcggaagactagggcgacgaccacaggcgcttgacggcaggcacgagctagacaccaaagccttcatcttcaaggagctcctcttgtgggcttgggaaaaattgagcaagactgagtacaaccaccgtactcaacaagacacacccacaaatgcagaataaatgcaagggagtacaaaggaattatactataaaggggttagggttgcagtaaacagcatttaaagacgtttagttgctcaaagctattttgtaaacacgattctcgaactatacaatattaattatcaaggccgtgaacccacacgaacctgccttaacccaaggcctatgatgattcagaccgaactggcaacccgaccctgggtcccagctcgtcccaagccaacccaggccaaccattccacattttagttgttaagcaggttttaagaattgaaacgctaacttgggtacattgctcggcttgcccataaccgagggcgcggctattcgaatagattatactctgatcagaggtgtacatctttacccacaagacacatcttcctcacgtgcaaccacgtgccacataccaccacggtatacagacggaagctgtgacatagtttccaacccatcctagccatagacaagagtaccgacccaatcccacctacggccggaacccccgggacaggcaggcaggactgagcccctagcagcaggacaccggccctgtgccatgacatctcgactaccgggccgcagctcgtgtagccttcatttgccctggagaatgtccatcgacccccgacttcatccatctccaatccgtgtacttttgtttataaccagactgagccacaaactaagccttacccactagacatgtggaagtacggtagtgctttgcaacagaggcccgaagaccggtccttatatggccgaggtgctactatcaaaaccatgcaccccgagcccagcctaaaaccattttggggattttgaatagaaggagcggtgtgaagccaattccacaataaccaaaccattccatagtatccagatgatatgaatatttcccaaagtctatagttgaaaaaccacctaatgttacctaattaaattgcgaagcatctacctaaaactaaactagtggtgccatgagtagagtgtccactagttgaggttttgtttattctagggtgaacaaggtaataataacaataacaataataataaggtcataacaaaggtaaataggcatggctaaataaaacagtgataacgcgggaatttaaataaagcgataatgcaataatttaaatcaacataattttataaactgggattcaatatgttcaaagatgatgtgacttgccttgctcgctttcccaaacgtcggcttcaacttccacgaagagcggatcttccgaagctgcagcgtctacacgaccaacggaaaagaaaaggcttttactctaataaactccatataacagcagaaacaaagcataaaaatgggttcttggcttcataaggaaaaattagagacttgaacggtccaattccgagttcaaatggccaagttatggccatttgaagtttatatgctctttaaatggatatttgcgaatttcttcatttaaattttaattaaaaatcggatttattgcgtcagccgagggagagggcgcgcggaccgggtccacgggagtggggcccacgcgtcagcctctcggtccatggtggaccgggcgcacgcggctgacgccggccggcgtcgtgggtcccacgcgtcagccgcacccgcgggcgcgggcggctgacggccgggccccacctggcagccgcgggacgcgcccgaaggcggccttgccggcacggccgacgggaggcggcgcgcccgcgccccgatggtcgccggcggcgacctccggcgcgacggagcggcggccgagagaggggagggaagggggaagtgaaacggcggtccttggctcaccccgggtcgacggcggtgacggaaacggcgaccgaagcggcgagaggcggcggcgcggctcgggttgacgaggacggcggtgctccgacggtcggcgggcgaaacggaggagtggacgaggtcgacgaggacgcggcgaagccgaaggaggtgacgccgagacgggaggaggtccggggcgactacggcggcgaaccggagctcggcggcgacggcgaagagaaaggacgacggcgcgggctcgattccgatggggagagaaagcggcgagcggcggaaacggaggagagaggctcggggagcgattatatagcgtcgggagggggagagagcggccggaggggaaggaatcggcctgcggaaatctcggccgccattgatgcaccggcgaagatcgcgggagtgaatccggacgaatccgagggagagagagaggggaaagtggggggaaagagggagggaatcacggggagtgatttccccctctttatggcgcgcggggacggcgggatgcggcggattcggcggcggcggcggcgctagggcacgggcgggcggcgggcgcggcgcgaggtaggggatgacgggtgggccccacccgtcagcgagggtggcgggcgggcccgcccgtcagcggcgcgcgcgcggggaggaggccgatgggccgcgggggagaggagagagagggagggagttgggccgagccggcccaagagaggaaggggggggggggaaaaggacttttagggatttttctttttataaaacccttttaactttgtttatttcttctcaattattatttgtgctctgaaaatttcactaaaatttatttacgcattttaggcttttaggaaatacacaaaaatcctccaagccttatttgacttttatatttgcacattttaattgttggaggctttcacacgaattttaattattctcggcacaatttcgaggatgtattttagagtcgttttaggacgcgacagggtcccagctcgtcccaagccaacccaggccaaccattccacattttagttgttaagcaggttttaagaatttaaaacactaacttgggtacattgctaggcttgcccataaccgagggcgcggctattcgaataggttatactctgatcagaggtgtacatctttacccacaagacacatcttcctcacgtgcaaccacgtgccacataccaccacggtatacagacggaagacgtgacatagtttccaacccatcctagccatagacaagagtaccgacccaatcccaacctacggccggaacctccgggacaggtaggcaggattgagcccctagcagcaggacactagccctgtgccatgacatctcgactaccgggccgcagctcgtgtagccttcatttgtcctagagatgtccatcgacccccgacttcatccatctccatccgtgtacttttgtttataaccagactgagccacaaactaagccttacccactagacatgtggaagtacggtagtgctttgcaacagaggcccgagcttaatccttatattggccggggtgctacttcccacaactggcatgcacccaaaccccaccggaaaacaggttttaggggttttgaaagaggaagagaggggtatgtccaattccaccataatccaacaattccataatgtccaaatgatatgagatttcccaaagtctaaagttataaaaccacctaatgttgcctaattaaacagcgaagcatctacctaaattcatactagtggaaccatgaatagagtgtccactagttggggttttgtttattctagggtgaacaaggtaataataacaatagcaataataatgtcttaacaaaggtaaataggcatggctaaataaaacagtgataacgcgggaatttatataaagcgataatgcattaatttaaatcaaaataattttataaactgggattcaatatgctcaaggatgatgtgacttgccttgctcagagagaacggccttccgaacctttggcgacgaccgcgaaccacgcttctggaacctccggaacgacagaagctacgcgaagcacacaagcaaagctacaagcctataaagaaacaataacaatacataaaaagaaagcatacggttctttaggttataacaaacattaggagacttgaacgggtcgattcagagctcgtatgaccaagatatgatcatccaaagtttaatgctgttatatggagatttgcggattattataattaaactttgcaactataaaacatgtgtaagcgctagcctggaaagacaggaaggctgcgccgttgacatgcggacctcacatgtcaacaaaaaggaccgcggtagaccgcgtacacagagacggtccacgggtcgacggaagcggatcccgtgtgtcaaccgaggcgagtggccgacaaacggactccactagacaccacacggcctgcacacgtggaaaccacgcggctaccgagcgggcacactaacacagacactacacggtcaccacccgcacgcgtgaacgactaccgacaccggtacacgggtaccggggtcgacaaccgcacaacgggtacggggtgacactgaaaggacgaggacggggcagcgagaggacggatccttaccaccacgcgacgaggcgtgggaacaacaacgacgaacgggcgcggcggacggcgagggaacgacttcggcggcgatccttggacgaaggcgagacgcggccggcatgaggcttgacgacgcggagccgaggacaaagacgacgacggctacagcgaccttgacgaaacaccgaggacggacgagaacggctcgacagagggacgaacgccacgacgaccgggaacgacgggaggacgacgacgacgacgaccggggccggcgaggagacgacgagggcagccggcagcggctgcacggaggcgaggatggcgtggaacacgccgctgcgatgtcgacgacggaggcggcgccgcgagatgacgagccggcgaggatgaacggtgacgacgacgacgaacaccggcggggttcggtcgaaggggaggcgaggccgagggcgtccttgacgctgcgatgccggaggtggagacggcgacgtcggccggcgcactggcacggcgaaaggggctgccggagtgggtgccgacgagaccgaggaagaggcggcgcgcgtgacggcggtgagggctagggaccacgggagatcgcgggagtgggctaaaacgatagaacggagcgaggggattccgttttatagcggagggaagcgagccgggcatgggagagggcggaacggcgacgggaaacacggccggcagccatggaaggcggccgggaatggcgcggccgttccgggcgattgggggcgccattcaaggggaaaaacgggggaaatcaaagaggaatcaatggggattaattccccccaatcaatttggaaagagccggcttgaatggagcggatttggaggaggaacggcgctagggttcacgggagagagaggaaggaggccggcggctggaggccggggacgcgcctgacaggcgggacccacgcgggaggcgcgcggtcaacgcgcggcaacggcgcgcacgcacgcgcacgtgcgcggcacgggagggaggcgcggctcggcttgggccgggcgaagccgaggcggcccaggaggagaggagggagaggcagcccgggagggagagggtggaggagggagtgggccgagagggggaggggaagagtgggccgggaggaggaggagaggcccgggagaggagggaaagagagggaggagagggagactttggccgcgggccaagagagagagaggaaccttgggccagacttggcccaaagggaaggagagggttatttttaggttttcgttttattaaactttgataattgtttttgttgcttaataaatatttccggcgctctgaaaattcaagtaaaatttgagggctccttttagaccaaggagaatttaacaaaaattctccgggccacattcgaatttttcttgtacgtattttagtgtttgccaatttcttttcgaattttaattaattctattattccttttagaaaatgatttttattttgggatgaatttatcaggacgtgacaccacatcatgtcaccatgtgcctcaataccaccacggtacctcggaaaggagttgtgacaataacccttgcacaacataacccattacagcgcacctttcctggatcataatcacccccttataaacaaggcctggtgtcgcgtcccaaaacggctctaaaatacatcctcgaaattgtgccgagaataattaaaattcgtgtgaaagcctccaacaattaaaatgtgcaaatataaaagtcaaataaggcttggaggatttttgtatatttcctaaaagcctaaaatgcgtaaataaattttagtgaaattttcagagcacaaataataattgagaagaaataaacaaagttaaaaaggttttataaaaagaaaaaccctaaaagaagtcttctttccccccccctcctctcttgggccggcccggcccaactccctccctctctctcctctcccccgcggcccatcggcctcctccccgcgcgcgtgcggctgacgggcggacccgcccgccaccct

SEQ ID NO: 16053 - DNA, 1193 bp, Oryza sativa
gatgcttctggtggcgaggaggtcctttggtctgctacctttcagtgaaaccttgaagtgtttcgccaaaagctacactgactgtcattgcctttgatccggaaaagacacatctgaaactcttagtccaaacaaatgtctctttggttaatcacctgattttcttttccatcctcaggttggttattagctcgaggttagaatatagttcctctggcacgagaccctaggtctcctttgtcagtaaacaattatacacatgatcacatatccgcatcttccgaaagaatcctcttagaacttgtttttattaccaatttctcccatattacatgaatacaaggcactgtcttaaacaaaaagggacggtacttaacatcggtacattgtttctactatgggttagaattaacatgaggcctcacaggtacggcgtttgctccagtgaccacaaggcgagtgacttgtcttcttcttgcataatggccggagtgatggcgcaggttacgcttcggctgtggacaatctctggagaaatgacctggttctttgcagttgtaacaaatcaacgtcttctttgctgagttgtccgtctgggaacgatcgttctgactaggagttggaattggtggttggaaatccttgctaacattggcatcagtggtaccgtagttgctatcacaattggagtctttctcagtgtcaaaattgcacgcttgattcgagtggtcactaatggggcaagaaccatggttgttggtggtatcatcaccattagtattgctagggttgttgtctgtattgcgtccgtcttcttggggcaggaactcttgatgcacaacagaagatccggtgatctgaagtggctcagtgcgctgtctttggttaccacatggaattactgggatgttgacaatccttctcttgcagttcgtcatccgattatgctcactttcgagttgcatggctttgtccacaagtttctcaaaatcttcataatcctctaggagtagttgcacttcaagctcatcttttaacccctggagaaacttctcttgtttgtcttcatccgtttccacatcttctggtgcatagcgagccaaacgatagaactcgtgcaggtactctgtgacggtcaaatgtccttgcttcaggtagcgaaactctcgttttcttagtgtgatcattcctgc

SEQ ID NO: 16054 - DNA, 7342 bp, Oryza sativa
cctctgatcagagtattaatctattcgaatagcggcgccctcggttatgggcaagccgagcaatgtacccaagttagcgtttcaattcttaaaacctgcttaacaactaaaatgtggaatggttggcctgggttggcttgggacgagctgggacccagggtcgggttgccagttcggtctgaatcatcataggccttgggttaaggcaggttcgtgtgggttcacggccttgataattaatattgtatagttctaggatcgcgtttacaaaatagctttgagcaactaaacgtctttaaatgctgtttactgcaaccctaacccctttatagtataattcctttgtactcccttgcatttattctgcatttgtgggtgtgtcttgttgagtacggtggttgtactcagtcttgctcaatttttcccaagcccagaagaggagctccttgaagatgaaggctttggtgtctagctcgtgcctgccgtcaagcgcctgtggtcgtcgccctagtcttccgctgtttctcgtttgtctctgtgtgtgctgggccttcgctgcccatgtaataagttaactatttacgcttccgcttgttaaactctgaattgtatcaacttttggtgtaccttgcctcctgggacaaggattaatgcacgcacgtcaggaacgcccgttgggttatttccggtcgtgacaagttggtatcagagccaccgttgaccctaggacgagccgtagatcccaagccttagcaatattttcaaaaataaaaatcttttgttatttgtgaaaactgtctagtctctctctgtcttgctgcttcatttatcgccaaaatctgacctttaaaatgttgtttttctttttgtttttgtttgtagatggccagcagcgtcacccgtcgtggtttggacatgactggcttcgtcttggagctgcggggcatgtgcgtggtcttggggtatccacatggagtggactaccaggccaggccgcttccggagcaggagggtgacgatgcagagccccacgctggttgggaggtcactgcagtgatcctgtctggctctcccgagcggacttcgctggcagtcaccgcgggtggagattccttccccgccgcttgccagaacgccgctctcctcgctatcggcactcttcaccagcgctacccggacgagttgcagcactcgccctaccgctaccaccctcgtcgcggaggagcccgcgactacgccaccttccgggatgctagctcggaggatgacgctaccatcgtgcacctggcgcgcatggtggaggcgtacgacgcggctcgtatcgacttccaccagatggtacgccgtgggatggtcgagaacaacatgaagatcctggagctgcgtcaggagaacctgcagctcaagaaggacctagacgcggtggaggcgcagctgcatcagctcaagatcgcccagggagaggtctgccgccccaagcgtcgccgcgtctggtggagccgttccaaccaactgatgagttgcgaagccaacccgctcctggtcggtgcactgaatcaaccctagcttcttctcgattgtgcgcaaccaatcactggcttccataggatcgacggcaatggcaaaggttggaggctcagttttgagaaattctgataacttgcactgttgccggactgtaggcacttgaacgttggttgtccctgctgggctgctccaattctgtaatagttgaaaggctgttgccaacatgttggtttggttaaccacaacttggattagctctggtgaggtttcgttggtgcttctctcattcccattggcttgggttcttgcgtcatcggatccatcattcccatagcctttgttaccagtattatccatctgtcacaaggtaggggttgagaggggaagcatacaaggaaagaatagaccagaactagggacaagaccttaaaggaactaactctttttgttgatgtgttgtttgtttcacttattctgcaagttgattaagcaaacaacctagcatggttacatcaccacccaccgatgcaaaccacgcgctacacacacaagcaaggaacacacgactaacaacactaccctatagggtggcttaggttctgcgacgggttcccaagatcttcactccttcacagctggcttcattgcttccttcgcttcgctagcggatcctgcagtcttccggagcttcggcaaacaactgacgacatcttcttcctcgcaaagctgaccatctagtactagttgaaaatccgaagaaggaagaacggagtaaaccttttgcaaatagcattaggggaaggagaaaaaggaactttcgcaaataatttttatttataaaatatgtccttgggttttatccacttggcttatcctacagtcgagatggctctgataccagcttgtcgcgaccgggaaaattgccttttcccgaacgccagtgtattaatccccgtcccaggaaaagccggggtacaccacacaaacatgatatagaagacacatctttattatatcgataatatttacattattacaaaggcacttcaggcctgacaagcaaaaataaacagcagcggactagcggcctacggctccatcttcacaggcgctcaactggggtataagccaggactccacctaagacatcttctccaaagcttctcttactgaagggggggaaagattgagcaagaatgagtacaaccacagtactcagcaagccacaccggcagatgcataattaatgcaagggaggtacaagggaataataatatagggattaaggtttgcagtaaacagcatttaaaagtcacttagttgcccaaagccattttgtaaagacgatcatagaactacacagtattattaaacaaggccgtgaaccctcacgaacctgccttaacccaaggcctacgatgattcagaccgaactggcaacccgaccctgggtcccagctcgtcccaagccaacccaggccaaccattccatattttagttgttgagcaaattttaagaattaaaacactgacttgggtacattgctaggcttgcccatatccgagggctcggctattcgaatagatttactctgatcagaggtgtacatctttacccacaagacacatctttactccgcattccatggccttggaacccgtcgtaaagatgtgacatagtttccaacccatcctagccttagacaagagtaccgacccaatcctacctacggccgggatacccgggacaggcaggcagaactgagcccctagcattgggcaccaaccctccgccgtatgacatctcgactaccgggccgcagctcgtgtagccttcatttgccctggagaatgtccatcgacgcccgacttcatccatctccaatccgtgtacttttgtttatgactagactgagccacaaactaagccttacccattagacatgtggaagtacggtagtgctttgcaacagaggcccgagctttagtccttatagtggccggggtgctacttcccacaactggcatgcacccaaaccccaccgaaaacaggttttaggggttttgaaagaggaagagaggtgtgtgtccaattccaccataattcaacaattccatagtgtccaaatgatatgagaactcccaaagtctaaagttataaaaccacctaatgttgcctaattattcagcgaagcatctacctaaatttatactagtggaaccatgaatagagtacccactagttgaggttttgtttaatctagggtgaacaaggtaataataataacaatagcaataataatgtcataacaaaggtaaataggcttggctaaataaaacagtgataacgcgggaatttaaataaagcgataatgcattaatttaaatcaaaataattttataaactgggattcaatatgctcaaggatgatgtgacttgccttgctcagagagaacggccttccgaaccttcggcgacgaccacgaaccacgcttcgggaacctccggaacgacgaaagctacgcgaagcacacaagcaaagctacaagcctataaagaagcaataacaatacataaaaagaaagcacagggttctttaggttataacaaacattaggagacttgaacgggtcgattcagagttcgtatgaccgagatatgatcatccgaagtttaatgctgttatatggagatttgcggattattataatcaagttttgcaactataaaacaggtgtaagcgctagcctggaaaagacaggaaggctgcgccgttgacatgcggaccccacatgtcaacctaaaggaccgcggcagaccgagtacacagagacggtccacgggtcgacggaagcggaccccgtgtgtcaaccgaagcgagtggccgacaaacggactccactagacaccacacggtcaccacccgcacacgcgaacgactgccgacgccgatacacgggtaccggggccgacaaccgcacaacgggcatgggcgacaccgaaaggacgaggacagggcagcgagggagagggaaccttaccaccacgcgacgaggcgcgggaacgacaacgacgaacgggcgcggcggagacagacgggcacaacggaggcgaacggcgaggggacggcttcggcggcgatccttggacgaaggcgagacgcggccggcgcgaggcttgacgacgcggaggcgaggacgaagacgatgacgggggctgcagcgaccttgacgaagcgaggacgacgaacgagaacggcttgacggagggacgaacgccccgacgatcgggaacgacgagaggacgaggacgacgacgaccggggccggcgaggaggctacgagggcagccagcagcggctgcacggcggtgaggatggcgtggaacacgccgctacgatgacgatgacggaggcggcgccgcgagacgacgagccgggcgaccgacgggacgtcgacggcgagaacgatcggagacgacgatgatggcaggcagcagcggctgagaggaggaggggacagcgtggaacacgccgctgcgacgttggtgaaggtggtggtgcagcggggcgacgagccgacgaggaggaaggagaggccggcgcggagacgacggcgttccggcgaagttcgggcgaggaggaggtgatgccggggatgagagcggcgtcgtggagccgaggaaggtggtggcgacgtcggccggcgctccggggacgtggcagaggcggccagaggcggagaagtggtggcgacgccactggacgccggcgagggcgcgtctccggtgatttccccgcgaaacggagggctgaccgagggagagggggcagctgcgaggccgagggagaagacggcgcggccgggcggcgctcgggcgaggagaggaaggcggctggaggtggccggcgcgagggaaaggggagggcgacggcgggaacgcgcctccggcggtcaccgcgcgaaacggagggtaggccgtgggagaggaggcggctgcgatgctggaggaggcgacggcgcggccggaagacgctccggcgaggcgggagaggcggctggaggccggccggcaacgtgggagagagggggcgacggtggggaggtggctagagaccacgggagagctcgggaagaggctaaaacggtagaacgggggatgaggatcccattttataggatgggggagagagccggccacgggaggagcgggaacggcgacgggaatggcggccggcggcaaaggaaggcggccggacttggcgcgtccgttcccggcgattgggggcgccgttcaagggggaattaagggggaattgaagaggattcaatggggtttaatttcccctattcaatttggaaagaagggcattgattcgcgtggatttgagggaggaagggattagggttccacgggaagagagagagaggtggccgggcggaggaggaagaaggcgacggcggcctgacgcgtgggccccacgcggtcgggcgcgcggccgacacgcggcaacggcgcgcacgcacgcgcacgtgcgcggcacgggtgggagcgcggctcggcttgggccgggcgaagccgaggcggcccaggaggaggggagggagagaagatgggccgggaaggagaggagggaggggcggcccagaaggaggaggagaggagggagtgggctgcccgggaggggaagagaggcccgggagagagagggagagaaggggagggagagaaagagagggaggagagaaggacttttgggctgggcttggcccaaaggaggaaggagggttatttttagattttctttttaataaactttgttaattgttgttgttgtttaataattatttccggcgctctgaaaattcaagtaaaatttgagggctcgttttagaccaaggagaatttaacaaaaattctccgggccacattcgaatttttcttgtacgtattttagtgtttgccaatttcttttcgaattttaattaattctattattccttttagcgaatgaattttatttcgggatgaatttatcaggacgtgacaaatccaccccccttacaagaatctcgtccccgagattcgaggaggctagcaagaagataggttgggcggtcttctcttcttgtctgacttcttccgctccgtcttctataacaaacttgcctaacaacacttcttcactctggactgcttggctcgatctcctgttgcagatggaatcttctcttcacctgacttgtccctggttgaacctttagctgacttcgactgggttgcggcacttgaagatggggcttcagttccagaactttgcatagttcatatctttggagtcaacctcatacaagttacccacttcatgtcatgcgtcgagatcagctcgtctttactaagataccatgcttgtcataacttgtcatcatttagcattcaacgtattcctttacacctttgcccttgatgtgttctttcccgatttctcttattaatcacctttcgacctacttctttgcctggtaataaacatctttttcgatatcttctatcagtcatcttttgaccttggtcactaagtactcttcactccgagagttgtggatgcttctggtggcgaggaggtcctttggtctgctacctttcagtgaaaccttgaagtgtttcgccaaaagctacactgactgtcattgcctttgatccggaaaagacacatctgaaactcttagtccaaacaaatgtctctttggttaatcacctgattttcttttccatcctcaggttggttattagctcgaggttagaatatagttc

SEQ ID NO: 16055 - DNA, 824 bp, Oryza sativa
ttcatttgccctggagaatgtctatcgacccccgacttcatccatctccaatccgtgtacttttgtttataaccagactgagccacaaactaagccttacccactagacatgtggaagtacggtagtgctttgcaacagaggcccgaagaccggtccttatatggccgaggtgctactatcaaaaccatgcaccccgagcccagcctaaaaccattttggggattttgaatagaaggagcggtgtgaagccaattccacagtaaccaaaccattccatagtatccagatgatatgaatatttcccaaagtctatagttgaaaaaccacctaatgttacctaattaaattgcgaagcatctacctaaaactaaactagtggtgccatgagtagagtgtccactagttggggttttgtttgttctagggtgaacaaggtaataataacaataacaataataataaggtcataacaaaggtaaataggcatggctaaataaaacagtgataacgcgggaatttaaataaagcgataatgcaataatttaaatcaacataattttataaactgggattcaatatgttcaaagatgatgtgacttgccttgctcgctttcccaaacgtcggcttcaacttccacgaagagcggatcttccgaagctgcagcgtctacacgaccaacggaaaagaaaaggcttttactctaataaactccatataacagcagaaacaaagcataaaaatgggttcttggcttcataaggaaaaattagagacttgaacggtccaattccgagttcaaatggccaagttatggccatttga

SEQ ID NO: 16056 - DNA, 1514 bp, Oryza sativa
gtgcctggagcgaaatttgatcgacaaggatcagccgctgatttcaaaggttttttcttttcttatttgaggaagataaggactacatttaacttgtaaaccgttggtagaaacaatgactatacatactcttgccaaccatagatggaaatatttgtctttaaagtggtatactatgtagttttcttatttttaatcgagctgtaattttgtaatttgcactcatttgtcctgcaacctccgtaataactggttgtagtttttctttaagcaaaagccggaatgaatttcattataaaaaaaaactacttcaagggtcactgatcttgccgatgcaaaaaaaaaaatgttcctatgatcaatcgatgagtaaataagtaaataagaacaacataaaaacaatctgaattagaaatacgaaaaaacacatacgataagttaggttccaaagatgggaaaacaactatctaactgttcacagcttcatacattaaattagcaataataatgatttaaaaacccaagacaccctgaagtaatacatagctattggaagaggtgggatgatatccaagacgtccctgctacctaggaacatcctccatcagaacatggtctcactttggccatggtcacagatgaagttgcaagaccaaacaaccattaaggtcacgtggcatcttgtttgttaaattgctgacacctcgatctaaatattaatacaaagtcgaatccgttggaaagtggacaacacacctaccgcactgtaaccataccatgtcagtgtttataaacaattggacaaaattttacctctgcattgcactgaccattacagataaaaggttatctattaacttttttttttgagtagtgaatacaccacagttattcaccatttacaaattattaggagcaaacttttgttaccaggaaagattcaggataagtaattccattgtttgcaataactcacatcgacacaaaattacaaaattatgtaaaaaaaaggagttacaatatcgtcatttcaaaccaatatagatggcccatagattttctacattaaattcacctcacctggagagaaacttcagtgatctctttttgcctactcaactcagggttgctagaccatgcgtagctgctagtggtgttgctgctgtacccaccacccctaagctgccactcagtgatgtagcttggcttggtgaccaccttagccacatcgacatctccagtcaacattgtcacgaccttcgacattggcggtcgctggtgcggagagccctgagtgcagacaagtgcaacatatatgactctaaaagcttcatccttgtcaaattccttgagacttgggtcaacaattccaagtgcttgatccatttcatacaggccccatgccttttgataaacatagtttgagtaagcaaaaggcaatttacaatgaattgaagttttctagtatgggaagaacatagaccagcatacccattcaaggagacagatcttgc

SEQ ID NO: 16057 - DNA, 7830 bp, Oryza sativa
  unsure (1)..(7830): unsure at all n locations
taaaccaacaagggtgttttactatcaatgcagcatccatgcaatatcacaagatttcgatgttgcacagcggaaattgtcgcaacctctgtcacaaactggcttgttccctgatgagatgattgtgaaagttgcttcacagctataactctttcatcaggtagcttaccctgccaaggtttttacatgtgtattttgagcatagacaaatgttgctaaaacacagcacttcaatgccaaatcagataaatttataaccagctgcagttgtacataattaattatggaaataaagaaccttatacactggcccgaatccaccttcgcctagaatattttgagaactgaaattgtctgtggctagctttagctcagcataactaaaaacgtcaggtcgtccaaccaggttgtatagttctgcatgttatttttagcacagatgagaagagtaaaccagataattttgatgtttgaattatatatgtcctgatatataataccttctttctgttgtgccaatgctctccgcttctttactagtgtaaacactccaaataatgctgctaatactaaaactattgcaccaatcaatattccggaaattgcacctgctttacttttcctttttggtatgccgtttcgaacggtaggagtaaaatctgcaaaggaaaaatattatttatcggcagcgaatataacacttcctgctgttgttttagtgtggtgcttacttggagtgacgctcaatgctgagatcattggcccatagtaattatctttagtaggtatgtcaacagtgcccttgccagcccagaatagatggatctcaaggaagtttttagacacagttaccatgaaactcctattaactacggtaaaagattttccacctgctgttttccttatatcgaaatccttttgttttagagcaccctatgtaaatatcagtaatacttttagataaatattggtaagattcagtagaaaaacattatataaaatgcacaaaatttctacctggatatatatgtcaaaaactcttctccctaagcttagccaagtctgtgagtctggaaaagctaattctgcgaattggagcaaaacagtgtaatttccattctcaagtccaagtccatagtacctcagagatgatgatgacatccttgcagtttcaaacaactctgaatcaactacattttgaaaaggttgggagctatatataatattctttgcatctatggcgttccctacactactgacaccccatcttgtttgaccggtaacataatatgttgcagctccaagatttgtaggatctgcttcataaatagtgtcatctgagcctcttatggatgcattactgccacagtcaactgcgaaggaataatctgcaattaagattaaaaaaattgtagccatcattcaaattcgtaagttcatgttactgtttagttttatgaagaatgagaaatatacattctggagatccacggaaacaaggggtgtcttgttggaggcagtttattccccaaggtagcgtactgtgcacaatttgaattgaaaatttaaagttaccagcaagattttcatatagttcactcgccaaattagaactaaatgtcacaagtacctttcactggtggtatcgagtaagaagttgtttgccaccaaattcctttcaaaaaacagaatattagtatttatattttttctcagcgacacaaatatcacacttttacacttacaactgtaaattgttttgtctagcccaagaaggaatgctcccagtgagttggttgtacgaaaaatctctgtcaacattccagaattatgttatacaaaattagtgcgtactattatgaatgtagtttgtgctatactgccatgtcaattgtatttgacatacatcacttttaatgaagagcttataccatccggcaactttcctgtaaggctattgttcccaagaaacctgaattgggcacagttcaagattataaaatatactcatctgcttaatacaggctcgtatgaacaaattgatgtaaagaaagaatttcttacaaagaattgagatttcccaaattcaagatggattgaggaacttctcctgtgatattgttaaaactcaagtccctgtgccacatgactatcatattacttgaacatatggtacacaacatgaggaaatgagtaataacgtcatcagttggcaccatggcctgtaattgaaaacttacagcaattttaactgtttaaacatggaaaattctactgctccgagatcactagatatcttgcagttcctcaatattctgtaacgaggaaatacaaccttggtaacttgcaactagacaatactgtaagctttatagctaaaagcatcacatacagtgtgctcagggatgccatattactgataaatgccaacggagagaccccatttataatatctccaatccatctgctcatttgagtttttcataaattagttatcagccttgacattgtcaaccttcaagagttcatgccacaaaaagagtatacttacaatcttgttaatttggtcagattagacagactttctgggactggtccttcaaaggagtttccgtggaaagcactacaagctcattattttagaaaaaaagttagggacattcaacctttataaagtaagaaaaaaaatctctgtgtgagcattcttaataagatctctaggtatgaacatgccatgtggaccgcttactgtgatgcagatatctgcatttatattgagtgaggactgaaatgtgaaaaaatgcttttgtttaagtctgaatggagataatgtgatatacagacagtaatttatcttgcacagattcatctatctctgaacagtaagaacgaatgatatcttaacaagcttacatgtcttccaaattagtcattgtgcccaaataagcaggtattttccctttgaatacattatctgatgcactcctgcaagcagaccaaaatatcatttagcatgacaacatgacgaatataataattgaggctatgtttttgactatacaagaacttcaggttctgaagttttcagaacgatgaagggaacggaccactgaatccagaactatcaaagtacctgttattgaaagtttgaaatattatcatgtttgacaatagatatgaccattccanatttagttcttttacaagtagaaataagaagttagaaatcaatggggtatcttacaattgctgaagtttggtcaagttacccagttcttctggaagacttcctgtaaaattgtctgagctaatgcccctaaatgaaaaatgaaatatttcaggactgacaaaaaatttttgtcatcaactaatagcaaaaggggcatagttttcctgatgtgccattggacccacaatattcatcattacaatatgttcaagtatttgctgttcaatcttacttgatcatatgaagcaccacatgagcaggagttacactgacatgcctattacatcctatttagtagtagttttgatcttttttatcactccctccgtcccattataagtgcaaccataagtgtttctgtatcaaacgtttgaccgttcgtcttatttgaaaaaattatgattgtttttaaaaaaataagtcatgcataaactactattcatattttatcatctaataacaattagaatactatttataaaaatatttcaaataaaacggacggtcaaatgttgagcactaaaacccacaactgcacttattatgggacgggggaagtagaacttatgcgattgctatttcatgtattattatattagttcgtgcagtccaaatatatactccactcatttcatattatctgtcattctacttttgttgtaagtcaaacattatatttctaaccatccatttttacatatttatatagtttaacatttagattcaacatgagaaataatttcataatttatagttcgtactccctccgtaaaaaaaaatacaacttctagctaacaatttacacataagctatgctcagattcgtagtcataagttcaactctctctctatatatatgtgcgcgcacgcgcgtgaaaactgctaggaattgacagttaaagctgaaaggatgagtggtttgtagcagagggagcagtggaagattaatccacatgtgagaaaagatttcttacaatgaaagaagattggtgaggtttcctagttcctttggaagtagtccagatagtggattgaaagataatgaccttgagatgattagcaataattaaaaaaaaacaacgaccaatagatggaacatgatctagaacaaacatgtaactcatacaagtattgcattgaagtaaattttccgatgaacgacggaatgggaccagtcaagtaattacggaataagttcctgaaaagatcacaaaaataaactagaacaattagccaacacaaaaataatgatgaatacctgacaagcatttgttggtgttcacagaaagaaccatgggattgaatttatattttgtgcaaacccttgatctataaattattagtacaagactctttagtagtgccacaccctgattttgtttcaggaatttataaattatttaataaaatacttctagaatttatattaaagtgtacattaattaagaaaatgaattaaagtgggaaataaagtttcctaaataaaacattgctggatttaatttttattatattctccatgattagtttacactctctagaattttttcggatttttcagagctcaattactaattttaacaatacaaacatcaattcaatggttatttaaatataaaataaattagaaacccctccaaagttctgggtcgaattgagcccatgtctctctctccgcgctcagcgcagctagcgctaggccgctagcctaagtcaccagcccaccgcctccctcctctcactcctgccaacatgtgggatctggtcccacatgttagtgttgtccccagcatccagccagaatcacactgtctgcgttcctctccaaatccagccgcctctctagatcttttccaaaattagttgaggccgtttgttccctatctcctctttcctttccccatgaaatccccaaaaatatctaagtaaatcgtgtggaatcgagctcgaactcggacactctctatccggtagaaccctagtttttcccagcgctgccatagccgtcttaggcccggatacattatctcgtggctacaaacaggatccccctccctctcctctttccgctgccaccctcgcctgcacaaatcggagcctgtagccctagcttcgccgctagcccatagcatcagcactgctgccaccttccagtcggatcacgtcgttgctctactcgtcgccgctctacttgtcgccttcgcccactgtcaccttcgccgggtgcgcaaggaggaggcgcatttcatctgccggtcctccatcaccctatactgccagaacaccgctattgacgatgacccgagctacaccgtcatttccacctcgtcgccttcaccgtccgtcgtcgcaacgcctctcgatgagttcggctcgtcacactcaacctctcggtaccctccgttcatgctgccgtgcctgattcgccggcgatctttgggttccgagcaggtcgtcgccggtgaggtgacatcatcaccacgccattgctattgtgttatcaccaaaagttggtaaggttccttagtggatttggttgaaggacaaatttgatcaaccaatggaagtctatccagaagataccgaattcaaaaaggattgtgaagaccatggcatggcatattaattctatctgttgatttagtaactttcctttaatctttaggaagttttatctaatgtctgattaagacttgtattttttccttttatgtttagcaaacntatgtcttgtctgattaggacttgcatcaacctgaggagataaatatgtaccacagggtctttgtaaactttctccacatattaatacaattactttcggcgcattgcaaccttttgttctagcaagttcttactttgagttgggctgcattggttttgatctccaatgaggaagtaatttctatcaacttttcatgtatcgccgtggcaagaactttctcgattaagtcaggtattctttttgggttgacgcaagcattacatatccgatatattgattctatctttaactgcattgccgtttagagttgcatcgacttagttaggactttcttggttaggtccgatattctgatttagttgatatttctctaattatactattgttttagatagatttgttatatccatcacgtctgtgtagatttatcggataaataggttttttaggggcaattgcttatttgaccatgtttaaaagcataactactaatttgaccctacaattttcagtttgcttatttgaccctgttcatcaaaatcaaatgaaccgtctgaccctgttccgttaaggcgggttaacactgttaaataagaggcaaatagtcccttttgcccttgcttatttggccctcttgtatccaaacattcatacaaatggatcttttaacaaatcagaatcaatttgacaaatttaatacacagtagctggaggttgatgctgggtgccgccgccgaccaccctttgcacgccactgctccccgcgacagcgccgctgcggacaaaccgatgcctccacaagcgaattaaacggcccatcgaatgaactcgcgagggaattcttatactcttgcatgcccccttcacttgtagagaaacgtctaggcgcagcaaattaatcaagtgctctgataatcaatatctcatcaaggttatccaagtagtagccagatcaatatctcgataataatccggaacacgttcaccatggtcgtcggcgcacccaccgtggcgttcttcttgagagacctgagtaggtcgtcaacgaaacgctccatcctcctccacttctgccgcggtcggccgctgatgcgacacgggaattccgagatacctacacgcatcgcgtgatgccgcggccgctccgtcgcgcaatggcgtttgcgccgacctccctatccgtgcggcagccgccgcttccccatgcgctgccgacgctgctgctccctacctccacgcatcggcggtgctgctagccactccctcgacgcaccgccgccaccgcagatccatttctccatgtgccgcttgtaagagatgagagagacaaggtgggatggatagggttgaagtgccttgatggtattttggtcagtttaaatagtaaatagattttttttctttttctagaagaaaccctaatgatgtagtggaaagagggtcagacggagtgttcaatttaaaaaagtcaaataagcaaactaagaaaaacatagtcagattagaagttaggcttcaaaacagggtcaaataagcaattatcccattttttatcatcttcaatcttatactgtctcgtttaggtttgatttattagattgttgctaatatgtaattatattctactaagccgataagtttttatgcaacattttattagagttctagccaattagttatcttgttactacttctaagtgttgatcgtcttatactcaaacttgtataatcaatagttaaatatctctttatcaacttcaatatcataccgtctcgattaattaggtctgatctatcaagattatctttgattaggaatggtttattgacgattgatgaaaaccttatatacatcggctagcttggggctgcagga

SEQ ID NO: 16058 - DNA, 10107 bp, Oryza sativa
ccacgccctacacccgattgatacgacgagctatgtggatctctcaggccttcgtgtgcgacaaatttcacgtcaacatgttgccacgtggttccatctaaaccctagattgaatcggtttgagccgtcagatcttggttaactcttggttaactcttggtcaagatcaatctcggttgtccatctcagtgaacatgtggtcaatctctgtggacctactctacggtggactgattgctgatgacatcataatttatctttttcttctttaaaataattataaattatgtaataaatctatttaatccttttaaataggctttagttgaattaaatcttgtaaaattcattactaattcatatgaagtcgaaatgaggcagttcataattcatctaaaataaagctctaaatgtttgtttactttttatgtattgtttatttggtttttattagtcttttttctcgttttgcatgttagcttgtagtttccatcctttttatatattgtttaattgattattgtaaggcatgtcacacatgtcccaaacaatccctttgagcatgttgataaaatatttaaattcttcttttattttaaatgtgcatttaatttcgaatgtcattaggtggtgggaacctttcctttgaatagctagtttgtattgataatcctgttccttgatatcttgggatataatttgactagcttgagccatatatattggttcgactagatattagtgtaattgcttagccatgctaagaaacattagtatcattttacatgcaataactaatgattcactcatgattaatgatggttaattaatggtatgttgtgatgtttggtcatggttgattaataatatgctaactaaaacttgactaatggtaggttttgagcacatggatgtgatgatcatgctcatcacaattaaggaccggttttgtatagcatgattcatcatggagcaccacactaagaagtggtagagataggcccatgtgggtcactgcggagtctattccgggctatggaaagacgatgatccgggaacggtgaactactttgagttgagctatgcgaagagtcacaattttgcacgtggtgacatattaagcgtgggcacacgataacatggtgacatgttgtggaattgtcttgtgggtatattggtacacatctgactagagtaaaacttttcaaatagccatacatgcggttattggcaagcctagcaatgtttttttggtgattagtcacacactactcattaatcataaataaattggtcataacaatttgtttgcattttgtatggactttagatctgtgtagtcgggtttggttgtttagagatggttgggcctacgcagcataggtatgctattcagagttgattttaaattgattaattactctcaactatttactgaatgttgcttttgcaaatgaaccctactataccttcctttgtatccccatgcacctgcattttttctatgtggcttacggagtattctatttactcaccttgcaataatcatcaaatctcagttgaagaaagttttcgaaggagaagacatgtggcttatacctcagttgaactgtctgtgagagtggagctgaagctaatgttagattgtttgttacctgttgttttcttttcatttataagtaatatctaacgtaattataatattggatctgtatattcaattgtcaattttagtatctcagctaattagtagatgagtgtattatatgcacaacttagttcggaaattactagtgaatttccgaatgtgacaggtagcaagataaattaagaagagaagtcttcgataccgtacaggtccactagatgggtgagattctgtagctccgcaggtatttgaccaactacatccaaataagttaccctcctacataacaaacaagtaataattctgataagagaactatgttcaggatacatatatacagccggaggaccaaatgaatacctccgtttgggtccagcagatatgtacaatttttctttagggaagatctgtaccaaatttaggatagacttttctgattcctctatatgcagccttggagatactaattaatatcaataatctggtgtgtgtctatatatatatacacatatatatgtatgtatgtgtgtgtgtgtctatatatatatatatatatcttaatttgcatacttgcatatacgtgtatatgggctagcacacacgatgaaaccacgataaagataaagagagtgtgcgtacagtctcgtaatgtggcagagggtgttgttgttaatgtgcaatcgcacttgatgaacgggttgatgtcgcggtagttatcccaatcggttttatcagctgcgaaaccgctgcagagctcaccgctgatgttccactccggtgatgccttcttgccccatctccctagtatcgtgttcagagcagccgctgcatggttaatttattaactcaccattagtaatcatgcggatgaaagctacgcaatagtgaaatcagacttcatgaaactcacgggttgctgcgtaagttttatacagtaataatagaaataacatataatcagtaggcataacattatataatttcatctttatcgactgcagaaaaaaaactatatacaattaggatgttatttataataatttaaactagattggccatttaaaatcacaacaatagtgatgtggctaagtacatcatcttaaatataaaacaaaggtgatacggcttaataacaaaagaaaacgtgagagataatttgaacaatatacctatctcaactatcatagggataaagaaacaatttagatgatgtggcttaataagaaaagatataaatagcattaataaccactgtagaaatgaactttatataaatatataggatttctctaactctttggtttcaacgcggcaagagcggacacactatcaaagttattatcaaccacaaattagtactcctgcgatcaaagtacatggagggaaaccaaacaagagagacatgcatgcgtggaagcctgccaatggtttgaaatccaatccacaaccagcccaaaccaaagcagtaagctacacaagtccaaaccactctaattcatttgtcttctcttagaatccaaaccaatccaacccatatcatatttcaacccaaatcaacccaacccatttcatctatatggattcagttcacttttccagtccatttcaccccattccaaatcgacaccaaccacatgtcggcgacgaggtgggcgaggagcatcggcggcgagccgaggaagtcgcagcgcgactccgagcaggagcagggcgcgtgcgggcaggcgcgctggtggccggcgacgtcgtaataggcgacgtagctccagcagccgaacaggtcgttggggcacaggatcttggcggcgccgccgcacgcgtggcactgcttgccgggacgtcgccatggcagctgctgcacgccaagtgccccgccgcggactgcacgccaagaaattgccactagccgagccctcacgaatcgaatgaaagaacaacaacaagaagaagaatgtcagatggattggatgaacagctaggaaggaggcagatagggcaacggagcacggccaagtcgatccgcttttcttcttcttctccggctccggctgcagctccctcgccgcgcgccgcttccaccgccttttctcgcttcacttggccgttgggcgacaccacccacgccgccttcttggcgccgctctgctcgtcgtgctgcctgtacgccgcactgttcgcgctcaacttggccacgtggttcggcgacggcgtggacggcgagctcgtcggcgccatgcgcgccgtgcagcaggagttccctccgcttcctcccccgcgcccgcgtcttctccaccttccagaaggcggcgggcggcggcggcggaagctctccgacggcgaacctagtgcggcggccggacatccaaacgcggctgcgcggcgaggtcgaggcggccgagggcggtggtgatggagtgcctctgtgtctgagacgacatcatctgctatttggggatgaatccaattgaaatccatggactccatccattttagacccaaaaattatgactaaaaaccaatccaatccaacccaaccatccctcatccaagctgctccaatccattagttatctcaacccgtttacacccataccaagtgaatccaaattgaaaaccaatccattagacccattccaatccaacccattggcaggctacatatacgtacgcgtgcattcttaattaccttcgactggatcagtttttggtgcttgttgatcctgagcagctgcaacccgccatgagcacaaaattagcaccagccacgccagatggtggcgaatgacacctctgatgctgcaagaacgcatatctctccctctctctctctctatctaaacaacactgtgtgcatgccaaagagatgtatatctgtaggtatatatgtacgtgccactaaacattaaaaaattggtcaaatgtgtactcagcttcaacaacgaccctcgtgctttggttaatcttatccgtcatggttgataacgatatggattactctatccgtcccaaaaaactcaacttatagagtttaaatttatccaaaaaaaaaatcaacttctaccactttacctacctcctctagcatataaaatgagaagttttatctcttaaatatcatttacctacttatcaccattactacctttactactattgatgagggttatttttgtcatttttactcctcactaaatttgttttgggatgctaggaatctcactaaatttattttgggatgctaggaatcctcttttagcaagcaagtgttttggtcaaattaaagatgacattaacaagagcatgaggatgaccaactagtgtatgcccggtgagttcttaattaaagattagttatttttcatatatatctaaattcaagaaaacagcttgaaaaattctttttagtttttgcactttgcgtccttttattcagttttacttcgttaaagttttgtcccatatgagtacttgtttaatgctatcttaggttacgttcagcgacaatacacagagagaaaaattaccttctctttcaaaagcatacgcttaccgaaatactagacaatatttttttacaaaagaaattacaaaaagttgtatttttaatttttaagtttaaaataattaatattaattatcttattttgtgagtatgttttaatttttttttctttcgtcaactctcaatcataatgttaaaaaaaactctcaactagtatgttttaaagttttatggtgttagtcgtgtcaaaaacattgacttgtccacccgccgttgttttgactgcctgccgcgggaagggaaaaacttgccgtggaaatctgatgctgccacggcatcctttgcgtcaggacggcgttccccgttcttcaattttttgtcgatcagctctgttgaatcgtatgattcatatgctagctgtgtctataggatttggtgcttgcagaatgtattcttttcaccaaagtgcatatacacacacctagttgcatacatgcaatctagatagctatataaaatttttaaaattttcacaaaacgagtcctcctggtagatatgtgagcgtttgcacgattgtgttgtgtgtgcgttagacttgtactgacaaaaaaaaagaaatattaaattgataagatagatcatgaagatgtaaattactaaacaaatagatctaaacttagtctatactcactactgcagaaaaacccatagaggtgcacccttttttatttttataggtgctaaaaaaacatgaaaaaatatttggtatttttattacttccctataacgtcacacttcgcttcccacatatcacatgatttttgcaacccatattcatagacatgcttctaaagattcttaccatgctattgttttgtgattattgttatccaaatttataatgctcaactgaaaattttagcgactacaaaattgtagacgtcatctatacctacaacgttcatatatgttttgtctccatccgagatcatttagaaattttaaatattcacttatgtaaatagatctgaaacattataacacattttcggacatcagaaaaacattaaataaaaaattcatcacctacaaagttatatgtctcgtcaactacaaatttgatataaagtttatcttcatccaactttatatgaaaatgttagatagaaaatattgtgtcattattggtgccgattttagttgtaaaccaacatctatgagctcataagtactagtttttattaagaatcaacacatatatgatgcctataagtatagtttttattaagaaccaacacatatatgatgcctataagtaacggttcatgataaaaaccagtacatatgcttatagaggtgccattttattataagaatcatcgacacctatgtgttgtttataggtatgtaccagtttgttatagcctgatagaaaccgacacctatgatttgatagattattggtgctgacttttgttacaaaccaataccaataagtgattataagtaccggttcttaattttatactggaaaaaggtggagaaagcttcataggcgccagttttaggcaaaccgtcatatgtaagtccagtctttatgtgctgttttataatagtggctggataaatataaatagctagcaaactgtattgatgtgcacttattcatagttgtagcattttattattttagaatgttcaggcatatggctgtgttcgttgggtaggttgggaactcattccctccacacggaaaacggagcggtccactagcgtgtgattaattaagtattagctatttttttaaaataaatagatcaatatgattttttaaacaacattcatatagaagcttttttcaaaaaaaacacaccgtttagcagtttgaaaaatgtgcacgtggaacacaaggaagaggggttaggaaccctgaggaaataacacagcctatagaatacatgagaaagtccagagcaagtaaccagctaaactattaaaaacaattaactttactccctaatggcatttgtatgtttttttctccttaggcactaaaatttaggactatcatatatgtattacaacttatatcttaatattctcaatatttttttagatttttttatagttatttacataggttagaagcatttaagactgaatcaaatatcaagatctcaaagttaagcaaacacttctgaaaatattgaaaatattttcgaactttgataatggtgtatctatggctataaaaagtgcaacttaaaatatagagcttatataaagaagaaaaaaaaggtgaaatgtcacccgagtaccattttcaatatgctttatggagtcaaatgagtaaagaaaaggtttaggggttgatctaatgaaatagtttgagagattaaaaatttagtcttgaatgtttctatatataattaatctaaacttattattataccacaatcagtattactattttgcaaactttacgcaacttatttgttaggtgcacgcctgggtggagcacctatgctgtgatgtcacgcccataaattcacaagtaatttccaaactaatttgtgcattaaaaccctcgtccaggaatcagccgaggtacacaaactgacaatttaatatacaaattcatcaaaataactaaaacgataaatacttacataagaggcacttagtcctcaccatgaagaaaactgcagcggaaagtaaaatctagcgaagcttcagctccactcccacaggcagctcaactgggatctaagccaaaggtcttctcattctggatccttttcttcaactgaggtttgatgattattgcaagaatgagcatatgacatactcaacaagccacacagcaaatatgcaagtgcacaaggataccaaaggatggcataatatagggttcatttacgaaagcagcatttagcaaagagttgagaatttgtaaaacagtagagtaattaatcatcaatattaatcaacactgaatagcacacccatactgctcaggcccaaccaaacctgaacaaccaaccccggtcgtacagatcaaacctccaaaccaggaattatccattccaaaccataagtcaaattaattatcacattattatcattaatgagtagtgtgggactaatcacgaaaaacattgttagacccgcccataaccacgggcacggctattcgaatagttttactctggccagagatgtaccactgtacccacaagacacgattccacacatgctgccatgccccgaagtaccaccacggcactgctaagggggaaatcgtgacagtacccttcacacaacacaactcaccacagtgtactatttctggatcataatcaccccctcaataaccagaggcatggactccccagcgaccccccacggacttctcgccgcttcacagtctggcacaccataatgaatcatgctatacaaaagataaagtcgttgcccacgctggcttgtggttggcatgattaatgtctcacaacagtagctcgcgaaccggtccttaattgtcatgagcacgaccttcaaaaccatgtgctcacaacccaccattaatcatattttaattatcaattaattatcataacacgtttgaccatcgtgagctaccattaactataaccataaataataatgtagtatatatgattcatcccattaatgagctaatgtttctaagcatggctaagcaattatatatatatatagcatttagctgaaccaaaccaatatataaggttcaagctaatcaatttattatccataggaaattaaagtcatctttggccataatcaaatgggaaggctcgccacccaatgacattctaaagtaatgcataagttgaaataaaacaatagctttaaatgggttcaacatgctcaaaggattgtttgggatctgtgtgacttgccttgcaaacaagcgtcttcaattcgtcttcaggaatttctccaacgaacgaacgatcctccgaaacaacggaaaactaaacctagaacgcaaaacaaggaaagaaactaataaaaaccaaataaacagtacaattaaagttcataaataggtagagcttgaatttagatgaattatgagacttgaacgacctcattccgagttcgtatgaattagatatgaattttacaagatttaattccaattaaacctattaaagaaaagactattccaaattgattaaacaatttacaaatgacttatagctgagacaaaagattaaaacatcctccggaaatagattagatcatatttggtagatgacatatattaaaaaggaataatatgccattgaaaagaaagaacggatttatatcgattttggacggctgagattaatctcgaccgagtcgaccaagatcggatggcttggattgacacacggcagcggcacaacagcggttgcggtggcacacatacagcagcagcgcgacggcgacgtacagcggctaaacagcgacacggcggcaacaaggcagctagcgcagcggcgacgctagggcagcagctagtgacacagcaacggctacgctagggttagagcaacagcggcggtgacacgaccgagggattgaaacctaacccgaggggacacggatagaagtctcaccgaaccaaagcgaccggagagggagggtcgacgatgacgatccggcgacacacacggaaacgatgacgacgctagggccaaacaacagattagattagattagattagattaaatccctagggataaactacaccggtaaatgacatgggagagaggagagctcaccggagaagacgacggcgacgaccaagacgacgacggcgacgaccaagatgacgacggcgacgggtgacggctagcggcagcggcgagctagggcagcggcggctagggtattggagaaggcggctaaacaggaggag

SEQ ID NO: 16059 - DNA, 637 bp, Oryza sativa
cgagatgtcgactagaggggggtgaataggcgatttaaaactaaatgacaccaaatcaaaactaacctaagttgctaggcttggtgagggtcaactctaactaagcaactaagttatgttttgcaaatctagggtgatagaggctcaattatatctctacgaaagtaaatcacactcctatgtcaatgtttagcaatcctagggtgatatgatctcaagtttgtctctagaaaagtaaattgcacaaaggtaaatgcgacaatcaaatgagacaaggagacaagagatttttcatcgaggttcggaaactcgctggtttcctactccccgttgaggcgagcccaactccaccactcaaccacgaagcctccgcacgccctcttcgtcaaggggtgggcaaggcgggagccagcccacggagaggactacccaagcctcgatcactagggtagttctttcttctctccgaaggtggtgaactccaaaccactcacaaaccggcaccgggcctcctccacaattatcacgcccggaatttctatccaaaattccaaacgcttacatgtgtgggaaccctcgtccaggaatcagccgaggcacacaataacaaattgataatagagtacaaatattactc

SEQ ID NO: 16060 - DNA, 14227 bp, Oryza sativa
ccttaaacggaatctcgtcctcgagattcagaagaactggcgaagagatgaggatgagctgacttcaattcatcttctcgctcccaagtggcttcttcttctgaatgattgctccactgaaccttgcagaaccgtataacacgattcctggtattcctctcgcttacttccaagattctgactggcttctcaacataagttaaatcttcttgaagctctatacgatcaggatctgcttcctccgtaggtacacgtaaacatttcttcaactgagacacgtggaacacgtcatgtattcccgccattgacggaggcaattccaactgataagctacctcacctcttcgactcacaatcttaaaaggtcccacgaaacgcggtgccaatttctcttggtctggaaacgatgaacacctcgtaacggcgtaacccgaaggtatacataatctccttcttcgaaagccaaatctctgcgacgattgtcggcatagctcttctgacgtgactgagcaacgcgcaacctttcttggataatcttcactttttcttctgcctctcgcaatatgtccgtcccaaaaacttgacgttcaccggtttgatcccaaaggagcggcgtacggcactttcggccatataatgcttcatacggagccatttgcatactagcttgataactgttgttatatgagaattccgcgtacggcaaattcttatcccaacttccaccaaaatctagaacacaggctctcaacatatcttctaaaatttggtttactctttccgtctgaccatctgtttgcgggtgataagcggtactgaaattcaaacgggtacccatctctacttgtaatttctgccaaaacttcgaagtaaactagctacctctatctgacactatcttcttaggaacgccatgcaaacataccactctggccatgtataactctgcaagcttattccccgtgtaggttgttttgaccggtatgaagtgagcgacttttgtcaacctatcaaccactacccaaatagaatcatgtcctgccgacgttctgggtaggccggttataaaatccattcctatttcttcccacttccactctggaatcttcaacggttgtaacagaccggctggcttctgatgttctgccttgacccgctgacatacatcacatagagccacatattctgctatctcacgtcgcatactggcccaccagaattgttgctttaggtcttggtacatcttagtgcttccagggtgaatggaatacaaagtttcatgagcttctttcatgatggtatccttcaactccttattttctgggacgcaaattctttctcccaaccacacagtaccttgctcatcttctacataaccgatggcttttcctcttctcatgttcttctttatttcttggatatcaggatcattcacttgagcctcttaacttgatcaaacagagtaggtttagcttccaaagcggccacaaaaccattgctgactattcccaagttcaacttttcaaattcttggcataactcccaaggtaaacgtcgaccttctgacatattacagtagcttttcctgctaagagcatcggctacaacatttgctttccccgggtgatagtagatttccatatcataatctttaatcaactctaaccatcttcgctgacgcatgttcaaatcaggttgagtgaaaatgtacttcaaacttttatgatccgtatacacctctgtacggttaccgaaaagataatgacgccaaatcttcaatgcatgcaccacagctgccaactctaggtcatgcgttgggtagttattctcatgaggacgtaattgcctagatgcataggcaaccacctttccttcttgcatcaacacacaacccaaaccgagtcgagatgcatcacaatacacttggaaacctttcctcgaatcaggcaaaattaacaccagcgcagtcgctagccttttcttcagttcttggaaactttgttcacaatcctctgtccacttgtacttcacttccttctgaagcagacgagtcattggtctggcgatctttgaaaagttctcaataaacctgcggtaataccccgcaagtccaaggaaactacgaatttctgaaaccgtcttgggttgcttccaacttaacactgactccacattgcttggatctactgccactcctccagacgagatgacatgaccaagaaacttcacttcggacaaccaaaattcacatttactgaacttggcataaagctgatgttcacgtagtttctctaaagctagacgaagatgctcttcatgttcttccttcgtcttggagtaaataagaatgtcatcaataaacaccacgactaacttatccagatattccataaacaccttgttcatcagattcatgaaaaaggctggggcattagtgagtccaaatgacataacggtacattcgaacaaaccataccgagttgtgaaggcggtctttggtatatcttcctcacggattcgaagttgatgatatccagaacggagatctatcttggagaaaactgtagcaccttccaattgatcaaataggtcatcaattctgggtagaggatacttattcttgatagtaacctcattcaacgctcgataatccacgcacattctctgagtatgatctttcttctccacaaagatgactggtgctccccatggcgaagtactgggtctgatgtatcctttctgaagcaaatcttccacctgtctcttcacctcaactaactcattagctgccattctgtatggtctcttatggatagggttggttccaggtaccaagtctatccgaaactctatctctctcttaggtggcatgcctggcaaatcctcgggaaacacgtctgggtagtcttgtactatggggatctcttgtagagcaacttggtttaagatcacaccatgagatttaggagaggacataaagaaagaaactgtttccccattgctactggttaaagtcaccttacggttggcacaatctataactcctctgtgacaagataaccaatccatccctaagataacatctagatctttggattctagcaagataagcgaggatgggaaaggaacttcttctatttctatagtagcggaaggacaatactgtgtcgaaaatacttgattgcctggggtattaactagtaaaggtctctcgagactaataacttccatcccatgattgctcgtaaaacttttagacaaaaaggaatgtgtagcaccggaatcaaaaagcacagttgcgggtatagagttaacagggaacgtacccaaaaccacatctggtgcattctgagcttctgctgctgcaacatgattaacacgtgcctttggtgctggaacattggagttgttcggggctggagcgttcttcacgcgccgaggcttaggacacttatcagcataatgtcctggatcaccgcaattgaagcatatcactggcttgcttccctgttccttcctgacaggctggttctgagctgaagttgctgcaggacgagcaaccacgttgcggttgtcattgccacgattactagtattgttgttgtagaactggcgttggggacggacaactgatgaagatcctccttgagggtacgatggaacttgaggtccagtaacgagacgcggcctctggttactgccctgttgtgccttgaattgggcagccctgcgcttcttctgctccatccggttatacttgtcttcctgacgaatcgccttgtccaccaactgctggaaatcccggaaatccgtagacatcaaagcataagacaactcatcattcagtccctccaagaatttctcctgacgctcttcatcggtgcgaacatcttccggagcataacgagctaaacggttgaaatcatggaggtactcggtgaccgatcgagatccctggttgagtgccctaaattctctcttctttagagctacaacacccgacggtatgtgtgtcttcctgaaagcggccgtgaattcctgccacgtaataggctctccttcagccctgccttggcgaaaatgatcccaccattcagcagcaggaccatgcagttgatgcgaagcaaaagaaactttctcctgctcagtacactggatcaaatccaacttcttctccaccgcatgcagccaatctcctgcttctactggattggtggtgctggaaaaggtagggggtctcacgcgtaagaaatctgccagcttgttttggggaggtgggggtggattctggttctgattgtttgcctgctgattctgtgcctgctgcactaacagattgatcagttgtgtttgttgggccagaatctgagctagcgtgggatctcctccattgttagtagctccacttccacttccacttccacttccggtgcgcgtgttcaccatctgacgataagcagagactcatgctgttacatcccaccaatgatgtaagcaacaactaaaacccacacactcacaagcaaacttaaacaagcaatctaacacagcgatctacggcaacgatctaactaagcgactaaacccgccttgtgtcggaacgaagcgatggatcttcttcctctggagtagctggctctctttcttcagggtcttcctcctcttcctcatcacttatgatgtcgatgacaggttcagcacgatcgggcacagcttcacccatcacgcgaatcttcgaagctaactggagacgaggtggcggacaggttctttttctttgagtgaggcgatgcttgggtgttggcggcggcgtttctcctttaagttcagctaattccttttgtagacggtacaccttgctctccaacttgcaaatcttgcctcgattccagttttccctgtcatgagctgctttgtctcgctccacacttactgcatccatagcactaagcatatgcaccgcatgcatcagagtggcactctcttcaccgtcaggacaggtataggttccatagtcttgaccatgaggcttgtgaggatgatactggaaagctgatgaatccaactcttcttcaaagcgttgacgcaactctccaatggccaccaaagctgcctcttgacaagcatggctgtacgatcttcctccagcttcgaacttaaaagacggaaggtcatcactatcactagccaacgtcacacgaacacgacacttctcctcgtcggggtcatgggaaatttggcgatactcgggagcaacttcatagcctacctcaaaagccatcaacctcagctccctgacgaaccctaacaccttgatcaaatttctcggtgaatggggtggcatctaaagaaacatagaagggaagaattaatgcatatttttaagttagctgcaccaactagacttaactgatttagaccaaaaaggaagaaaataaaagaaaagacacatacaaagctactttatatatttttctttttgaatttaacttttgaacagagacaaatcagtttgaacaagtgaataaaataaaaccaaaatacttaagacctactataagcacggtacaatgtcaccattaaaagggatgagtagtactagtgccaacatgattaaatcgataccataatagatgtacagtgccgaccaatccataagatttagtaaagagaaaaagaaacattttgagaagaacaactttttgctttttaaaagaaaagaaattgaattaaatgaattttgtgcataaccttgcatgtgctgccaacttatttaatttgtaagagaatagagaagagcagttctatttttttttcaaaaatattttgaaggctacttaaggtttaccatttggcttatcctaaggtcaaggtggctctgataccaacttgtcacgcccggaatttctatccaaaattccaaacgcttacatgtgtgttaaaccctcgtccaggaatcaaccgaggcacacaatgacaatttgataatagagtacaaataaataactatttaatactcgcaaataacaaaagattacagaggtagatagttcctctcaaaaaataacattctacgcagcggaaaaaaaactataacaaactacggaacagctatggcgactccactccacaggcatcttaaccaagaacaagctcaatcctccagatcatcaccttcactgagatactcctcttctgatgaatgaatattgcaagaatgagcatatgacatactcaacaagtcacacagcaaatatgcaagtgcacaggataacgaaggatggcataatatagctcatttgcagaaacagcatttaataaatatttaagagaatgataaaaacagttgaataattaatcagtattaaataaacaccatacaacacacccatgttgcataggcccaaccacatttgaacaaccaaccccagttgaacaaattaaacctccaaaccaggaattatccattccaaaccaggagtcaaattaattaccacattataaccattaatgagtagtgtgagactaatcacgaaaaacattgctcaactcacccataaccgcgggtacggctattcgaatagtttaaactctgatcagaggtgtaccactgtacccacaagacacaaccccacatcatgtcaccatgtgcctcaataccaccacggtacctcggaaaggagttgtgataataccccttgcacaacataacccattacagcgcacctttcctggatcataatcacccccttataaacaaggcatggactccccagcgacccccgtggacttctcgccacttctcagtctggcgcactataatgaatcacgctatacaaaagataaagccgttgcccacgctggcttgtggctggcacgataaatgtttcacaacagtagctcgcgaaccggtccttaattgtcatgagcacaaccatcaaaaccatatgctcacaacccaccttaaccaggttttaattatcaattaattaacatcacacgatttaccatcgtgagctaccatttaatataatcatcattattaataataatataacatagtttataattaatccctttagttagctaatgtttctaagcatggctaagcaaacctatatatagcatttagctgaaccaaaccaatatataaggttcatgctagtcaaattataacccctaggaaaataaagtcatcttcggccaataattaactgggaaaggttcaccacccgatgacattcgaaaacaatgcatagttgaaataaaataatagctttaaacgggttcaacatgctcaaagggttgtttgggatctgtgtgacttgccttgagcttccgcaaacgcttcggaaccttcctcaacggaaacgctctcctccggaacgtcggaaactaaagcaattaaacaaaaatcaacaaaacagtacaaaaacaagcataaacagtacatgtggatatttttaacatgtagatcttgattttagaaaaatttagcaacttgaaccacctgaaacggatctacggttatttagttatgattttccaaagttttaatctattagaaaattggaaaaaaagaaaaaagaaggagatgatgacgtcagcatgacgtcaccccacggcagccggctagggtttgcgagctcgccggagatagagaccttggccggggatttggagggcatgtacacgtagaggacgacgaggcgaacccaacggtactcaccacaacgacaaacgacgaacgatgatggccggcgacgaagaggacggcggcggcggctcggcttgacggcgacggcggagctccggtggtcggcggcgaagggggacgggcggccgaggttcccctcaccacggcgcacctaacggcggcgacggcaagcggcggcgacggcggaggcggcgcggcggcgcggctggagaaggccgacggcggcggcgagctaaagcaacgcggcggcggcgctacggtgcacgggagaggacgagagaggggcaaacgaaagagggcgacgatgtggtcctatatatagcattggattgaagagatcgaactccaaacgagaggaatcgactcgggaaaaatccaaactcggttttagggataaactcgaaaacgagtttgattcgaacaagatactcaacggattgctccgtttcttgaggggaaagatagaggagaacgagaggaacaaaacccctcaaaaacccggaagaatcggggtcggattggagcggaatcggaggcggaaaagggcggctcgggctcggcttcggccggctggaggtaggagatggatccgacatgtgggccccacatgtcggtctcccgagaggagggcacgggcggctcggctgggccggcttgggccgcgcgggagagagagagtgttgggccgaattcggcccaacggcttaaaggaggggatttttgaactttttaaaataaaaacaatttgtgaaatgttgtttcaattattaaaaatacttcccttgctcaaataattcccagaaaaatctagaaaatagaggagcaagcatagtatttaataaaattttatctagctcatttttatgttgaaaattttcctagaaaattagggtttagtttgtaggcttttaaaaataatttctaaaaattccaattaaacatcagtttatatatttaggatttttagggcgtgacatcacgcccggaatttctatccaaaattccaaacgcttacatgtgtgttaaaccctcgtccaggaatcaaccgaggcacacaataacaaattgataatagagtacaaatgaacaactatagaatattcgcaaataataaaatattacagaggtagatagttcctctcaaagaatatccttctacgcagcgaaaaaaaataaatctataacaaactacggaacagctatggcgactccactccacaggcaacttaaccagaacaagcctaatcctccagatcatcaccttcactgagatactcctcttctgatgattgaatattgcaagaatgagcatatgacatactcaacaagtcacacagcaaatatgcaagtgcacaggataacaaaggatgacataatatagctcatttgcagaaacagcattaaataaatatttaagagaatagtaaaacagttgtataattaatcaatattaaataacaccatacaacacacccgtgttgcataggcccaacctcatatgaacaaccaaccccggttgtacaaatctaacctccataccaggaacgtaccattccaaccaggagtcaaattgattatcacaattaccattaatgaataacatgggactaatcacgaaaaacattgctcaactcacccattaccgcgggtacggctattcgaatagattaaactctgatcagaggtgtaccactgtacccacaagacacaatcccacaacatgttaccatgcgccttagtaccaccacgatacctcggaaaggaactgtgacaataccccttgcataacacaactcaccacagtgcaccgtacctggatcataatcaccccctctacaaccagaggcatggactccccagcgacccccacggacttctcgccgcttctcagtctggcaccccataatgaatcatgctatacaaaaggtaaagccgttgcccacgctggcttgtggttggcacggtaaaagtttcacaacagtagctcgcgaaccggtccttaattgtcatgagcacaaccatcaataccatatgctcacaacccaccttaaccaggttttaattatcaattaattaacctcacacgatcaaccatcgtgagctaccattaatgtaaccataattaaaataataatgtaacatagtttataattaatccctttagttagctattgtttctaagcacggctaagcaaacttacatatagcatttagctgaaccaatccaacatataaggttcatgctaatcaaattataacccataggaaaataagatcatcttcggccgttaattaattgggaaggttcaccacccgatgacattcgaaaacaatgcatagttaaaataaaataatagctttaaacgggttcaacatgctcaaagagttgtttgggatctgtgtgacttgccttgggcttccgcaaacgcttcggagccttccttaacggaaacgctctcctccggaacgtcggaaactaaagcaattaaacaaaaatcaacaaaacagtacaaaaacaagcataaacagtacatgtggatatttttaacatgtagaccttgattttagaaaaatttagcaacttgaaccacctgaaacggatctacggttatttagttatgattttccgaagatttaatctattaaaagaaattggaaaaaaggagatgatgacgtcagcatgatgtcatcaatggcggccggctcgagttggtgacctcgccggagctagagtggtcggccgggattttggagggcatccacacgtagagaacgacgagacgaacgcaacggtactcaccaatgcgtccaacgacgaccgatggtggccggcgacgagaggaggcggcgcggcggctcggtcgacggcggcgacgggtctccggcgaccggcgacagcggggagagggcggccgaggttcctcacctccgtgcgcacctaacggcggcgagaggaagcggcggcgacggcgaaatcgaaggcgcggcgcggctggagatcaccggtggcgacggcgagacaaggcggcgtcggcggtgagctacggggcacgggagaggacgggaaaaggggcaaacgaaagaggggaactagggggtcctatttatagccttggattgaagagatcggactccaaacgagaggaatcgaaaccggaaaatcttcgggttagtttggagagataaaatcaaaacgagtttgattcggacaagatactcaacgatttgctccgatttttgcgggtaaagatagaggaggatacggggattaaaacccctctaatatccggactcggggtggccggattggggcggatttgagggcgcaaggtggcggctcgggctcgtcatgcacggctcggccggctgctagaggaaggggaaggatccgacatgtggggcccacatgtcggtctcccgagaggagggggcggcggcgacgggttggaccggttttgggccggctcggccgcgggagaggggaaggatgttgggccaaaaacggcccaatggctttagggaggggtttcagaactttttaattaaatataatttgtgaaatgttgtttcatttattaaaaatacttcccttgctcaaataattcccagaaaattctagaaaatagaggaacaagcaaagtatttaataaaattttatctagctcaattttacgttgaaaattttcctagacaattagggtttagcttgtaggcttttaattttaatttctaaaaatgatttaaacaatgtatttttaatttaggcgatttttagggcgtgacacaatccaagctgccatgatgtggtcgcagccaatctttgacccatccatagcggcccagcaagtaccaccagttggagccgggcaatcgaatgccgtggcccaactccacgcacaagccgcgatttcgcccttcgccacaccgtacccgcagcaaggtgcggtaaacagggcgggaggcgaaaaggggctgccgctgagtgggggaatcaagactcgtccaatcccaccccagttgaagttcccacctgtcccgcgttattcgggcgaaactgacccgaaggagttcctctccatctacgagtcaacgatcgaagcgactcatggtgatgaaaataccaaggcgaaggtaatacatctcgctctagacggtatcgcccgttcttggtatttcaatttaccagccaatagcatttactcatgggagcaattgcgcgatgtttttgtccttaactttcgaggcacctatgaggagccgaagacgcaacaacaccttcttggcattcgccaaaggccgggggagtcgataagggagtacatgcgtcgcttctcgcaagcctggtgccaagttcaagacataaccgaggcgtcggttataaacgccacttcggccggtctgcttgagggcgaactaacaagaaaaatcgccaacaaggagccgcagacgctcgagcaccacttcgcatcattgacgggttcgcaaggggcgaggaggattctaagcgacgacaagctatacaagttgagtacgataaagcctccgtcgccgctgctcaagctcaagcacaagttcaaattgccgaaccacctcccctctctgttcgccagtctcagccggcgatccagggacagccgccaaggcaaagccaagcccccatgacttggagaaagttcagaacagatcgggcgggcaaggctgtgatggctgtcgaagaagtgcaagccctccgcaaggagttcgacgcccagcaagcaagcaaccatcagcagccagcccgcagaaggtccgaaaagacctctactgcgcctttcacggacgctcttcgcacaccacggaacaatgccgaaacattaggcaacgtggcaacgcgcaagacccaaggccgcagcaaggaacaactgtcgaaacaccccgtgaagcagttcaggagcaaatacccccagccgaacaacgccaatatacacaacaaaggataatccaagtgattacaagagctgacccgccaagccagttgtcgaaacggcagaggaagatgcagatccgtacggtccacatcatcacttcggcaggtgagggggcgccacagtacgtgaaccagctgatccctttcgggccagaagacgccgaaggagtcctgttcccgcatcaagatccactagtaatctcagctgagatagccggttttgaagtccgacgaatcctggtcgatggagggagttcggctgacgtgatcttcgccgaagcatatgctaagatgggcttgccaacccaagctcttgcaccggcaccaacgtcgctccgggggttcggcggagaggcagtgcaagttcttggccaagcacttttgctgatagctttcggctcgggagaaaacaggcgcgaagagcaaataccgttcgacgtcgtcgacatcccatacaactacaacgctatcttcggccgtgcaaccctgaacaagttcgaagccatttcccaccacaattatctcaagctcaagatgcctggcccaacaggagtgatagtagtcaaggggcttcagccttcggccgcttcaaaacgcgatctagccataatcaacagagcagtgcacaatgttgaggccgaaccgcatgagcggcccaagcacacgccgaagcccacccctcacggcaagataacaatagtgcagattgatgatgccgacccacaaagctcgtatcactggggggcgacatgggcgaagaagaagttgagagcatcctagaggtactcaaaaagaacatcgatatcttcgcctggagccctgatgaggtggggggcgtcccggcggatctcatcatgcatcacttagcagtcaagccgaatattaagccaagaaagcaaaagttgcgcaagatgtctgtcgatcgccaagaagcggcgaagaccgaagtacaaaaattactccgagcgggggttattcaagagattgaccatccggagtggttggctaatccagtgctggtgcggaagtcaaatggcaaatggcgcatgtgtgtcgatttcacagacctgaacaaggcatgtccgaaagacgatttccccttgccgcgaatcgaccagctcgtggatgcgagctcatgagtttcctggatgcatattccagttaccaccagatccacatgaacccgctcgacatccccaaaacatccttcatcactccattcggcacattttgtcaccttaggatgcctttcggcttaaggaacgcaggagcaaccttcgccaggctggtgtacaaggtccttggcaagcagttggggcgaaacgtggaagcttacgtcgacgacatcgtcgtaaaaagccgcaaggctttcgaccatgtgttcgacctgcaagagacgttcgacagcttgcgcgcggcaggcataaagctgaatccggagaagtgcgtattcggcgtccgcgcaggcaagttgttgggtttccttgtttccgaaaggggcatcgaggcgaatcccgagaaaatcgatgccatccagcaaatga

SEQ ID NO: 16061 - DNA, 745 bp, Oryza sativa
gaacagccaggcgagcacccctcgtcgaactcattcagttcggtgaacatgcttggggcactggcgggcagtacaagattgcttaccccctccacaaaaggaaggaggtccgctcgcgtctcgaagtcgccaggggcgaagcggggtaccgagagcgaatattccaaagcggacgtctcagcgaccgctctctttcccttcgcctccatcagcggcgatgcaaccggctgatgcggaggattgccgaatactttcgccgcggccgtcacaatcctttacgcagaagccgaagccccagcggcggtactaccatccactccagcggcgccaattggcggaatgggggcggccgaaagatccaggctgcgaccagtgggcgaagtcggagtcccgtcggaggactcgttgtcgctaaaaacgcgagcgacatcgacgagtcctttcgttttagccacctttttgataggacctcccttcgccgccgcgcccgaagagaacgcaactagggccttcgccccttccaaatccttccgacgaaggggggagctgttcgactccaccccggtttcgttgttaccaggacttggggtaggagtgtaccctggggtgtcggcgcggtttcgaccgcctcacccgcggccttatcagccacagcctccacctcctcctttccttccttcctcctcgccatcacattcttcggcatcatcctcgtcgtcggcgtcggagtcagacgaagcaggaa

SEQ ID NO: 16062 - DNA, 2170 bp, Oryza sativa
tagtttgttatagatttattttttttcgctgcgtagaaggatattctttgagaggaactatctacctctgtaatattttattatttgcgaatattctatagttgttcatttgtactctattatcaatttgttatgtgtgcctcggttgttcctggacgagggtttaacacacatgtaagcgtttggaattttggatagaaattccgggcgtgacagattggtacttggtttgttccgaagcctggggttggcacttgctgccgaacggttggcacctgagcagtgttgccgaagtcgaactgctgtcattgactccacggcgaaggtcccgagcctggctgaattggtggcaacccattgggcgctccttgacttgtattccctaccgggtgagccgatggggttgtgcttgaaatgtagtggggttggttgagttgctaaaggaaagcttggagttgcgcctgcagagccgaagcccattccaccactggttgtggcgcttggccaggtggttgatgctgcccggcgaagtacaccggcggctgtgcggctagtggcggagagggctaggtcaccacttgcggccggacttgaggtggggcatagcctgccgaatactgaaggattggagccgacgtggccttggtcggccttgtcgcctcgtatgcttgttgttgttcttgcatttggcgaagcatgtcttggagccgtgtcatattctgccgcatggcttccatgtcggcttcggcttgcgcttcggggtccaggctgatttgggcctatacaacggcgagcgcagttggtgccgccggctgtgatggggcggcttgaggcaccaccagttggtttgtcgaaaggatctctgccctggtctggagtgcccttgccgccgcagccgccttcgccacgtcggccttgttcggcacttgcactgaggttgcggaggccgaagacggttgtgatggcgcgggggccgaaggcggctgtgatggcgcttgtccttctccatcttcggccacagacgccgaaggctctgctccttcctcggcggccatgtccggtccggcgtcgctctccttccgcctgacaaccttctccttcacgaccctcttcgtggcattcgctctcagtggtttcgctcggagtccccacggtcggcgccagctgttgtcgaaacaacaactgtatacgtcgaaggacgtggttactcaacagtggttgggaaaatgaagtgtactaaatttttaatttcacttgggatcccccgttacatagccctagggggctatttatagccctattgcaggctctttctactaggatctaggttgtacaggggaatttatataattacccttatgaaagggacatttacaggggtacataatgttatagggtctcatgggcccctaatgggccgtctagcgatcgccggcccttaggcttgatgggctggaaaggcttccttggcccttgcgggggcgaacttgctatggcgaagtcgtcttccttcggcagatagtcttcgccttgcacccttcgcccgagacgccccttgcagctgctcatctcttttaaagcgatgtgacaacacattttttcagccatttattcccccctctgatgagttcactgcaaccatacgcaacaaatgagagcacatttttacaaatgagtaaaaagttacaaatgatgttcgtaagtatataaaaatttttaaagttggacataattattaagaaagtaggtaggattaaatgtggagaggatatgattggtgaaaaaagtaaatggtaaagggttgtgattggttgggaaaataatgtaggtggagaaattattatattttaaaataaattcctaagagtttaatgttgctatattttggaaatgatatttttagtgtcatgcctagtcacacaataaggaccacaatttggcttttcgaacatttttttttaaaaattgttttcttaaatcctccactctcaaaatccataatcttattgggtatatacattgtatttattacgatgatctaaactagaatgtgataataattttatttttctctttaagcagttattgtgtcttatgttttagaatggcgagagtaaattataaattaaaagtacataccaccaaaatgtaaagaattttactcatgtaa

SEQ ID NO: 16063 - DNA, 15788 bp, Oryza sativa
ttggttacggattccacattactgggatcgacggcaactcctcctgctgagatgacgtgaccaaggaacttcacttcagacaaccaaaattcacacttgctaaacttagcatacagttgatgttctcgtagcttctccaatgcaaggcgaagatgttcttcatgctcttctttggttcgggagtagataagaatgtcatcaataaagaccaccacaaacttgtctaggtattccataaacaccttattcatcaagttcatgaagaaagcaggggcattggtaagtccaaaagacataacagtacattcgaacaacccatacctagtggtaaaagctgtcttaggtatatcttcctctttgattctcaactggtgatatcctgatcgaagatctatcttggagaatacagtagcacctttaagctgatcaaacaaatcatcaattctgggcagcggatacttattcttgatagtcacatcgtttaatgcacgatagtccacacacatccgctgagtatggtctttcttttccacaaaaataaccggagcaccccatggagatgaactcggtctgatgtaccctttctgaagcaaatcgtctacttgccttttgacttctgccaactcattggctgccattctataaggtctcttatggatcggagttgttcctggtaccaaatctattctgaactctatatcccttttgggcggcataccaggtaaatcatctgggaacacatcgggatactcccggactataggaatctcttccaaagttatctggttcagtcttgaccttaaagactcagatgacaatgcatgaacagttacaactcgaccatcattgctgatgagagttacttttctgttagcacagtctatcacacctttatgtctggctaaccagtccatccctaggatgacatcaaggtctttggattctaacaagataagattggccagaaatggtactccttgaatttctattctgacagaggggctacgttgcaaagagagtgcttgattgcttggggtactaaccatcaaaggacgtctaagatcttctacttccatcccatgatttcccgcaaaactcatagataagaatgaatgtgtagcaccagaatcgaaaagcactgttgcaggaactgagttaacagaaaacgtacccaaaatcacatctggagcatcttgggcttctgcagcagcaacatgattgacacgggcctttgatgctggtgcggtagagttgctctgggcagggacaaccttcacgcgtcggggcttcggacacttgtcagcataatgtcctgggtctccacagttgaaacacaccacgggcttgctgcctggctccctcttggcaggttgttgctgtgttggagctgcaacaggacgtggagcttgattgcggatgttgttgccagcattgttgttgaaaaactgacgttgcggacgaacaacagacgaagaacctccctgtggcatagactggggtcctaaagtaagacgcggcttctgattactcccctgttgtgctttgaagtgagcaatccggcgtttcttctgctccatgcggttgtacttgtcttcctgacgaatagccttatccattaatttctggaaatcagaataatctccagtcatgagtgggtaagaaagctcatcattaagtccttccaagaacttctcctggcgctcttcatcattgcgcacatcttccggagcataacgagcaagacgattgaactcgtgcagatactccgtaacagagcgagatccctgggtgagcgacctgaactccttcttcttgagagacaccactcccgatggtatatgcgtcttccggaaagcagcggtgaattcaagccaagtaataggttcagcagtagtcctattcaggcggaagtgatcccaccattcagaggcagggccatgcaactgatgtgatgcaaatgagaccttctcctgatcagtgcactgaagcaaatccaacttcttctctatggcatgcagccaatcaccagcttcaacaggattagtggtactagagaaaacaggcggcctcacacgaagaaattctgctaacttattctgaggaggtgcatggttatttccttggttctgctgattctggagttgctgcatcatcatgttcatgagttgtgtctgttgagcaagaacttgggcaagagtgggattctctccattattgttgttattggggttgttagggccattcccattgctgcgagtgttcaccatctggcatggacagggcacaagaagagaaaccgggggaaactacttaggatagagaattactttaacttttattgatcttaactgagttttattacaaactgaagactctcacaccactaaactcaccaacttcctcacactcaaaagcaaacaaacgcatgcacttacatcccaccactgatgtaaatcacatgcgagacacacacaagcaaacttaaaacaagcaaactaacacaacgatctaagaccacgacttaacaagtcactctagttcttctgagcatcggaggtcgattgaaggctcgttcggctcgtcttcatcatcttgagttgctacccactcaatcttggaatgggtgcgcttggattcttcatcttcatcactacttatgataatgaccggaggatctgctggggcaacttctttctccaccacacgaacctttggcgccaattgatagcgagggacaaatagagctctcttccttgcggtaagacgaatcctggccttctgcggcggagcttctcccttcaatgcggctaattccttctccaaacgatccaccttgtcttcgagcttgcaaatcttaccacgattccggtcttcacgatcttgagctgctaacacagtctccgcacgactttcatccatagcccacaacatctcaaccaaatgccttgtggtagcatcattctcaattccttcagtctcaaggtaactgccacggtcacttccctgtggttgacgaggatgatagcgatactcagtgtcggccaactgatcactgtagcgatcacggagctctcctatggcgatccttgccacttcctgacatgcatggatgtagtttcttcctccagcttcgaacattactgaggggacctcttcactattgctgttcaaagtaactttgactcggcacttctcttcatgacgatcatgaggaatctgggcataaaaaggggcagtcccaaatccaatgacaaaggacatcgtacgcaactcctggacaaaaccctcaacaccaaacaagtactcaggcttgtagcgcggcatctaaagacaagtgaaaggagggagttaagacatctatccaattaacagcacaagtttttggattaatttgaataaagtttagaaatcaaaataaaccaaacctgcaggataagttgaaacagttggaaacaaggttacaagctttgtgcttttgagtaacaggttttaaaagaaataaaagaaagttataaaatcaacttgctaaatctattttattgcagcaagattaaataaaacaacattgtaaaacttttgctggtaaatgagccattggtacagtaataaatgtacggtactaataacactggaataaattttgaatgagaaccattaaaagagattatgaagtgcatgtgccattagtttggtttaattaaaagagaaagggaggagaacagttctacttttccaatatttttagaaggcttctatgggtaaccatttggcataacctagggtcaagggggctctgataccaacttgtcacgcccggaatttctatccaaaattccaaacgcttacatgtgtgtgaaccctcgtccaggaatcagccgaggcacacaataacaaattgataatagagtacaattattactctaattaataagcgtataaagtgtcattacagaggtagatagttcctctcaaacaataaatatctaagcagcggaaaaagaaataaacggcgcagacggctccactccacataccgaggtgcgagcttcccttttgtctgaaacctgtgcacacctcgcaatggcgtgacccgaaggtatacaaaatcacccactgcgaattccaggtcacggcgacggttatctgcataacttttctgccgagactgtgccacctttagattatcccgaatgattctgactttagcttcagcttctctcaggatatcagtcccgaacacttggctttctccaacttggtcccacaagagcggtgtccggcatttgcgcccgtacaacgcttcataaggtgccatttgtatgctggcttgataactgttattgtaggagaattcggcataggggagactcttatcccaggtcttcccgaaatctagtacacatgcgcggagcatatcttctaggatctgatttagatgctcggtctgtccatctgtctgcgggtgatacgcggtgctgaaatttaatcgggttcccaactcttcttggagtttcttccaaaaatgagaggtgaattggcttcccctatcagatacaattttcttgggaacgccatggagactcacgatcctagcgaagtagagctcggctagtttgttccctccataggtggtcttcacaggaataaatcgagctaccttggttaatcgatccacaactacccatatagaatcatatccaccttgggtttttggaagtccggtgatgaaatccatcccaatttcatcccatttccattctggtacttggagaggttggagaagtccggccggtcgttggtgctctgccttgacacgctggcacacatcacaaagggccacgaactctgcaatttcccgcttcatactaacccaccagtatttctccttcaagtctaagtacatctttgtactgcccgggtgaatggaataagggctctcgtgagcttcctgaagtatcagctgtttgagttctcggttatctggaacgcatacccgctttccgttccatagggttccgtgttcatcctctgtgaaaccagcggctttaccctgtttcatattcttgaggagtccatgcatgtccggatcattcttctgagccttgcggatttgatcgagcaaggtaggcttggcttctagcgcagccaagaatccgcgaccaactatgcttaggttcagggcttccatctgttgattaagttcgggtggaatgccacggacgttaagagtgttgcaatggccctttcgacttagagcgtcggcaaccacgttggccttaccaggatgatagtgaattcccacatcatagtccttgatgagttctaaccatctcctttgccgaagattcagatccgactgggtgaagatgtatttcaaactcttatgatcggtatatatttcacagcgattcccaatgagatagtgccgccagatttttagagcatgaaccaccgcggctaactccaaatcatgtgtagggtagttgccttcatgaggtcgcagctgacgtgaggcataggctaccacatgaccgtcctgcatgagcacgcaccccaatccttggcgcgaagcgtcacaatacaccaggaagtccttgcgagtatccggcaagattaacaccggcgaggaaaccagcttttccttgagagtttggaacgccttctcgcattgcgggctccacacaaatttctcttctttcttcaacaactgtgtcatgggtcgagcgattttggagaagttctcgatgaatctccggtagtatcctgccaaacctaagaaactgcggacttgagtaactgtcttgggttgcttccaatcggtgacggtggtcactgtttcggggtccacagaaactcctttagcagatatcacgtgtcctaagaatttgacttcggacagccagaactcacacttgctaagtttggcatacaattgatgttcccgcagctttcccaacaccagacggagatggtgctgatggtcttcctctgattgtgagtataccagaatgtcatcaatgaaaaccacaacaaacttatccaagtattccatgaacactttgttcattaagttcatgaagaaggcaggtgcattggttaggccgaatgacatcaccgtgaattcatacagcccgtatcgcgtggtgaatgcggtcttcggaatatcttcttcacgaatacgtaattggtgatatccggaacgaagatcaatcttggagaatacagtggcacctttaagctgatcgaacagatcatcgatccggggaagagggtacttgtttttgatggtgacttcattgagagctctgtagtcaacgcacatcctcttagtcttgtctttcttctccacaaaaatcacaggagcaccccagggggaagtactcggacgtatataccccttttctttcaactcttccaactgtttctttacttcggccagttcatttgctgccatacggtagggtcgcttgtgcagaggagtggttcctggagcaagatctatccggaactcaatctctcgcttgggcggcataccgggtagttcttccggaaacacatctccgaactccctgacgatggggatttctgacagtcctatctgatgcagttctgaactactgacagaggttgggggtgcaaagaaaacaaccggttgttccggccctcggtacagagtgacagtgcgcctcgcgcaatccactactccttggaattgagccaaccaattcatcccaaggatcacatccaagttcttggtgtctagcagaatcagatccgagggaaaaggaatcccctgaatttctatagggacggcagggctataatactttgctgtcataacccctccaggggtggtgatgagcagagggttcctaagcctttctacccccaactgatttctccccacgaatggcacagatataaaccagtgggaagctccagagtcgaacaaaatggtagcagggatggaatgaacgaggaacgtaccaacgatgacgtctggagttgtcagcacgtcctcggccgtcacgtgattcacacgaccccgaatgacatccttcccaccgttgttggagtggggaggcgcttggccttgctgacgccttggcttcgggcatttatccgcaaagtgcccgggctcgaagcagttgaagcacagacgctgctgaccttgagcgtccctgcggccttgaccagactgcacggttggcgtaggaggacggggcgcacgagtcccttgctgattctgctgctgctgcggctgtgggacgcgcaccacgaattgaggtcgcggcgcggagcgaggttgctgctgctgttgttgctgttgcgaggaggatccccctggataggggttggtgtagcggaccctttggttagcaccctgttgattgcggaaattcgccaagcggcgcttgtgcgactccagttccttgtgctttgtcgcgtcccaaaacgactctaaaatacatcctcgaaattgtgccgagaataattaaaattcatgtgaaagcctccaacaattaaaatgtgcaaatataaaagtcaaataaggcttggaggatttttgtatatttcctaaaagcctaaaatgcgtaaataaattttagtggaattttcagagcacaaataataattgagaagaaataaacaaagttaaaaaggttttataaaaagaaaaaccctaaaagaagtccttttcccccccttcctctcttgggccggcccggcccaactccctccctctctctcctctcccccgcggcccatcggcctcctccccgcgcgcgcgccgctgacgggcgggcccgcccgccaccctcgctgacgggtggggcccacctgtcatcgcctacctcgcgccgcgcccgccgccgcccgtgccctagcgccgccgccgccgccgaatccgccgcatcccgccgtccccgcgcgccataaagagggggaaatcactccccgtgattccctccctctttccccccactttcccctctctctctccctcggattcgctcggatttaatcccgcaaagttcgccggcgcatcaatggagcccgagatcgccgcgccggtttccttcctccccggccgccctctctcgctcccgtccctatataattgttccccgtgcctcactcctccgtttccgccactcgccgctcgctctttccgtcggattcgtgctcgcgccgttgtactctctctccgccgtcgccgccgagctccggttcgccgccgtcgtcgctccggacctcctcccgtctcggcgtcacctccttcggcttcgccgcatccccgtcaacctcgtccaccccttcgtttcgcccgccgaccgtcggagcgccgccgtcctcgtcgatccgaaccgcgccgccgtcttcctccgctccgatcgtcgtctccgccgccctcgtcgtcccggggtgagccgaggaccgccgttcgctttcccccttccctcctctctctcgggtgccgctccgccgcgtcggtggtcgccggcggtgaccatcggggcgcgggcgcgccgcctcccgtcggccgtgccggcgaggccgccttcgggcgcgccccgcggctgccaggtggggcccggccgtcagccgcccgcgcccgcgggtgcggctgacgcgtgggacccacggcgccggccggcgtctgccgcgtgcgcccggtccaccgtggaccgagaggctgacgcgtgggccccactcccgtggacccggtccgcgcgcccctcccctcggctgacgcaataaatccgatttttaattaaaatttaaatgaagaaattcgcaaatatccatttaaagagcatataaacttcaaatggccataacttggccatttgaactcggaattggaccgttcaagtctctaatttttccttaagaagtcaagaacccatttttgtgctttgtttctgctgttatgtggagtttattagagtaaaagccttttcttttccgttggtcgtgtagacgctgcagcttcggaagatccgctcttcgtggaagttgaagccggtgtttgggaaagcgagcaaggcaagtcacatcatccttgagcatattgaatcccagtttataaaattattttgatttaaattaatgcattaccgctttatttcaattcccgcgttatcactgttttatttagccatgcctatttacctttgttaagacattattattgctattgttattattaccttgttcaccctagaataaacaaaaccccaactagtgggtactctattcctggttccactagtatgaatttaggtagatgcttcgctgattaattaggcaatattaggtggttttataactttagactttgggaattctcatatcatttggacactatggaattgttggtttatggtggaattggacatacacctctcttcctctttcaaaacccctaaaacctgttttcggtggggtctgggtgcatgccagttgtgggaagtagcaccccggccactataaggattaagctcgggcctctgttgcaaagcactaccgtacttccacatgtctagtgggtaaggcttagtttgtggctcagtctggtcataaacaaaagtacacggatggagatggatgaagtcgggggtcgatggacattctctaggacaaatgaaggctacacgagctgcggcccggtagtcgagatgtcatggcacagggttggtgccctgctgctaggggctcagtcctgcctgcctgtcccgggggttccggccgtaggtgggattgggtcggtactcttgtctatggctaggatgggttggaaactatgtcacagcttccgtctgtataccgtggtggtatgtggcacgtggttgcacgtgaggaagatgtgtcttgtgggtaaagatgtacacctctgatcagagtataatctattcgaatagccgcgccctcggttatgggcaagccgagcaatgtacccaagtcagtgttttaattcttaaaatttgcttacaactaaaatgtggaatggttggcctgggttggcttgggacgagctgggacccagggtcgggttgccagttcggtctgaatcatcgtaggccttgggttaaggcaggttcgtgagggttcacggccttgtttaataatactgtgtagctctaggatcgtctttataaaatggctttgggcaactaagtgacttttaaatgctgcttttctgcaaaacttaacccctatattatttaccccttgtacccccttgcattaatcgtgcatctaccggtgtgacttgctgagtactgtggttgtactcattcttgctctatctttctccccccttcagtaagagaagcttcagagaagatgtcttaggtggagtcctggcttataccccagttgagcgcctgtgaagatggagccgtaggcccgctagtccgctgctgtttatttttgtttgtcaggcctgaagcgcctttgtaataatgtaaatattatcgatataataaagatgtgtcttttatatcatgtttgtatggtgtaccccggcttttcctgggacggggattaatacactggcgttcgggaaaaggcaattttcccggtcgcgacaagatggtatcagagccatctcgactgtaggataagccaagtggataaaacctaaggacatattttataaataaaactatttgcgaaagttcctttttttctcctttcccctatgctatttgcaaaagggtttactcccttcttccttcttcggatttcaactagtactagatggtcaggtcagtgaagaagaagacatcgtcagttgtttgccgaagctccggaagactgcaggatccgctagcgaagtggaggaagcagtgaagccagctgtaaagcaggagtgaagatcttggagaacccgtcgcagaacctaagccaccctctagtgtttcgtttgtcgtgtgtttccttgcttgtgtgtgtagcgcgtggtttgcatcagtggattgtgatgtaaccatgctaggttgtttgcttaatcaacttgcagaataagtgaaacaaagaacacatcaacaagaagagttagttcctttaaggtcctatctctagttctggtctattctttcctggcttgtttcctctctcacctcaatccctgtaacagatgtttaacagagaaaaaggaaagaatgtcagcgggtatgactcaagtaactcaagttttcaactcaatctgccactggcctcaagagagttaaccagggcacacccttggtccattccaagcatgctgcttagttcacagctaccattggttggaagtcaagaccaaaatcagtatgtgtttgatcgagcctttgccacccaggtcaatgagcttccaatgccagaagagcaggttcccttttgtcatgattgtagagagcaaggacactatgccctgaattgtccatgggtatatgtcaaagaagccccttcccttggtttagcagggcggacatcgctaaaccagcctcctcacaccaagtcaagcttgcagcctagtgtgcaaagtagagagctcaacggagagaatccattgaatcccgggaaatgctttcctcctagcctctcgtaccacgtggggtcacatactaagcaagccaaaggcaagaagagtaagaatcagaagagaaaagcaccgatgcgaactgaagaagaagtacgtaagatgactattaccagcaccgaatggcctccagcagggataactattcctagacgtcaaagaggaaataccttccgaggtgcacgacagttgacccagcacctcctaagccgtggtggcagagtatctgatagtgaagggtcagatcaagtctcctcggatgaagaagatgagtctccccgacatctcggcgaggaagagatggaatccaaagcatgcccccgttgtggagaaattggacacgttgctagcatgtgtctcacactctgccctcattgtgaggaagaccatccaccaggtgaatgtcccacccgcaaggtcacatgttttctgtgcgaaggtacaaaccatgtgcccaaggattgccaactcagtgtgttgttgaccaagaccgcagaaatccaacgaacaaccctacgattgtctcatcagctagtcagctccaacagcaacatcgacgatatcatccacagcaccaatgctcctcccgctgcacctgactctgcaataaatcatagcgataataccttcagcaccaaccattctctgcaccgacagcctcaacaaagaattgtcatcgatggaagaagttgtgtctctccccgacctactccaggccgagccaagggcaatcaacctccggagggcgataccaagcagaagaccgttattcgcctcaaccagcaaccagaaggaaacttctcctgtgaatgatagcaatatgcagtcctatcacatcatcacagaaccaatcaaggatgcagtcactagaacaatgccagctatgtatccatgtttgtgattttcagttcgctacttatcactgtaatcgggagtttgcagcaatcatgtaataaataaacatattcatgattataaacaatgagtttgttatgtttatggatgattcatgttgaggatacaatgtaccgatgataagcaccttccctttttgtttaaggcagtgccttgtattcgtgtaataagggagaaatgtgtaatacagacaagttctgagaggattcttttggaagatgcggatatgtgatcatgtgtataattgtttactgacaaaggagacctagggtctcgtgtcagaggaactatattctaacctcgagttaataaccaacctgtggatggaaaagaaaaccaattaaactgtgttgggttaaaaagccaatgagacagtagttggggataggagtttggatacgcctcttacagatcaagataaggattgttggatgaaacccataagggtacccgccatgcctctacattgataagttcggatattcctgcaaacagttaagaagatccaggagacatcaatatttgagaacataatagtcgatggttggtaattagtctatcaggtatcagaaaagggtcaaaggtgatatggcagaagaacaatatggatgctccccatctcgaggaagcactaaagatgatcatcggcaattaaaccctagtggcatagatacagatagcaagcaatgtatttccctgaaggtggtcagtgcagcttcttgacaaaccacatcaaggtttcactgaaaggcagcaagccaaaggacctcatcgtccccagaagcgtccgcaatccacattaaagaataccacatgttaaagataagccgaaagatgattgataaaagagattggcaaagatgttctccagcatgaaagaagtaggccggaaggtgattgataaacagaaacatgctctgcatcgctcaaggaagacccctgatagtaattgccccgcaacagtcaccttgtcattaagtaagcaagatgacctaggtaaaagtgtttctatgaaggcaaggagtgaaatcttcaactcggtatcagatgctacacggagtgaaaagtgcaagcaccggttaccaggtaatgccatgtcttgggagatgatccaatgggaaggaacacatcaaggttaaaaggtgtaaaggaatacgttgaatgctaaccgaggacaacctgaagataatagtggaaagtaaactgaacataaagaaagtgaatccgagttgcttgttcgtgagagctattcccagttatgaatcaagtgatatgttcaaagataatctacagaggtcagattaaaatcacatctaacaacgaagcctcagatttggcaggataatgattagacagtaacaaatccagcaataaagccatttgggaagacgtcaaagtatgtcaagtgggataagttggttctcttgggaagcataattcaaaggcaaagttagcgacccttgcatcaaatagcagaagtacctagcaccggagaccaggaaagctaatatgagacagttcatgttgtcaatcatggtatccttagtaagcgggatatcatagtctaaagcatatggtggtaagctggaaggaaacgccaagcatggtattctcatgatgacaagcatggtatcctagtaatgacaagcaggttacgagacatgacatgaagttgataacttgtgaggttgacgccgaagatatgaatcgtgagaagttctggatctgaagccccatcttcaagtgccgcaacctagtctgagtcagctaaaaggtgcaccctggttcaagtcaggtgaagagaagattccatccgcagcaggaggtcaagccaagcagttccgagtggtgaagttttgctgaaagtttgtgaggacggagcggaagaagtcaaacaagaagagaagaccgcccaacctatcttcttgctagcctcctcgaatctcggggacgagattcttgtaaggggggtggatttgtcacgtcctgataaattcatcccgaaataaaaatcattttctaaaaggaataatagaattaattaaaattcgaaaagaaattggcaaacactaaaatgcgtataagaaaaattcaaatgtggcccggagaatttttgttaaattctccttggtctaaaaggcgccctcaaattttagtggaattttcagagcacaaataataattgagaagaaataaacaaagttagaatggttttataaaaagaaaaatcctaaaaaaagtcttctttccccccccttcccttactgggccagctcggcccagctccctccctctctctcctcctccccgcggcccactcggcctctccccgcgcgtgcgccgctgacgggcgggcccgcccgccaccctcgctgacgggtggggcccacctgtcatccctatcctcgcgccgcgcccgccgcccgcccgtgccctagcgccgccgccgccgcggattccgccgcatcccgccgtccccgcgcgccataaagagggggaaatcactccccgtgattccctccctcttttccccctctttcccctctctctctccctcggattcgtccggattcactcccgcaaagttcgccggcgcatcaatggcggccgagatttccgcggccgattccttcccctccggccgctctctccctctcccggcgctatataatcgtcccccgtgcttcgctcttccgtttccgccactcgccgcctctcctccccgtcggaatcgagcccgcgccgtcgcaccttctctccgccgtcgccgccgaactccggttcaccgccgtcgtcgccccggacctcctcccgcttccgcatcgcccccttcggcttcgccgcgtcctcgccgaccccgtccgctcctccgtttcgcccgccgaccgccggaacgccgccgtcctcgtcgacccgagccgcgccgccgccttcctccgctccggtcgtcgtttccgccgtcctcgtcgtcccggggtgagccgtggaccgctcctttcgcttcccccttccctcctctctctcgggtgccgctccgccgcgtcggtggtcgccggcggtgaccatcggggcgcgggcgcgccgcctcccgtcggccgtgccggcgaggccgccttcgggcgcgccccgcggctgccaggtggggcccggccgtcagccgcccgcgcccgcgggtgcggctgacgcgtgggacccacggcgccggccggcgtctgccgcgtgcgcccggtccaccgtggaccgagaggctgacgcgtgggccccactcccatggacccggtcc

SEQ ID NO: 16064 - DNA, 11609 bp, Oryza sativa
catataatttgcatatgtgttgtgctatgttgaaatgtgatattgtaatgtgcattggctccatatttgctatttgtgatttttatgcatatgttagggggagcctttgcttttcaatgcaataaatgtccatgtgctctatgtttgattatatatctatttgtggagtttgtcatcaattaccaaaaagggggagattgaagcatctaggcccccggtgttaattttggtaattaatgacaagcgctaattgtggactaaccgttgtctttgaaataatattttaagttaggtccacgtcatgtgtgcacatggatgacgatcgatggattaaaattgacggcgcaaggcaaagagaaagaagacggtaaaactagtgctttaatttagaattgatcggggtgtagggcgatcaaatttgctagtttatttctagtttcgccgtactattaagaggggtaatgacctagcaaagagatgattttaattgccacattaggtcattgcattatcacttgtgctcactttttcatcacacacacacacacattcactgggttcggcctgaccagggcaggtctgaccggccacaagttggcggtctgaccggcccataatgtcggtctgaccggcggcacatgcccggtcagaccggccccctggaggccgaaatggtgctcctcgggactgccgatacagagccgacggagccgtagtcggtcagaccgagccgatggcggtctgaccgagccgactccggtctgaccgcccaatcaactccggtctgaccggccgggccgatggggccctctgacagcgctacaactgctagttttctagccgttgcagagtagcacagtatgaccggccacatacctccggtcagaccggcagagcacaaagttgggggatttcgcccccaacggctagttttggtgggtgggagtataaatactctcccaccagcagcaaggggactctcttggcacccaattcaattgcatacaccccttgcacctctctcacactcacttgagctttgtgttcatccatctagtgttatagggttgattagccaagagtcaagtgcatttgcttccattgtagagctagtgtggcacttgatcatctccacgccgggtcattgcttgttactcttggaggatgccgcctcctagacggcttgtggagaagttgcccggtgacctctccgagaagattgttgtcacaccctgaaaattcaaaatatataaattgttgtttaaatgaaatttttagaatttattttaaaagcctagaagagaagatctaattttaattaataaattccaatataaaatggggccagataaaatttcattaaatactttgcttaattctataattcctagatttttctgggatttatttgagctaaggaagtatttttaataaatggaattgcatttaaaaaataatttaaattgaaaaaggttttgaaaagtcttcttttggctttgggccgaaagtcagcccaaaacccttctctctctcctcggcccaagtcggcccagtccgcagccgcagccgcccgcgcgcgcgtcctcgctcgctgacaggtggggcccgcctgtcggagtcgtcgtcttcctccggccgaaaccctagcgccgcgccgccgccgccgctttccaaatcggccgatcctttccttctccggccgaatcaaaagaggggaaatgatcttcgggatttcctctaccttttctcctttggaaacaccggctaaaatcgtttggaaattcgtggattcgagtttgtttcggattcgattttcccgaactttccttctcgtcgccggccgtcgtgggccttcgccgctgcctccgagcccctttaaaaggacccccgagctcttctctacccgccgccaccctcgccttcgcctctcgtcgccggtagcgccctagcgtcgtgagacctcgagccgccatcgccgccgtcgctccagccgtgcgccgccgccgttccggtcgtcgtcatcgctcgggaaggccaccgtcgggatcgccaagtcgtcgccgtcctcgtccgccccttcgccaccgtcggagaccgccggagcatcgtcgccgtcgtcgacccgatctccgccgtcgcttcttcctcgtcgccgtcgccgtccgttggtcttccgccgtcgcttgggtcgccggtgagttcgccgtgccgtccgctacccgttggtgtccaccgttcttgccgaagtgccgccgttcactggcaagcgtgcgccgtccgagccgtccgagccgccgagccgccgccgccggtggtgacgtcatcgccgacgtcatcgtcgccctcttccgtgagccggtcgtggaccgatcgatctcggtcgtccgttttggtcatcgtcgccctcttccgtgagccggtcgtggaccgatcgatctcggtcgtccgttttggatcaagtcgatctcggccgtccgttcgcgtgaactgccgccgtgcgcccggtccaccgaaaccctagcccgctgacgcaataaatcccttttccttttcaaaaataattcattattgcgtcataattcaattaaaatcaatataagtgttttaatccgatttaatcttcaaaaattcataactaattcatcttagctccgatttagttggttcaagtctctaaatttttctaaaattgagatctacacaataaaaatatccacatgtactgttcatgcttgtttatgtgctgttttggtgattttgctcttttctgcttagattccgtcgtttccggagagtccgttttcgcaggagaagagtttgaagagttccaaggccagcaaggcaagtcacacagatcccaaacaaccctttgagcatgttgatcccgtttaaagctattgtttctattcaactattgcatttattttcgaatgtcattgggtggaattaacctattgtttgctatagcccttttgttcttgattactttattccttgataccttgggttattataatttgactagttgagctttatttatattggttcaactagatattagatataattgcttagccatgcttagaaacattagcacacttttgggataacttatgattcactattatttaatgatagctcacgatggtcaatcgtgattggttaattaattaatgtgccaactaaaacttggtaatggtgggttgtgagcacatggttttgatggtcgtgctcatgacaattaaggaccggttcacgagtttcggttgtgaaacattaaccgtgccaaccacaagccagcgtgggcaacggctttatcttttgtataacatggttcattgcagggcaccagactgagaagtggcggagataagcccacgggggtcgctggggagtccatgccttgtttataagggggtgattatgatccaggaaggtgcgctgcagtggattgtgttatgcaaggggtattgtcacaactcctttccgaggtaccgtggtggtattgaggcacatggtgacatgatgtggggttgtgtcttatgggtacagtggtacacctctgatcagagtaaaactattcgaatagccgtgcccgcggttataggcgggtctaacaatgtctttcgtgattagtctcacccttctcaccatagtaaatgatgctataactggtaataatttgattagctcctggtttggaatggtatattcctggtttggagatagaactgtgcagccgggatggttattcagaatgggtgggcctatacaacagggtatgttgtatagcgttggattaatattgtttaattattacttaactgttttattaaattctcaaatgtttgctaaatgctgcttttgcaaaagaaaccctattatgccatcctttgttatcctgtgcacttgcatatttgctgcgtggcttgctgagtatgtcatatactcaccttgcaatcattcatcagaggaagagttctacaatgatgctgatggtgtggaggattaggtgtagccttggtcaagctgcttgtggagtggagccgtccgcgccgtttatcttattttccgctgcttagatctttattgattgagaggaactatctacctctgtaatgacattttattcgcttattagttagagtaatatttgtactctattatcaatttgttattgtgtgcctcggctgattcctagacgagggttcccacacatgtaagcgtttggaattttggatagaaattccgggcgtgacaagttggtatcagagcctccttgaccttaggttatgccaaatggttacccatagaagccctctaaaaatattggaaaagtagaactgttctcctccctttctcttttaaaccaaactaatggcacatgcacttcataatctcttttaatggttctcattcaaaatttatttcagtgttattagtactgtacatctattactgtactaatgactcatttaccagcaaaagttttacaatattgttttatttaatcctgctgcaataaaataaatttagcatgtcgattttataactttcttttatttctgttaaaacctgatgatcaaaagtacaaaaatttgtaacctcgttttcaactatttcaacttatcttgcaagcttggtttactttatttacttacctttttactttgattttccaactttattcacattaatccaaaaacttgtgctattaattggataaatgtcttaactccctcctttcacttgtctttagatgccgcgctacaagcctgagtacttgtttggtgtggagggttttgtccaggagttgcgtacaatgtcctttgtcattggatttgggactgcccctttttatgcccagattcctcatgatcgtcatgaagagaagtgccgagtcaaagtcaccttgaacagtaatagtgaagatattccctcagtgatgttcgaagctggaggaagaaactacatccatgcgtgtcaggaggtggcaaggatcgccataggagagcttcgcgatcgctacagtgatcagttggccgatacggagtatcgctaccatcctcgtcaaccacagggaagtgaccgtggcaattaccttgagactgaaggaattgagaatgatgctaccacaaggcatttggttgagatgctgtgggctatggatgaaagtcgtgcggagactgtattagcggctcaagatcgtgaagaccggaatcgtggtaagatttgcaagctagaagacaaggtggatcgtttggagaaggaattagccgcattgaagggagaagcaccgccgcagaaggccaggattcgtctcactgcaatgaagagagctctatttgtccctcgctatcaattggcgccaaaggttcgtgtggtggagaatgaagttgccccaaccctagcagatcctccggtcatcatcataagtgatgatgaagaagaagaatccaagcacacccattccaagattgagtgggtagtaactcaagatgatgaagacgagccgaatgagccttcaatcgacctccgatgctcggaagaactagagtgacttgttaagtcgttgtcttagatcgttgtgttagtttgcttgctttaagtttgcttgtgtgtgtctcgcatgtgatttacatcagtggtgggatgtaagtgcatgcgtttgtttgcttttgagtgttaggaagttggtgagtttagtggtgtgagagtcttcagtttgtaataatgaaactcagttaagatcaataaaagttaaagtaattccctgtcctaagtagttttgcccggtttctcttcttgtgccctgtccatgccagatggtgaacactcgcagcaatgggaatggccccaacaacaacaacaataacaacaacaacagtggagagaatcccacacttgcccaagtcctggctcaacagacacagcttatgaacatgatgatgcagcaactccagaaccagcaaaaccaaggaaataaccatgcacctccccagaacaagttagcagaatttctgcgtgtgaggccgcccactttttctagcaccactaatcctgttgaagctggtaactggctgcacgccatagaaaagaagttggatttgcttcagtgcactgattaggagaaggtctcatttgcatcacatcagttgcatggccctgcctctgaatggtgggatcactttcgcctgaacaggattactgctgaacctatcacttggcttgaattcaccgctgctttccggaagacgcatataccatcgggagtggtgtctctcaagaagaaggagttcaggtcgctcactcagggatctcgctctgttacggagtatttgcacgagttcaatcgtttggctcgttatgctcctgaagatgtgcgcaatgatgaagagcgtcaggagaagttcttggaaggacttaatgatgagctttcttacccactcatgactggagattatcctgatttccagaagttagtggataaggctattcgtcaggaggacaaatacaaccgcatggagcagaagaagcgccggattgctcaattcaagacacaacaggggaataatcagaggccgcgtcttactttaggaccccagtccgtgccacagggaggttcttcgtctattgttcgtccgcagcgtcagttcttcaacaacaatgctggcaacaacatccgtaatcaagttccacgtcctgttgcagctccaacacagcaacaacctgccaagagggagcaaggcagcaaacccgtggtgtgtttcaactgtggagacccaggacattacgctgacaagtgtccgaagccccgacgcgtgaaggttgtccctactcagagcaactctaccgcaccagcatcaaaggcccgtgtcaatcatgtcgctgctgcagaagctcaagatgctccagatgtgattttgggtacgttccttgttaacttagttcctgccacagtgcttttcgattctggtgctacacattcattcttatctatgagttttgcgggaaatcatgggatggaagtagaagatcttagacatcctttgatggttagtaccccaagtaatcaagcactctctttgcaacgtagcccctctgtcagaatagaaattaaaggagtaccatttctggccaatcttatcttgttagaatccaaagaccttgatgtcatcctagggatggactggttagccagacataaaggtgtgatagactgtgctaacagaaaagtaactctcaccagcaatgatggtcgagttgtaactgttcatgcattgtcttctgagtctttaaggtcaagactgaaccaaataactttggaagagattcctatagtccaggagtatcccgatgtgttcccagatgatttacctggtatgccgcctaaaagggatatagagttcagaatagatttggtaccaggaacaactccgatccataagagaccttatagaatggcagccaatgagttggcagaagttaagaggcaagtagacgatttgcttcagaaaggatacatcagaccgagttcatcaccatggggagctccggttatttttgtggaaaagaaagaccatacccagaggatgtgtgtggactatcgtgcactaaatgatgtgactatcaagaataagtatccactacccagaattgatgatttgtttgatcagcttaaaggtgctactgttttctccaagatagatcttcgatcagggtatcaccagttgagaatcaaagaggaagatatacctaagacagcttttaccactaggtatgggttgttcgaatgtactgttatgtcttttggacttaccaatgcccctgctttcttcatgaacttgatgaataaggtgtgtatggaatacctagacaagttcgtggtggtctttattgatgatattcttatctactctcgaaccaaagaagagcataaagaacatcttcgccttgcactagagaagctacgagaacatcaactgtatgctaagtttagcaagtgtgaattttggttgtctgaagtgaagttccttggtcacgtcatctcagcaggaggagttgccgtcgatcctagtaatgtggaatccgtaaccaactggaaacaaccaaagacagtttcagaaattcgcagttttctaggcctcgcaggatattaccggaggtttatagagaatttttccaagattgctaagcccatgacacgactgctacagaaagatgtgaagtacaagtggtcagaagaatgtgagcagagttttcaagagttgaagaatcgcttgatatcagctcctattttgattttacccgatccaaagaagggtttccaagtctattgcgatgcatctaaacttgggttaggttgtgttctgatgcaggatgggaaggtggttgcctatgcatctcgtcagttacgtccgcatgagaagaactaccctactcatgatcttgagttagctgcagtagttcatgcgttgaaaatttggcgtcattatcttttcggtactcgtacagaggtatataccgatcacaagagtttaaagtatatctttactcagccggatctgaacatgagacaacggagatggttggaattaattaaggattatgacatgggaattcattatcaccaggaaaggcaaatgttgtagccgacgctcttagcaggaaaggctattgcaatgctaccgaaggacgacagttgccattggagttatgccaggaatttgaaagattaaatttgggaattgtcagtagaggtttcgttgcagctttagaagcgaagcccactctaattgatcaagttagagaagcccaaattaatgatcctgatattcaagagatcaagaagaatatgagaagaggaaaagctatcggtttcttggaggatgagcaaggaactgtttggttgggcgagagaatctgtgtccctgacaacaaagatttgaaagatgtaattctgaaagaagctcatgatactttatactccattcaccctggaagtactaagatgtaccaggatctcaaagaaagattttggtgggcaagtatgaagcgtgaaatcgcagaatacgtagcagtatgtgatgtttgtcagcgtgtcaaggcagaacatcagaaacctgccggtttgctgcagcctttgaagattcctgaatggaaatgggaagaaatcggtatggattttatcactggtttacccagaacgtcatcaggccatgactctatttgggtaatagtcgatagacttaccaaagtggctcattttattccggtaaagacaacttattccggaagtcggttggcagaattgtatatggcaaggattgtgtgttcgcatggcgtccctaagaaaatagtgtctgatcgaggcagtcagtttacctcaaatttctggaagaaacttcaggaagagatgggttctaagctgaactttagcactgcttatcatccgcagacagacggacaaaccgaaagggtgaatcagattttggaagacatgttgagagcttgtgctttagatttcggtggaagttgggataagaatctaccttatgcagaattttcgtacaacaacagttatcaagctagtatacagatggctccttacgaagcactgtatggtcgtaagtgccgcactccgcttttgtgggatcaaacgggagaacgtcaggttttcgggacggatattctaagagaagcagaagaaaaggtgaaaatcattcaagaaagattgcgagtggctcagtctcgtcataagagttatgccgacaatcgccgtagagatttgagttttgaagaaggagattatgtgtatcttcgtgtcacgccttttcgaggagttcatcgttttcataccaaaggaaaattagcaccgcgttttgtgggaccttataagattgtcagtagaagaggagaggttgcttatcagttagagttacctcaatccttggcaggagtccataatgtgttccatgtgtcgcaattgaagaagtgtttaagggtacctaccgaagaagctaatcttgaatagatagaagtccaagaggatctgacctatgtggagaaaccaatccgtatcttggaaacaaataagagaagaaccaggaatcgagttatccgtttttgcaaagtccaatggagtaatcactcggaagaagaatcaacttgggaatgagaagatgaattgaagtcagctcatccgcatctgttcgccagttcttccgaatctcgaggacgagattctgtttaaggggggtaggtttgtcacatcctgaaaattcaaaatttataaattgttgtttaattggaatttctagaatatattttaaaagcctagaaaggaagatctagttttaattaataaattccaatataaaatggggccagataaaattttattaaatactttgcttaattctataattcctagatttttctgggatttatttgagctaagaaagtatttttaataaatggaattgcatttaagaaataatttaaatggaaaaaggttttaaaaagtcttcttttggctttgggccgaaagtcggcccaaaacctcctctctctctcctcggcccagccggcccagtccgcagccgcagccgctcgcgcgcgcgccctcgctgtcgctgacaggtgggtcccgcctgtcggagtcgtcgtcttcctcgggccgaaaccctagtttcgcgccgccgccgccgctttccaatccggccgctcctttccttctccggccgaattgatagaggggaaatgatcctcgggatctcctctaccttttctcctttggaatctttggccaaatcgtcttggaaagagttggattcgagttcgtctcggattcgttctacccgagctttccttcgccgttgccgtcgccgtgggcctttgccgccgcctccgagcccatttaaaaggacccccggtgcctcctctacccgtcgccaccctcgccttcgcctctcgtcgccggaagagctctagcaccgtgtgccctagtgccgccgtcgccgccgtcgctccagccgtgcgccgccgccgttccggtcatcgtcgtcgctcgggaagaccgccgtcgtggtcgccaagtcgtcgtcgtcctcgtccgccacttcgccaccgtcggagaccgccggagcatcgtcgccgtcgtcgacccgatctccgccgccgtttcaacctcgtcaccgtcgccgtccgttcttcctccgccgccgttttggtcaccggtgagttcgccgcgtcgtcctctacgtgctggtgccctccgtttgtgccgtagtgccgccgttcgccggcgagcgtgcgccgtccgagccgtctgctccgccgagccgccgccgctgtcggtgacgtcatcgctaacgtcatcggggtcgtccgccgtgagccggtcgtggaccgtcgatctcggccgtccgttttggattggatcgatctcggccgtccgttcgcgtgaaccgccgcccgtgcgcccggtccaccgaaaccctagccgctgacgcaataaaccttcttttccttttcaaaaataattcattattgcgtcataattcaattttccccgatttaagtgttttaatccgattctcatctttaaa

SEQ ID NO: 16065 - DNA, 1566 bp, Oryza sativa
tgcaatgctacagaaggacgacagttgccattggaattatgcaaggaatttgaaagattaaatttgggaattgtcagtagaggtttcgttgcagccttagaagcgaagcccactctaattgatcaagttagagaagcccaaattaatgatcctgatattcaagagatcaagaagaatatgagaagaggaaaagctatcggtttcttggaggatgagcacggaactgtaaggttgggtgagagaatctgcgtccccgacaacaaagatttaaaagatgcaattctgaaagaagctcacgatactttatactctattcaccctggtagtactaagatgtaccaggatctcaaggaaagattttggtgggcaagtatgaaacgtgaaatagcagaatatgtagcagtatgtgatgtttgtcagcgagtcaaggcagaacatcagaaacctgccagtttgctgcagcctttaaagattcctgaatggaagtgggaagaaatcggtatggattttatcactggtttacccagaacgtcatcgggtcatgactctatttgggtgatagtcgacagacttaccaaagtagctcatttcattccggtaaagacaacctattctggaagtcggttggcggaattgtacatggcaaggatcgtgtgtttgcatggcgtccctaagaaaatagtgtctgatcgaggcagtcagtttacttcaaatttttggaagaaacttcaggaagagatgggttctaagctgaactttagtactgcttatcatccgcagacagacggacaaaccgaaagggtgaatcaaattttggaagacatgttgagagcttgtgctttagacttcggtggaagttgggataagagtctaccttatgcagaattttcgtacaacaacagttatcaagctagtcttcagatggctccttacgaagcactgtatggtcggaagtgccgcactccacttttgtgggatcaaacgggagaacgtcaggttttcgggacggatatcctaagagaagcagaagaaaaggtgaaaatcattcaagaaagattgcgagtggctcagtctcgtcataagagttatgccgacaatcgccgcagagatttgagttttgaagaaggagattatgtgtatcttcgtgtcacgcctcttcgaggagttcgtcgttttcatatcaaaggaaaattggcaccgcgttttgtgggaccttataagattgtcagtagaagaggagaggttgcttatcagtggagttacctcaatctttggcaggagtccataatgtgttccatgtgtcgcaattaaaaaagtgtttaagggtacctaccgaagaagctaatcttgaacagatagaagtccaagaggatctgacctatgttgagaaatgtcacgtcctgataaattcatcccgaaataaaaatcattttctaaaaggaataatagaattaattaaaattcgaaaagaaattggcaaacactaaaatgcgtataagaaaaattcaaatgtggcccggagaatttttgttaaattctccttggtctaaaaggagccctcaaatt

SEQ ID NO: 16066 - DNA, 902 bp, Oryza sativa
cctctcgtcaccggtagcgccctagcgtcgtgagacctcgagccgccgtcgccgccgtcgctccagccctgcgccgccgccgttccggtcatcgtcatcgctcaggaaggccaccgtcgggatcgccaagtcgtcgccgtcctcgtccgccccttcgccaccgtcggagaccgccggagcatcgtcgccgttgtcgacccgatctccgccgtcgcttcttcctcgtcgccgtcgccgtccgttggtcttccgccgtcgcttgggtcgccggtgagttcgccgtgccgtccgctacccgttggtgtcctccgttcttgccgaagtgccgccgttcgctggcaagcgtgcgccgtccgagccgtccgagccgccgagccgccgccgccggtggtgacgtcatcgccgacgtcatcgtcgccctcttccatgagccggtcgtggaccgatcgatctcggccgtccgttttggatcaagtcgatctcggccgtccgttcgcgtgaaccgccgccgtgcgcccggtccaccgaaaccctagcccgctgacgcaataaatcccttttccttttcaaaaataattcattattgcgtcataattcaattaaaatcaatataagtgttttaatccgatttaatcttcaaaaattcataactaattcatcttagctccgatttagttggttcaagtctctaaatttttctaaaattgagatctacacaataaaaatatccacatgtactgttcatgcttgtttatgtgctgttttggtgattttgctcttttctgcttagattccgtcgtttccggagagtccgttttcgcaggagaagagtttgaagagttccaaggccagcaaggcaagtcacacagatcccaaacaaccctttgagcatgttgatcccg

SEQ ID NO: 16067 - DNA, 6652 bp, Oryza sativa
  unsure (1)..(6652): unsure at all n locations
cctcttatatgcaggaatggtaaagaatcagaagctatctgcaaatatacttacaccaacaactaaagctgcagatcatgatgttcctgtcactcctgaagaggtctttactctccttcacttttatgtcaacataatcttaacagtctaactccataatgattcccctcaaaatagacactagcttatatagggaaggggataaacagatgctcttggtagtctaacattggaattacattggtgtattggagaaaggtggaaaattaacgatggcactagttgaagcctgtcattctggagtcacaaaagttaccgtactgtctttagtcagttattgaagtttctcctttgcttataagtctaattatcacagttggcagtaatctagaagtccttgaatgattcatggatctcattttcctttttatgagctattttagttgcactttgtgcctccttggtgtttattcttcagcatgtaaatgctaccgtatttattcatcgcctccaaagaggtcatgacattgcattctgcagattatcaattcaggactaatgtcaaaggaagattttgatgaagcaagaagcaaagccttaagcttatttgcatatgggcaggtgattaattctcatatcttctggttcttgtaaggtgtcagttgcatgcctaataatcttctatagcaatgtcactggcaatgttaacattggacctggaacatctcaaatttagccttgatatgcctttttatttaaatctctgcaggaagtggccttagagaatggactgattctagttgacacaaagtatgagtttggaaaaacagctgatgggacaatcatgttgattgatgaggttacatcttcttacatgattttatccttgtgatatgttctgccttcaaattttatgcctgtcggtctcaggaaacagaaagagcatggctgatccaaccttagataactatgcctgactagcaacttgtgctagctgtgctcactgtttctctctataaacgtaacatgctcgtcatgacatcactttagtgtgttattgtgttggaactacccttacataagtacatgttttgttttcatatttggtaagtgatttttgcacaaaaaccaagccaagggatttttgtgctggggcttgttctaagggtttgagttaccatttcgccaaccggttcccattcccagaaatatagtttctaggatttttttatttttttaaaaaaatgttgcatgtcttaatctctttgataatttctaatatatttaatgatgatttctaacagaattccaaatttcctctttttgacaagcaggtacacactcctgactccagcagatattggattgctgattcttacgaagagagattcagttctggtcttgagcctgaaaatgttgacaaggtagactgctcctgaaactatacatgtggcagcgttatgccttaaacttattatgcttttaatttacaatggaattgctgaagatgtgattttattttcaccaggagttcttaagactctggttcaagaacaattgcaatccatacgaagatgcggtataccatttttccttaaaccacttaagcattttccatagtaagcaaatgttgataattagtgaaatatgagatgtccatgaataggtccacgtataaattccatgtccattgactgcatgtttgtttgtcttttgaaggctctttgtttttgtgaaaactcatttcatgtttatctgttactttaaaatactcaggttctgcctgaagctccagaagaactagtttgtgaactagcttggcggtatgtctatttctctgagtttgttctagtacttctcatttcagagcatgttcaaccaacaactttatgtgcttctctatgtacatgaatctcgtacaaacatgatatcatattggttgaattatagtttgcttaaatatccaccacaggtacattttcctgtttgagacaattacaaacacaaagttcgagatccccaaaactcaggtatgtgacgacagtttggtgaatttgctgtaactgacaaccatatacttaaaacatttttgttaaatgcaggagccgattcacgaaagaatatcaaggaatgttgcacaagccttgcagaacctttgattgtggataaggaagaggatttccagaacaaaaacttgcttgctgatgagaataagaggtgcacttctggacttctggtaccggcattactaataataatatcagcgtacgttcatgccgtctatcattcaaagtatacgtgtgctccgagatgtaatatggttggaaacaactatagccagaatcgcctggcaatactctctgcccttaatagtttccctgttgtgagggtcagtgagtgatagagcgccatacacggtatgcatgattgcgtgctaatatttttttcaccctgtgatgtaacattttctggggttcacatcgtttatcatgatgacactaccattatactccctccgttctaaaatataatcatttttagctatgaatctagcatgtccagattcatagctaaaaatacttacattttgggacggagggagtagatattattaacgtgtgggataataggagggatggtgagacctgcatactagtgaccataatgataatgatattatattatactccctccgttctaaaatataagcatttttagctatgaatctagcatgtccagattcatagctaaaaatacttacattttgggacggagggagtagatattaacgtgtgggataataggagggatggtgagacccgcatactagtgaccataatgataatgatattatggtaatgataatgacattatggtagagtattctcaccccattttctgtgtaacaaacaaataatatcgaagaggctgagttcaagtttgctccgcctctagtgaaagtgtgatcctatacttcagaacacttcagtttagaaacaaacaatttctaatgatgccaagtcgtttgttattactagcacnnnnnnnnnnnnnnnnnnnnnngtcaaactcccacaaaatccgtacagatggaccattcattttagaaagtctctcttgtcagtgtcactgatcgatatatcgatagaggaaagggaagaagaatcagccgcttaaaatgtagagtactcccaagcaacgttgacttgacttcccaactcccaactcccaacttcccaagcctttttaatcccaaagaggggatcagcagctgcaagtgcatcagcagcgagttccagccatggcagcagacaagggagtgaaggtgttcggcatgtgggcgagccccatggcgatccgtgtggagtgggcgctccggctcaagggcgtcgactacgagtacgtcgacgaggacctcgccaacaagagcgaggcgctgctccggcacaacccggtgaccaagaaggtgcccgtgctggtccacgacggcaagcctctcgccgagtccaccgtcatcgtcgagtacatcgacgaggcctggaagcacggctaccccatcatgccctccgaccccttcgaccgtgctcaggcgaggttctgggccaggttcgctgaagagaaggtataatccaactttctctactgatgactcaaatccaaatccaatcctttttttttctgacctcttagttagattgattggctttgcattggaaaagtgatttcatcactcggggatatcccctcccctcgttttttacatgacatctaaatagtcataagaaaatttggtaacatagattaatataaaatatatcactccacaaacatgcaattttaaatttaatttctacaagttgtaacaaaaataacaaatatagctgcgaatgtacgataactattttcagtttaatttatttttttttgttgcaagttgtataagttgaatttattgaattttgtatagcatgtctgtggagtgatatatttcatagtattaatctatgttgttaatttttttaataactatatagatgatatacaaacaagaggatattcccttgagaaatgaaaatccacgttcctttacgttgcattggatgttgttatagtgcaacgctgctctgtacccgatcttcatgacgaccggagaggagcagagaaagctggtgcacgaggcccagcagtgcctgaagacgctggagacggccctggaggggaagaagttcttcggcggcgacgccttcggctaccttgacatcgtcaccgggtggttcgcctactggctgccggtcatcgaggaggcctgcggcgtcgaagtcgtcaccgacgaggcgctgcccctgatgaaggcctggttcgaccgggtcctcgccgtcgacgccgtgaaggcggtcctgccgccgagggacaagctcgtcgcgctcaacaaggctcgccgtgagcagatcctctcggcgtagagagcacggtcacttcagctccccagctagtacgtttcatctccatggtccatggttaaacaataagttcgtcacaagcacattgtgcagaagtagtagatgctcgaagcatgatccgtcttagagagacaaacttaatgctctatgatatgttatccagtgtacaatattgcctacttaattatttcctcaagaggaaaaatacagtacagttttgtacttttgtagtgatctgatcattctaattaagggtccaaatggtccggttttgggggctcgtcggagtggcggcggcgatgcgccgccttggccgcccggacctcgccgtagaagtaggagacgaagccccatagcgagagagcgagcgcgacgccctttgtgccgttgaatggctcgtggaagaacatgacggcgagcacctcggtgaccgggatgagcacggtcatgatgacgccggcgagcagcgccgagccgtagaagatggcgccgatcgtgccgaggaagaagcactggtacatggcggccgatccggccaggagcaggtagtagcccgcttggcccagaccgaattcatgggcttctcctgggattgcctgcgtttggttgctttccagcttaatgagaaatactactgcatatatgatctaatgtctccaaaagagcttgatcaagaatttactaaacataagctaggcctctagttccctttagtatatttattaatttcaaccggttgcacaacaaaatttaattgaagtgttagaaatgaagaagtcactaattaggcttttttttctagaattaaaaacaccttcatgatagcatgtatttttttttctatgagatagctggaaatatggatattcaattaattttcctcttgtttctgttgtgaagaatattcttgggctatatagactttgattacccatttgttaggtctaacggtagacagactcgtcaacacaactagctttccttgttcgagaaagagttacatcttattgcaaacatgaacaacttgctaaatgattggcttgcaccgatctaccactacctatcctatatagcccacaagtacgacttgctgctgctgggcttcagtgtaagtacaaaggccaaatttgatccaaaaagaaagaaaaagagggtccaaaatgaaaagaataaacaaggggatcaaagtaaaactttgataagaaaaaggaggtacaaaatacaattcactctctttttttattgtctattaagatttgattatgtcattgtgtgccaatctttcagaagcgtgctctgatatacttaaatttcttttcaaaaaagcttggaacgtgctctgatctattggcatagttacattcatttctgagtggggttaaatagtttataatatctcagtagcctgtagattgcctttcactagcagtccactgatcagatcacttagcatgacaaaaggtaactccactcctgtgcattaccatgtcagcctaataagtactctatacagttcagaactctgagaaaagggtagacgtcattgctaagaactctatcagaacacagctaatatctattccatcccataatataaggcatgatcaaacttggcacaatgttcaaaactaatttttgacttataatttctcatatataacaaaattttaaccatcttaaagtaaatttaaatgtcaatccaatgatattaattttagttaaaaaattaatttatattataataattgttggtcaaatgtttttaagttgaattttgaaatgtgtgcatgtcttatattatggaatagagggagtatatgaaaaatgtgttgagtttttggatggtgcaatacggctaagatcagtgtgctgtgaagaactgtgagagtagaggttgaaatcttacgtggaaatcgttgttgacgagcatgccgacggcgctgaaggccgtggcgacgaagccgatgacgagctgcatctccatgacgagcgtgtacgtgacggcgccgcgcgcggcggcgtggtgcgcctggctgagctccatgacggggagcacgagcccgtacagcgccgcggcggcgagcgtcatggcgaacccggcgcagtactgcgcgcgcgacacccccgccggccggtccccgccggcgttcatccccagcatcgccgcgccgacgctgagcagcacgacggcg

SEQ ID NO: 16068 - DNA, 4709 bp, Oryza sativa
accgcaacagcccatgtcgagaacactaacgcgcgcccaggtgaccaggtccagttgcacctagctaggctcgtagcgcgaatgtgccttttctcattgtcaaggcccaattaatggcttggcacaaatcgttctaccatctcggtgcccgagagattgcttggcacaagagattcgattgagacccatgcatttgagagctatcccaatggtgatgtctaaaagtagagctcctcgaagagaaggatactaaagaaaaccgataggttgtttagcaactttcacgtagaaagttttcacacaaaatatactaatataaagagtactgtttagctgtttgaaaaacgtgttaaggaaaaccgagataaaatatatatttcatgttttcattagcacattcttcaaactgctaaacgatgtattttgtatgaaagatttctatatagaagtttctttataatatcaaataaatcaaaatttcaagtttataatgattaaaacttacttaatcatgcgctaatgtctttcttattttgcgcgcccacacttaatcttcatgtttggaagtgtatgtccaatcgtttgttttgtaatcaagtcttaaatactaattaaatagttataataaatctgaaaaaaacgacaacattggtacattagtcatctatcaccatgcaaaatatcaacttcaagtttgatcacataatgagaaaaataacaaattacaccctttcttttatccccacaaaaaaaacaccctgaatagtacaagtaatcagatttgttatttttcttcaacttgtttaggtcgaatttaaatttgcatgttgtgatagtgatatctctcataattatctatgttatcgaatttctataatttttcatacccatatacattacatgcaaagaatgagcatgtacatgcacacaatggtcgttaatagcggtctcttaccggtactaattaggaataattgctgacatggaagaaaaaaaaaagagaagagacaaaacatcgttgctatgggtaacaaatggcttaacaatgactcttagcctctgtaatatggaaacatggttgtatgagggttaaaagaaggaaataatagtaatataaggaatattttttgagttaatggttagagtctttatcgtctcaactattaaaaagacacgatatttaaataatcttgtattgtctaagagacgatagttgtctctaccattgaatatgcccttaagtgacaacatgactttcccttaacctaagtgccatatcatatattttacttattatgtgataatggaattaattatatgtaaatccaacaatgagtatcgggatttagtcagtcgtcatgaaatacacggagaatgcttgtaatcggccatccgaataaaacaggaaaatcggacaccacgccgatgcttcccacgttggagtatctgcaaccaactaactgctaatttcaaccatgcatatgcacgtgtcaattttcaaaatattttttctcctagactacttatccgatctaaaatccgattgcaccgttatattcattggaattaaatctttataacaagatgtcacatgattatattccgattaaagaaaaacatatgtttcaaaccattaatactttatgtttcatacgttatagcaacatgtttcagcatatgtttttattgtgtttcataaaattcacataaatacttgccactaccctcccatctctctctacctcatacatgcatacatgtatgcatttttgcgagctttaaaatgatttttctcataaattaattatccaatctatgatctgatcacaccattgtattcgttgtaattaaatctttacaagatatcacatgaatatattttgataaaaaaatatgcttcaattcgttaaccctagttgtttcatatgtggtagcaacatgtttcaacgtgtatcttcatcatcatgtttcataaaatttttaaatgtttcaattgttgattttttttgtttcgccatatataatttgatgtttcactcaatggtcaactaggaacatttgaccaaccaattttttttgacatgagacctcagatgggaagattcctcatgattgtggagtgaaaaatgaagtgtagcaatatgcacatgcacatacgctcagaacttggctgggcgtccgatatttgatgggatatttggtgggatatcggacgtccgagccgtagcgctctccgaaatacacccctaaaaactaaaaaaagcaaaggctcaataaagtactccctccgggctgataatacttgtcgttttagataagggtgaggtcaaactttaaaatatttgattatgaatcattttcaaaatatttgtctttcaaatatggtgaccacatgtatagattagtcttaaaaagtactttaataagatcatatatttgttaatacttttttacatattatgatagaaaataatggtcaaagttgttttttgaagaccgtgcccttgtctaaaacgacaagtattatcaacccggagggagtaggagtatacagtccctccccacaagtctacttggttgtcaatatctcgatcctataattcgattttactatcctaattaaggtttctaactgtatcatcatactccctccgtttctaaatatttgacacaattgaatttttagtacatatttgaccgttcgtcttattcaaaaacttttatgaaatatataaaactatatatatatacatatatgtatatttaataatgaatcaaatgataggaattacttaagtttttttaataagacggacggttaaacatattttaaaaagtcaacggcgtcaaatatttagaaatggagggcgtatatatgtagaatttacgattttttatacatataattctatgattgtgattagtatggagtagaacatttaatttcgatttaggatcgcgatttaacaagaagttggtccattccccgtgatatctgagatgcatctctacagctcataggtacggtgtatatagagtttggttttggtggcgtcatgttcgcacacaccgagaacgagcaggtccagccgtccagggaagaaaacggcaagaagaggacaagagaaaccggtgtgacataacgtgcgtcaatctgcaagtcaagcgttatccttgaggaaactgaactgatcgccggatacgcccaggcccagcaactgcaggtgctgtagtgtcagggataagaagtggtgctctgcttctgcactgatcatgaaactcacctctgcttcttttcctattgaaagtgtatgcgtcaattatcttgttcatggtagttgattttatcggttaataccgatacaattaggaagaaaataattttattggttttcctgccctaacaaaaaaaaacaagtaaaacatgagagataaaaaccgtcgtcgtggtcagtggcaactacctatattctaatcgggattagccccccgagtctcaccagtaaaaataaaaggagagtagcagttgagaagaagtaaagactaattcctacgctaaatcctaaaatctaatagagcccgattgatctatcatactgtgagggattcgtagtgctgtcttttattcaattcttgtgcaggagaaacatcaagaaagaagcaggtgttcctgcagcggtgttgcatcctttacccgatgtccagtacaccgcgtaatctaagaaaatgagtaagaactggtaagaacagaaaaggaggaacagatataacacttatggcttcaattcatccagtcagtaatcatcccaatttcgtatttagaattggtaatcatgtgttaagctaagcaattagatcccgagaataaataattccaacaggtcacaatataggcttgcatgtagtccagatgtccacattcactagagtacacagtacacaaaatggtagattggtcatggacatgcatgaccagattaataagaacaaaaagtgagtacaagaacaaacattgcaccgtactcagtcattacagatacagtgaagtagcttgttttcgccgacccacaaaaacagcctcgatcacatacagtacacaaatagtgcaatgtgcacacagtctgctattttgctccacgagcagttgaactgctgcagatgcagctcactttatggcctataaaaactaataaatccgtggccactggcacaacaaaagcaaagtaagcaatatatacacacggattcatgaggcttcttcagcttccaaagccgctttcttcttggccttggcgtcggcgtactcgccgtaggagtaggaggcgaggccccagagcgagagcacgagcgccacgcccttctcgctgctgaacttctcgtggaggaagatgacgcccagcacctccgtgatcgggatgaacacggcgatgatgatcccggcgagcagcgtgtgcacgcagaagatgacgccgacggcgcccacgaagaagaactcccacaggacggcgttgaacaccagcaccacgtagtaccgcgcttcacccagctcgtactgcttcgcctccctcgggatcgcctgcgtacgtacgtgttcagtttcaggggtgatcgatcgttagtaggcaacacaactttgaaagggccaaatcaatatggtagtacgtatacttgtcacgatctgaatatctgatggatgttcacgcacataa

SEQ ID NO: 16069 - DNA, 2070 bp, Oryza sativa
acccattaaacattcgaagcccctttcgagattcatcactaaccgtgtaggagaactactcagtcaccacgagatccaagtatctgcttcttgatggagccaattctggtgatcaattcatcccgattttcctgcacaaaaaagtagtacaaatatgagtagaagtccatttaataggggagagtgttcagaacagatataaaactaatcaccttaaaaatcaaatatcgcgaggtgaaccaaactgtgaatccaaggccgacaacttccatcacctggggaacctgctcatgacagcgataatcacatcgttatgagttgtgacatagtacttccatatataatactaacaaagattatgcaatgcttctatagcttgttcgagaaaagtcctaaaattgccaaaggcaagcatgtaactgcgagctgctccagtcatagaaagtaagtgtgagagaactggcactaccgaaataaccaacaggtggcaaaatttggtacagccagcaactgtattgccttcagaaactattttttcttttgacttcctaatttcaaaaataaagcactgatctgttttacatcttatcatacaatttcaaacaaatgaaattgtgatgagtgagtgagtgagtgagtgagtgagagagagaatcagagttgcataccaaagggactgaatcaagtgcagaaacaacaattgatgaaatccagatcgtaacaagcgcagatgtcccataaacaagagcagtatatgaattttcagagtccaactgcataagagtggtttgtagaggtgagccacagtaaagcgcatcattgatagatgaaacattggatgaaatactctcaggaaattgcatattatgcatagcatttggaagatacaagataaacaaaaacctggtatagaccttatgagcctgagctctcttgaaagcatgaagtaacaaactaacaatatacttatgccatcaaaacatatgaacattttggacaaattaaacaggagtcaagaacaaaaggatttttttttcaaaaataacagtagggtgacaattctgaaagtaatcttacaatgataaatgtttactttcatctaatacataggctgatagcattctgaatgagaagaacaaggccgtccttgtgtaagatccaaacagtaagtaaatggcagatgttttctataaaacataaaagatagatactgagaccaagtaatcggatatctagagacaaatttactttttgctttgataaagagcctacagagtacagaccatttctagtatcccagaaagtgttactccctccagtcaagtatacttgacatttaggacaacttagttgtactattatcaagtatattctgatgccataaacgtcatgtaaatatgacgagaggtagtatttatttcctgaatatatgtacttcaacaaatatatggcttctatgatagtttacaaagcaaacaagaacatctacaaattagcactcatcggacaactaaaacaatctactcgcaagactgttattctacatgctgaactagagcagtagcaacatttactcctgtcctattaatcagtgtaaaaaagagaaaaaaaactcatgttatgttcaaaccatgatcaagattgattgaaaaagaaatgagatcgaagaaatggtgatcaagacgaaatcttcaccacccgcacctaaatcattcgtttcagatcagaaatgcaacaagcaggcaggcacgcgtgctcacctcgacgccaatctggttgagaacattccaggaagtcgattccccctgcacctggacctctccatccccatcacccacctcccggccaaacccctcccacccctcccgcttcgcaggcgccggctccgcgggcttctccgagatcagcactctcagatcgtcggagtccttcgcccgcacggccagcgaagacgccccggcgcggcggcggccaaaaccttggggggtgaacaaaactagggttttagctctcccatcgcccatgcagcggaagattcgaggtgaatgcaccgtgtcccggcgggcgtgc

SEQ ID NO: 16070 - DNA, 10112 bp, Oryza sativa
acagtcgccgccttcactggctcacacttgcctagcctgcctgtccgtatgcggcggcagagcgctggggtttttgggctggcccggcgggaaaccggcggaggaggaggcggcgcgagtcgacgagcacggccgcgtggcggagagcagcttttgggctttctttttttccccctttcctctcaactgcggatggatggagcaaggtgtgtggaaactggaaagaatagtgggctttttttctctcttgtgcttcgtccgggtaggctgaaccgagttgcttcccctttttcctcgtgttggaatgtacctacttcctccgtctccagttttaacccttagagtataaatgttataaatgtattgaaagcagataaaaagagaaacaattacattcggatctcacaaagtgaggctattataggtttttgggttttgtatgggtatgtgtagaatgggtgaaaaataaacttattttaatatggagagagcaggaatttctaagtttatgtacatagtgaatctctaagaaaaccttgtgttcaaaaaagggcatacgtgtttttcttttcattgcaaagtagtctgttccattatgatcatagcctaaccaaatgtctaaatttcagcaatgatcaatgcataacattttaggatatggtttcttttgggtatcccatacccaagagaaacccgtcgacagcgaggcgtctgtggtgacttcatcaatcaccagtatttattggcccagtcttcgaagatgctcatagagatagggtttgcgtgcgtgcgtgcgttcttagggatggatgtgcgtgcgttgtgagtgtctgcgttgtactgtgtaattttaaaaaaaatgttatacactgatcattcgtactcatttataccgtaggggttaagtacaccatccgtaatgcttatgtctaactttctcttctctttcataggaaaacaacatcaatagatggcatgctcaagagaggtttcactagcacaactaaatatttaaagatttgatggactcagctagatatagagaaaccatcggatgagtaatgacaagaagaaagaaaaggtccgaattataccgctgaactgttggatgagtacgaattacccctataccaaaaaaaaagctatctttcacccctcttacttaatccggagtggttttagttctatgtaacagtccaatcagtatttaaaaaaaagatccgtggaacccacttgtcagattttctctcttacccctctctctctctaacaagtggatccactgatttttctaaaaaaaaatgggagtagctatatttatggcgtcatatttttcatcaaaaaatagtcggcatgtatttacattgtaagtccctaaattgcgtatgtaattttagtgtatttacaatgtaaattccaaaattacatatgtaagtcctaaaattacatatgtaattctcaaaattacatatgtaagttgatgtaagtcacaaaactatagatttgtgatgacacagatatttagtttttaagattaattagtaatcctgattagcaaataacgttaaaacaaaagaagagaacagaattggagggatatgcgtacacatgcggtgatttctgcatctacatctgatggttgaaacaaccgactgaaatccatcgtaatttgtggcgacatatttttagcaataccgaaaaatattgaccggactactacgtaggatcaaaaccactctagattaaattagggggttcttcatccggtattaagagttgagggtgaaagatgtttggtttttaggtctaggggtgtaatttatactcgcctaatagtttaatggtgtaattcagatctttttaaaaatatcgttttatccaagagagccttattttcctctagaataggtgggaagtatgatatttcattcgtgccattcctttgatccaaacgatgctatagtagttgaatctacaggcatgccaatcttttgttttttccttgcttttcttccaatacaaagaaggcataagtcatatataatccgaagaaataatgtttgtattagaatttagagttctcctgctttgcgtaaatattcacacctctctgtaccaacggcctacctcgccctcaagtttcaacagatgcattttacctggtgtttcacaacttcatttgtgcgcccttttattgatcgattgcgcaagatcaaacacgggttatgttaaaccgaaagggtgccactccataaaagaaaaagaatgatggctaggctagccgcttagctgttcttgaggcttgcgagcatcctgattcctgcagctcgtgtcttgttgctgaaggactggctaaaactagcgttgttttcgcgtaacccaactccgagcccgaggcgcatgtatactcccaacatcttcttgggcctcccattgctaaggctctcgatctccggatatacattattaatcatgtccgaaaacaagaggagactgaaaagtgattagttaaactctccatgaattccagctaattgttcagcatttatatactgctcggaacagggcggtgagccggcgcggattgtggcggcgcagaggctgtgcctgccggccttctgcggcgttgccggcgggatggcctggtcgaccgaccggcaacgtctcgtcggcgcatgcaccggcctgatctctgcatgtagatcgagatgtgtgctgctgtgcatactgaatttttgcaattttgcatcttgcatatatacttcctaaactggcttgataagaaaaaaacagttggttacaagaaatttcatactgaagttcaatttgttgactaatatgtctgaatttcgtcgttttttgccagtttaataatggttttggcgaaaaccagatacggcatgtgactgtgagtggcttttgtccggtaatgagattgtgaacccgacttagatattaatcactgcaagtttcccaagatttaacaattaatggagacttatcagcaagtcttggtcaccatccactgatcgatcgagaggtaaaaaagaagtacagatcttgcagaaagagatgaaaaatgggtcgatcgatcgagagttggaaatgtcctgtacacttgtacaggttgatgacccttattgcacgtagataattccatgcgcgcgtgtaagtatgcgtacatattccccgtgtctaatgctgcaggactcatgcgtgccgacgtgtgtgtggttagtaaaccaccccgtggcaatatgcagcatatacaaatcagaaatttgatttactatatataatccagatctaagaggtgtagtcactgtgtactgcgtacactactattcagatgcagctattacaaaatgtaagcgacgttctaatcgttaaaaagtcgtgttctggaaattgcacttgaggctgaaagcaattgagcaatagagatttgcaaatagcggactccacctagcctattattgaggatttatttatttgtagggaaacatatggataattcagaggattccaatcttataggaaaaattgtaaggaaaatcattgaaacctttttttaaaagaaaaattctatgaaatggataattctataaagattttgaagaaaagttagcaagtgttacaatctcctaaaattttttttgtttgaatctattgctatctctaattcctgaggttttttccccaatggtctatttaaacaaccagtgttttatactcatctgttttacaattgtattatgtaaaaattttatatttttatatttctcctttttttaataatgggtttcaaatgagccttaatcgtactccctccctcgacctatttcattctttggtttttttccaaaagtctaagtcttatttgtagttatcatgtactaaactaaattgttgatcggaatctaagaagtcatcttagtacttattggttacatgtccattgattttatcacatggtgaataaattaattgctccttagtcttggtgcagtaagaaatactccctccttcccaaattgatcatcatataatgaaaattaaattttctcaaattgatcatcatataactacatggacaaagatttcatcagagtacaattaatgcagcacgaaaaaatgtgttcatgttaagggtgtactccctccgtcccataatataagagattttagaaggatgtgacatattctagtattatgaatctagacgaagagtctgtccatactcatagtactaagatatgtcacatctctgcaaaatcccttatattataagatggagggagtaattgtgcattgcgtttttaattgatgcatacattgtgggagaatatgtgcattataattgagtatgcatgacatcttgatcgatgcggtttaaattattcttggtcatggtgcacagatattatatgatcaatttgggatggaggtatgtcttagacttttggatagagggagtattaattgggaaacttaaagcaattgagcaatagtaatttgcaaatcagacattatcttctgggttactttcatcacatcctactacatttcgcacaatgcatagggagcaatactgtaatattgactttgatcgagttaggcgcccatgaaaatgctcgaactcaaagacaaaggtaaaaaagttccaatcacgtcatttctatgcttggacggtagcactagtgcactacagtagtagtacctcgctaaggcattccttaacctcaccttcatgtttgcagtaaagaaaccgagaacgtagcgacgattccatttgggcaaactatgcatttagcctcggttcatgtgaagcatgtactgcctgcattgcattggacttggagttggcagatcagtcaaataagaaaagccaatgacactgtcaaaaactccatgtctgaatctgtcacctgctttgtttttactagcttgtaaccttctcttctgactttttagatcttgcggtgcttgtgtacagtcatatacagagatgcaggtggcatacactgcatatatgcatgaccagaacatcttcaccagaaccgatgcagtacaacatgcatgcatgaagcatgcctggttgattaggatacttgggaagttgggatccgtggtagcagagagtataatatttcaagtcaaaacaattaggaagcaactgttagtgcttgtaaaaaaaatgaacagtaatttagacatggacgagggttcaaattaattttgctctgtgagctagaaagattgagcagttgcacaagattgatccttaagagcaaactgcagctaaccatcaaattttatcggtagaacatcgtgaatcccagctcttgcattataatctagaccatgtactgcttaatttgattgggtaactacgggctctgtttgcccaagtttttttttagataaattctatctgtgataaagggtggatcacatatatgatatccagataaaattgggatcatgtcatcgtaaaaaacggtttcatttaaataccatcatataaatgggtttgaaataccattataaaacatcgcctttatactaagatgcatttactctttcaacggataaaaattgtatgtggcctcggctgtatgcggtggccaaggtgggtcgccatggtcaacgggaaggcggtggaagtagcatgcgaaggctatggcaatgtcaccatgtgaagttagagaaggggctagggacagtggcatcgatgggatgctagcgaaggaggcatggcggctagagagaaggtaagcgttgatggtgtgaaggcccacacactgacataatggaattgacaaagcctcttgcagaggcccgtgaagatggcctagccgatcatacaatgtctcagcaacgatgctagaggataatttattgccgtctgtgtcatactccgttaccgtccttcctcctatccacggtccgccatagcgggagtgcggcaggttaccacacaatcagcaaaaccacaatcgacctatccttgtgctatcgccgccatcgtctcccctacctgtgctcctcttcacacgtgctcgtcttgctcctcatcctatccccatcctcgcctttacctagaaaatcttgaggctcaaggtagaaaagaagacagggatggcgcactaaatgcggactcaagcacataacctcgagacgctaacaggtaacaagtttaataacacaaattctgttgtttcaattccagataagactcttgctgcaaatttttctaaattaggggtttctctaggaaagaatgatttagaaataaaggagtccattaaccagattaaaatttcagaattggatagatttactactctttatagtagtgctgtagcgtctactagtaatgtagataaaaacaacgatgaattgttaaaagtgtcttctctccagcacttatgtagtgaatggctagaagaggttgagagtaatgacgatgagtctatggattctcaggccatacctcgaatgaggaagatttcgaccaaagtcaaacataaagtggtatgtcctcttttgactggtccaaaaaagaaagctaataagtttaagaaatgaaaggaatattttggaatagttgtggctttggtgatgcatctaaatttagatttatatctgaatgtgttaaggagcaaaatttggattttattgccattcttgagactagaaaaccatcattcaccccttcaaatcttaaaaacctttgtggtggaaaagattttctttggcatgagaaacctcctatcgggcgatcaggaggaatacttttagaatttaaatgtttttgatataggtgaaatttcagaaggggacttctatgtgaagtttcttctaagaaataaagaggatggtttcaaatgggttttaatggcagtatatggtgctgctcaacccgagttaaaagaacattttttacggaactagctcagacttgtggtaaggagtcataccctctattggtaggggggactttaatatcattagatcacccgaagaaaagaataataattcttttgaccctcgttggccttttctttttaatgcggtcatcaatagtctcaatttgagagagattgatctttcggggagacaattcacctgggccaataacctcgaaaatccaacttatgagaagttggatagagtgttaatgaacactaactgggagcaaaaatatcctttagttacgtgtcaagccttacctcgagccatttcagaccactctccaattatactgagatccagatcgcatgcacattttggcaatcagctgccatttcgttttgaattaggctggctagagcgggatggattctttgagatggtagccaaagagtggcaaagcataaacaagggaaggaatcctatggaacgttggaaacacaagatcgtccaccttaggcaacatttaagaggttgggcgcgaagtttaagtagcacatataaaaaacaaaaaataaagcttttagctttatttgacacactagacaaaaaagccgaacacataactctctccaacacagagttagcttcgttgaagcaggccaaaaatgatttggcaaaactgttaagggaggaagagttgtattggtaccagcgatctaagacaaatcatttactccaaggggatagtaatactaaatattatcacttgatagccaatggtaaacatcgtaagcagatgattttccagttggaacaagaggacactataataacgggtgatgggaatctcaaataatacatcaccaattattataaaggattatttggtcctccagatcataatcatgtatcatgatagagggatggactgatgatattcctcaagtgtccgacttggaaaatgacatccttactgctgaattttcagaaaaggaagtcaaagaggcaatttttcaaatggatcataactcctccccaggtccatatggctttcctgcagagttttatcaggtcttttgggagattgttaagaatgatctcatggctctatttagagaatttcataaagggacattacccctttataacctaaactttgggatcatcgtgctactgccaaaaaaggctgatgcaaaacaaattcaacaatataggcctatttgcctactgaatgtcagctttaaaatttttacaaaagttggcaccaataggattgcaacggttgctcacaaagtcattcgcccaacccaaacggcgtttttgccagatagaaatatcatggaaggggtggtgattttgcatgagactgtccatgagttacacacaaagaaaatggatggtatcatattcaaaattgactttgaaaaggcttatgacaaagttaaatggcagttccttcagcagacattacgaatgaaagggttttcacaatcgtggtgcaattggatttccaactgggttgaaggaggaactgtaagtgtcaaagtcaatgataatgtaggaaaaaatttccggacatgcaaaggcttgagacaaggggatccaatgtccctaattcttttaacatagtagatgacatgttagccattcttattgaaagagccaaagccgatggccaaattagaggggtaattccacacttagtggatgatggtttgtccattctccaatatgccgacgatacaataatatttcttgaacatgattttgaacaagcaaaaaatatcaaggccattctttgtgtgtttgaacatctctcggggctgaaataaactttcataaaagtgaaattttctgctttgggggagccaaggaaatggaggaccaatatagacaactgtttggttgtaattctggttcctttccattcaaatacttaggaatccccatacactatcgaaaactcagaaattctgattggaaatgtgtggaggataggtttcaaagaaaacttagcacatggaagggcaaaaacaactcctatggtgggagattggttcttcttaactcggttcttttgagtcttcccatgttcatgttattcttttttgaaatacctcgaggtgtacttcaaagactggattactaccgatcgagctttttctggagcagtgatagccagaaaaacaaatataggttaacaaaatgggattatatatgctagccaaaagatcaaggtggactgggtgtcctaaatcttgatatcatgaatagatgtttgttgagcaaatggctattcaagcttcttaatggtgatggcctatggcaaaaccttctgcgcaataagtacttaaagggtaaacccctctcccacatgtcacacaaactaggaacatcccaattttgggctggcctaatgtaagtaaaagatcaattttttcagtatggatcttttaaacctggtaatgggatggaaataagattttgggaagacacatggttgggcttgcaacctctcaaatatcaatatccttctctgtacaatgtggtccgaaaaagacattctactttggcagaggttatgagcacaacaccgttgaatgtttcattccgacgatcaattgtaggaccaaagttagttgagtggaatgatttgatctctcgactagctaacataaccctgtcaaatgaaaaggattgctttatttggtcgctacataaaaatggccatttttcggtcaaatccatgtataatgcgatcatcaattccaatgtaagaatccataagaggatcttatgggaggtaaaggtaccactaaaaatcaaagtatttatgtggtttcttcaaaaaaaagtaatcttgacgaaagataatctcataaagagaaattggaggggaaacaagcaatgttgttttttaatacacaagagaccatccaacatcttttctttgactatcatgttgcacgttttgcttggcgatgtgtcttctttgccttcaacatcccccctccccacaatgcaaaagatatttttggtgactggctaaggggagtgcctagacccacaaaaaaaatgattttgtttggagctagtgctttatgttggtcaatttggcgttgccgtaatgatatagtttttaaccataaaaaaatgcctaacatcatgcaggttatcttcatttttcccaattg

SEQ ID NO: 16071 - DNA, 12166 bp, Oryza sativa
acgtcagtgtgtgaccctgtgtgtacgcccactagagctgaatcctgaatggatagtcgactctcgttcactcgcttggactgtcctgcagacaaagcgcgagaccacaacactggcgctgacatgcacagctggaggtatacgcgtatatatctgggctacttacgtacacccctggaccattacacagcacatagcctcatacgagcacgactttacatagcgatgcatgtaagccagtttgcttcatgtacaaaggttatcactagggatggcgacgggtcgggtcgggcacgtgtagagcaaaaccatgcccgaccccatgcccgttatcgcccgccaaaaccgtgcccgtacctatgcccgacgggcacgggtatatccggcgggtacccaatggacctcacatgaataataacttgaaagatatataatttaacaaagagaaataaaatcaataatttactaaattatcagttatcaacaataatttgaattacatcacaacttattattagttagtatcacaaatgaaccaagagaaagtggtataagaattaagagataagttgaaattagggcaggggttacccacagacaaaaaaaaatgaaacccggctgttgctcacgatgtccacgggtttcgggcgggcatgcccatgggtaaaaaatcacacccgcgcccgtgcccattgggtcgggtatctgcggatacccggacccatgggcaaaattgccatccctagttatcaccatttacgtacaattaaaaaaagaaagaaaattgctaaccttttgttggcacaaaaatccatccttaaatcttactcctacaaattttgaatcatcggatgtgcttcacgattcgtgctccaaatccttctcctccacctccggagactttctctttttctctggggccaacgacaacctaaactacaacgggtgacctacaaattaaagcccgggattgaggtgggagtgggaggagggggaagagagagagagaggagttcgacaactttataaggatagccatgggatgcggtggcccaataatgggtgacggaagaggtgaacaacgtgtgtggcgttgataatgcggcgacctagtaatgggtgacggaacaggtggatggtgtacgtggcggtgttaatgccactaaagccgcggagtcggcaacgggcgttggactagtgttcgcaacgaggccgaagcagagctacgagttagaggaggcgatcgggggtagctgatccggcagcggggagctgtcagagactagaaagaccgtgggataggatcacctcgccaccactggctgaaggaggaggagagacagagaagaacgaaggggcatgcagagacctggcgagcctcatcggtgttagagtttgtattaaatatgtatacaaattaagttatagttttgcacggttcgtgcctttccatggtgaggacgagcgactacgctgtggggcggtggcggcaaatgaggttgaggtgggggaattgcaaaggagttggtggcggcagtacttacgttagcgagtgggaacaaggaagggaaagggagagttagggatatgtgtgacgcagaaatctcaaagcagattcaacaatccaaagattacgtgatttgggatgcgcatgattttctgcggtaatttttttattaaacttgtctaaggttaactaatctttgccacactttaataaatctaaaagaatttatcacacatttctgagctattgactacgagaaagttgtgtaatcttaaacgccgtgcaagctttttgctgcaaagtgcaaaccaaacatatgcatgcccgtagtccgttacaactcctgctgctaggagtacgctgtcatccagggggagacggagaaaggacacgctattggagggcgagccgagcgagaagcccgagcagtaaagtagctcatcgaactctagctacgtactggcctactgtgtcgaatggggtaaaggttaaagctgtcgcgtgcatgcagctatggcgggaaatctcgatctctctttctcatttttatttttcaaagaatggtatttttttatccggcctctccatttaaccggatatatacggaatatatatggctattgaaatagggaacttagtcccataaataactcaatctagaatttactcatataaaaatttaaacttagaatttttagaaactactcacgtcactgtaaccgctaagctaagtatctctctctcggccgaagctagacgacgaggaggcaaaggcacgcgaggcaacgcagcgatgcaagcggatcggtggaggaggcggtggaaacgaaatccacgcagttcaagcgcgggccggggggaggaccgcctgactgctgatcgatcgatcgctggatcgattgatcacaagcgaacagtgtggatactgcagggccagcgattcttcaggggagcggccaatgggaatcaggtcctagtggatatagatctctgtaaaagtctctgttactattttatttacaaagtgccatttgcatggatgcgtgtatgcaagggcaacaacttgtcctgatggtttcgtttaaatattttatttcttttttctttgatggtatatataaaaaccgtccttatgaaaatcaatatatcgcaggggattcccttatatattgtttcatggtaaaagaaaagagatattttgttcggaacacattataaatgctgacgcttatatacatgtgtgtacgcttatcatttaaagatacatatgcacatcttaccccccgtaagagcaaggataatagtgagctataagcaagctaaatgcttatgtggaagagagagaaagaaaaatggggagtgttggctctcatgcaagagtgctccacacaaactccaagaaataagcattaaattcatagagagataaagagagaggatgaaaaaaataaagctaaccttatagctaacctattatacatgttagctttaacattggcttataacattggcttatagtaagtagtgggctgtactactaaacttgctctaaacacctctgccatcaacgaaaattgctgtacccctctgtagtttcatggtaaaaaaaatttgagatttcttttcagaacatataacaaacattggcactcgtatacatgcatgtgcacttaattataaaggtagacgcacatcttatctctatgagcacctccgagctgttgatagaaacgtcacctacccctcaaagaaacttagtgcttaatgcgaataaccatgcaaggctgtgttcggttgtggtggttgggaatattttccctctttaaggaaaacgagatagcttattagcacgtatttaattaagtattttctacttttttaaaatagattaatatatttttttacagtaactttactgtacaaaattaagttcttttagaaaaacattgtttcgtagtttggaaaatgtgctcacgagaatttagaaagtagaggttggaaaacttgagttgagaaccacaaacgaggcttaacgatctgtgtatgcacatgcttattggacactaagaacattaacaagagtacacgcataccaaatacaattttaatctgaacatcgcattgatgaaacaaaattaacaattcgatttccttttttctttttgagagagggtttgatacacattggtaggctagagatttgaagtcatacaccttactgcaagactaatatgcaattccacttaatacatacgatgcgtaccttatagcatctctaacagagtgatcaaatgactcttcgaactaaattaaaactaacataaaaaattacccttcaacaaactctctaactaactggccaagccttccggctagccaaacacgtccagtaacaggccaaatttgacaaaccacatctgttggtcaattgtgggccacacacgtctctctcccctcttccttcggtctcgcctcacgcaccggccgttgatgttgcctctgtccccggccacatccggcttggttgccttcgcccccggtgatccgatgctgcctcccgcagcctcctagcgtcggcgtcactcctctctgcctccctgcggcaaggcctatgtccatctagttgcaccgcctccgcctccaccctcggccaaccggcgctgccgtctccatccctaccatccagtgttgcctccccccccccccggcatatgtagtgccgttgcgagggggtggggaaagaaaagagaggagagggagagaataagagtttcgagacagtggcaatgaagagtacggaataaagaatttgttggagtgtgtagcagtatggagagaaatcttttggtgcgttggccaaatggatgaatggagagacaaaaatagtcatgctattggagatgctattaacattcccaaatataggcatagtttgaacgtgtggtacggctggagctgttcgtgactcagaaaaatggaacgtatcattaacacataattaattatgtattaaatattataaatgtgaaatagatttatttgattttttaaaaaaacatttctatatagaattttgttcacagaacgtactatttagcagtttaagaagtatgctaacggaaaacaagaaaaataccatttttagtttctgaaaagaactaagccttaatccgtaggcacctactggcttgcagagagcttgccttcaagctaagttcggttatctagcaatttgatttctaataactcaatttcacatcaataaataaatattgaacctatctatctacttattataaatatcttgaaaataaaacatcacctccgccctaaaggcaacaaattatcatattaatcgaagaaagaatatattagccatatgttcgatcgaccgtgatagatctatagaaattatgatttgagaatatattagccatatgttcgatcgactgtgatagatctatagaaattatgatttgtagattgttataacttcctaacgttgaatctgagctaaaaatatgtaaatattaattatgaacattagatctattagaactagttatgaaattgtacttctttaatgtataatttcataactattaattctagccttcgatttaactctgatatgaataatagtaactctggacttaattttattaatattacatatattcttttaaaaaatgtttgcacgtaaaaaattaagaaacataactgatctaaaataatggtgcacataaatatgtatttgagataaacgataacaaaaattgcacttgcgtggcagagatcagctagctccaaaattgttttacagcattctctgcttgcaattcagtcaaacaataaaaatcatcatctgacttttgaaaaagactacctttttttatctcaaatctaaacatacatataattatcatcactaaaaaaagtaaagaaagcgcccaaaaaaagagtagaaaagcaaaacacgcgtagatgctagctattccggcactccctttgctgtgactacctttgcaaagttcttaatgcttgtatgaaccaaaccgagaaatagtttttcttttttctttgggtgcggagacaaaccgaggaatagttggccaaacatattctcttttcatataatgcaatttcctgaggcatctttttagatggcgagaattttacttatttccacgaaatctgaattgattttgacgaaaactctacatttttttaacaaaaaatacgatgttttatattgatatagcaggaaaaaatacacgaatataatcataggaggctataaccagggaaaaaatagaaaaacacacagccacatgtaaaaactcctaaacacaaaatcaagggaaaagcattagaccgatcgctgctatgcgtgaccggccactgcttgatcaacgaaaacttagatctaggggtgaaaatttttaccgtgtcacatcggatatacggacatacatttgaagtattaaacgtagtctaataacaaaacaaattacagattccgcttgtaaactgcaagacgaatttattaagcctaattaattcatcattagcaaatgtttactgtagcactacattgtcaaatcatggagcaattaggcttaaaagattcgtctcacaatttacacgcaatctatgtaaattagttttttttctgtatttaatacttcatacatgtatccaaacattcgatatacatgctgaaaaaacttgccagagaatgtaagcaggccctaagttccaaatagtcttgaatcttttcaagcaggttagctgatgctgaggtcctgaggaggccggaagtgagctcagtttgatcatatggtcattaaagttttcattatcttaagaaaaaaaaggtggtgttgaggtggagaagaatatatgaaaaaggaaagggataaaagtgcatgcaactaatgctcagactccataaaaaaatacatttaaaagctctattaaaagtgagtagtattactcctccaccagcaaagtacagacaagaaaagaaaagaaaaagagagccaaagtgccatgaaaaaaagagcaatttttttttctagtcagcgtcaccctcctcccttcccgcttcagttggcagctgccctgtttctgcttcatgtcctgcccaaaatgccctcctcctaccctccacgcggctgtgtatacaaagagaacgcatccccccattgctcacttgccccctcctcctctttcacacctcacctcccaccaagataaagagcaagaacagcaagagcaagaagaggaggagggagaccacacaatctatcacaagcttagcaagatttatcagcaaggaaatggcagctctgacgagctacgagatggcggcctccatcttgctctgcgccgaggacagcagcagcgtcctcggcttcggcggcgaggaagaggaagaggaggaggacgtcgtggctgggaagagggccaggtgcgctggtccgccgccgccgccgtgcgtggacgtcgctggcgtggatttcgccgtgccgtcggaggaatgcgtcgcccgcctggtggagacggaggcggaccacatgccgagggaggactacgccgagaggctgcgcgccggcggcggcgacggcgacctggatcttcgcgtcaggatggatgccatcgattggatttggaaggtgggggtgttcttcatcgatgcgagccatatataaatctctctgatttggcattgttcgcgtcgatccagtgattgatccgtctgttcatctcgatctcgacaggttcactcctactacagcttcgctcctcttactgcctgcttggccgtcaactacttggaccgcttcctctcactctaccagcttccggtaagaaaccttatagctgtagtagtactagtactcgctccatactcgtaaagaaagtcgtttagggcagcggtacggtctccaaaacataactttaacttcttgtttctataaaaatatttattgaaaagtgatatatgtatacttttatgaaagtaattttcaaaacaaatctattcatataatttttatattttcaaactcaataacttgagagttttttatggtttatattcccaaggtttgacttaaatattgttctaaatgacttcctttatgagtacggagggattaattaactactgctcggttctcgaagaaaatggtaaatctgggacgtttcagctgttcaggatcagtaattctgtgcacttgtctgcaggatggcaaggattggatgacgcagctgctagcagtagcgtgcttgtcgcttgctgccaagatggaggaaaccgatgtgcctcaatcgctggacctgcaggtgagacttaaattgtgaattgaaacgcataggttttgcattgaacgatgcagatttgcgttgcaccctgcgtccgttttactgtgggatgatcacgttctgatcgtttccgggtcgcgcgtgttaccgtctgccaggtcggggaagaacggtacgtgttcgaggcgaagacgatccagaggatggagctgctggtcctgagcaccctcaaatggaggatgcaggccgtcactcccttctcctacgtcgactacttcctccgcgagctcaacggcggcgatccgccgtcgggacgctcggcgctgctgtcttcagagctcatcttgtgcatagctagaggtacggccagtgtgcatgcaagaaaattctggcacatctccatgcatcacagaagcttctgaaaaaaaatctaacatgaatgtatatgttcacgcaatgcaggaacagaatgcttgggattcaggccgtcggagatcgccgccgcggtcgccgccgccgtggtcggagaagaacacgccgctttctcccatgtaaataaggtgcgtgtgcagggcaagatgaccagtcatgaatgcaacgttccttccaaaattcaatgcgaaacgttacgcgcacagaagccataggctcaaactgtagccatactacccttaacgctacagaaatccgtgaaacgcatttacagccgcgagagagagaaagctgcacgtaaactggttattaatgctctctgtcgccgtggttttttctttgcaggagaggatgtcgcattgccaggaagtgattcaggccatggagttgatacatccaaaaccttcaagccccagcagagtcttcgtctcctcctccattccacggagccctactggcgtgttggatgcagcaggctgcctcagctacaggagtgacgattcagctgttgcctcacactacgcagcaagcagctggggatatgaacatgatagctccccggttagcagcaagaggaggaagattagcagatgatgcagccaatgatggatcaattaaaagtctgtttatatgtgttgcgaaactgatcgtgcatctctctttcttgggaaagtcaaatggttttgattgcaaatgactgtggagcctttcgatgccgtatgggagctagagcctgaaaggcgatgaaggaccaaaagcaaggcattttcgacatggcaacagagcaaagatactgatggataaagagagtctgaggtagacatgtgctccaatattttcatgtgctttagcgttagttgctaggaggcaggcagccacaaaagagtagaggatttgtgggaagagagccgggcgagatgaaaatgagatgaccaaaataaaggcagagacgaggtgacagtggcacaaggcaaagcgagctaggcactgacactccagatgtcctgcgtgtgtttcagttttgcgttgttctgtaatttcccctgcttaattcctttgtgaagaaaaatcataaaaaaggagagaaacaaacaattttggtgtcaaactccaataattcagcataactaaactacaagaagaagctgaagcaaaaaaaaaaaaagaagataaaagtaaaagacatagacaaaacccataagagctggaggagggtttcttctgatcatttctgaggtgttatgaacaatcaacatcacatattcacatatgatcagttcccttttgctttgtgctagtgcttacgactatcttgctgccaccctacattgtttgaccagttgtctgcatggaccatggaattcgcctctttgcccttgaaaggagaagggacattgtctggagaaacctcgggaacacaaacataaaaatagtgctcctactagtgccatacaggagagttgagaatatggctaaagaaattaggttggtcctttctctggagttaaagcttctctgctcccaaactataaaactgctagcaagattattccttcctgagttggatttctttttcaggtgacccattttgcgttgtttaggttgcttgttcgccatatgttccaagtaaggacacttaactactaataatgcaatgcttccagacaagcatggctgtaggcaacaataaagatactgttcagtgcccttttcaagcgggaaagatccgccactttgacataggagtattattgttcaattttgggagatcatagggtttggtttggtttgaggcctatattggccttaccaatatttgacaatttcaatagtgtttattgtctatttggtttggagccaaattttggcatgcctaagaaaataggccatttcaacagttaatttaggctattttggcttcaatccaaacacaattttacttttgccaaaattagccatgtcaaaagttgccaaaatttgacattgacaaaaattggtaaggccaatttaggccacaaaccaaaccaacccatagagtctgtttgtgtatatatcactcttgtgcttaacaaatatcaaatgcccacttgtcatttctattctaaattttagggcgcaatttaacttaacgcagtcttttagatttgctactaccacaaattttccatgcatttcatcatacaacctcatcccaacgagcatctccaacagcctctccaaacacccatttagcaatcttgccaaaaatttggggagtcaaatttgccttttactccaatagcatgcatctctattatcttctccaatctggtagtgggtcccacatgttaatttctaccttcttcccctctcttcctctacagtcacacctttccccttccccacctccacccacccggcgccggtggccctcttcccaaccggcggatgaggaggcggcggcttgaggcgagggggcgggtggatggggagccggcggcggtgccaccgtttcacgcgacgatggccagcgccagacgacgacgacaggcgcatgaggcgacgacgggatctaattctcgctggcctccctcgccgccatgccctccatcccgaccgtcgtgccctcccttcctcgctgtcgatggcgcaaaccgactctcccccggcgaggaggtgattcatcgccatcgtcaacgagaacccgccgcacgtaaactggtccacctgctcgaagtcagcggccgcaaggggcacagcggcgtcggccatgacgagctctgccccggtgttgtttgagagccgtcgagccgccccgtcgtcctcgttgtcgagctgcgccgatggccgacgccgaagaaggaaggcgatggcggcctgcaggggcgacgacggctggcagggaaggcgacggccggtagggtcggcggcgcctgcattgacactgggccggcgggcactaacgaacggcgacaacggatacgagagagaagaagcagagagagaagcagcaggtggcaaaagcacgtggggcccaccattagccagtgacttcgactggtcaaatctggctaggggagggagtgttttggccgccatcccgctagagaagctgttggagaagttttttttttttttttttttgctagagtgactaaaatttggcttggagaagcaattgaagaggctattggatatgctataaggatacaaagtgctgatactgcctaattggttatatttttttgtttttttgcctgcggcttattagccgaagatacaagaccgaaacaacgaaaaataattaatgctaaaacatacatgcacataaaactagcatgcagaggaccagcaactttcatttattttttcttctatcgttattttctactaaacatggagatgaaatcaggacacgcaaaaataagaaaataattagtgcatgattaaataaattttaattattaaaaacatgaaatttaatttatttgatattttaaagaaatttctatatagaaatttttttgcattaaacacaccagataaaaaacgtgctaatagaaatcgaggtaaaatctagtagtatatcttaataagaaaacaacaccaccttttttttttttgcaaagccacactgcctaggacaaacaaaatgcctcaccaagcaaagtgagttactaacttccttatataataattacatttttaccattcaaattttatcaaaaaaaaattatatttctgataagataggaccgaacaaatgtaatgtgtatcccaaccttccttttaattaagtttacttatgtgatgtatgtctcaaccttccttttagtcaagtatgcatatggaatatgcgcatgcagtatagttattaaatacggttattgtggtaaattgtgtttgccgttaatctat

SEQ ID NO: 16072 - DNA, 10082 bp, Oryza sativa
aaaaaatgaggtgaaagtaaagtgaccgtagctcaactggttagctaggttccttgtggtggaaccaacccacccaagttcaaatactagatttgacatgggtgctcgcatttacagctaattactctttcagtggtaggcaacgtaaccgtcgatagcgaggcgcctgtggtgacttcgtcaatctcaagacatgccggcccagtcttctggagaagctcataggggtagctagaggcgcctgcggtgacttcgtcaatctcaagacatgccggcccagtcttccagaggagcttataggggtagagtgtgagcgcctgcgtttgtactgtgtttctaaaaaaaatgggtgaaagccaatgaaaattttccctaggaagggagggagtaaatgacaagaggcaacacaattagagcaggtacaataacagactattagccagctataaacatattttaatgagataaaaaatgagagagaagagcagcgggctacagatctgtagccaactgcagcgcggactccaagacgcaatgtgtgtatgacatgtgggaccatatattaatagtatattaattaactattgtatgaattggctattagtttggtgaattggagctagtagtgggctatactattaaacttgctcttaggtgaccttgagaacattatgaatttaggctcagttttggcagcccaggtttccaacgcaaacagtcgacatggaaaacggagcggtccattaacgcatgattaattaagtattagctaatttattttcaaaaatggattaatttgatttttttaagcaactttcgtatagaaattttttgtaaaaaatgcatcgtttagcagtttaaaaagcgtgcgcgcggaaaacgagggagaggggatgggaaaatggggtaccgaacattagtaacaaaagcaagagtgctatcttctaatattgatcttgcattccaaacacccgtctatataattgttcatatgttttttttccaatcttgcactatatattttcttttcctacgtttttattgttgtgttttgttcctttgatccaaacatctgccacctctctagctatctctatccggtcatgtgttgtcttttgtcagaacaaaccctctacaaaatatacagataaaaaaatgttaccttgagtgaaattgtcaattaatttccagatggacttattgctgaaatgcagttgtgaatttattgacgcagcattcaatatcgagtgcatcatgaactgcccagaagaattacgagaccaacaaaaagggtcccaagctggatacatttctacatgagaaagactacaaccaattagaccatgcattccaaactagtagtagaaggtatggaccaaatgtcccttctgaaagagtcaaagagatactatgagttttggagctggtaacttgttcttaaatgtcatacagtatattgtaacactattagatggagggagcaacttactacaaaatcatggacatgcaaatctacttttttttgagtgggacatgcaaatatactgaaacataaatctagtgaattatgttttgacaatgcaaatatatggccatatgcagtaaacatatacattgtcaatctgatagtcaaaacttacgaattaagttccaatcctgaaatacatatggccctaaaaatttggatggagagagatcacgtgaaaaagaatctgaactgtaaacataatggactgtaccatagtatgatccagactcgcgtgctcatggcaaaacagtgaacttgcactaatttggatctcagttttggcgcgcgtgcgagaccaatcttagcaaggattctgcaagatccacttcattgaggccatcacatgcacgtatttatggccttcgtcggcattgtataacgaggttttgatcgatctccagttcacacatcagtacctaacccctcttggtcaagccttggatgaatacattaacttttagtctatcagaccgataagtttttctatctctggctttctaacaaattgagtagcgtttgaataatcttctctgctaagtatttttcaaagacattgccacacagtgacaagatcaagcaattttatttttctgaagtgtaatcggttaattatcccagctacgtcgaagagataccgtttcagaacagtagtaccacacaccttccatccgtggatgcaagtacgccccacgagacatcaaagaacttattcttctcatatggctctcacgcgtctcgagattcgcgtcaaaccgcgacagttcaatccactttggctgtaaaattcgtcagaaaaaggctcacgaccacctgctcggatcaacaaccgaacaacgcacaggggataaatgcatctatacactgcgcgcagaagcagaacaaaacagaacgccgaaaaagcagatgcgaatgcgacgcccagttgccggccggccgatcgatcgatcgatgcatcgacggatcaattcacttttttcttgccccggccactgccaggggaataaacgcacgtcgcgccatgccgtgccagctcgaaactgtaacaaaaacgtttcatccccccctcactgcgcagtagcggcagtacactagcactagtataattcagaagcggtagccgtgcccggccaaaaggacgctgcagtagtaaaacctggctgggtcgcgagatgggatcacgcgacgatagcgagaccggtctcgtcgtcttgctcgtcgtcttggacgtacgtacgcgtcgtccccgccacggcgccacggcagacggtgggtctcgccggccggcatgcagcgtggtcaaatacgttgccgggggtagcagtatagtggccggtagggtagaggcaggcccagtgttcgtttggccccagggagaatataattgactacacagatgatggcatcgatcgtctcgatcaggtcagagcatgctgatcaatcggacaattgtttggtcatcatgggacacgaaattttcggggcctttggggaccgaccctttggtctgaggagacctcgaaagttgcaccctttggtgaaacaatggactcggcagcagccacaggcacaaaaatggcaggctcgcccaatgacagcaacatcagcgtaccgagtgccgagtgtgttcctttcacgtcgtccattgctatctggttgaatcgtacggccgacaatgggatggatgatgtggatagagtgaacgactgcaaaacacagcactgtacttttcacctttttatccttttagaaaattaactctacaaatagattcctaaaaaacttattctaagaataactattttcgcgataccaacgttactgatgccatggtccaacatgatggcgccaatagcgttggcatcgtccccctaacccctagttaaagctaagccactaatgtgaaggggaacgatgccaatgtcgttggcactgagagtctatatatatatatatatatatatatattaaaaaacccatttgtaataaaaaaaatatttacaaataaatcctcatcatcaacgtagttgacattgaggacctatttataaatagttttattttcaaataggtccattttcgctacaaatagttttttttattttctaacaaatatgtcctcggcgcaaacgatattgtcgccgtccccctcacattgttgacttagctttcacaggaggcaagggggtatggtgccgtcatatcggaccacggcgccgatgatgttggcacagcaaaaagggatcaatcctagcataagttttttaggatctatttgtataataagcttttcaaaagaaccaaaaggtgaaaaatttaggaacacagcacacagaagggcacaaggggcatcgtgtatgcatggtggctgtcgcgttggtgtagcggtgtagtcacgtctcaggactttgactttgtagtgttgagtaacaaagggagcacagctgcacaggtgatcatcacccgagaatagaggtgaaaatggtcggaatcggtagcatatcttcggaaacgacggtcgatcgaccggtaattaaccatattaatcatttaaagtatatcgtgtcaacattaatacaatgcaaaaaaaatagaaaaaacaaaatttataaatagccaaaaacagtgcccctgaaaacggcgctcggtcgatcgagaatttccgtgactgttttcacccctaccaaggaagaacgtggataaatacacttgtagattaaatttgaccatgtgtctttggccctgttcggctggcagtgtagtcaactacaatagcaagtagcacagccatgcacaacatgcatcgcaacctcagtgctgccacaaagatgtctaccgaacacactccttttttccaaaaaaaaaaaacaactatatgaatggccagaatttcatgatcttctttctaatttatgggaatgctaacggatgggatctcatccccagcatcgcacgcggtatcatcaggatcctttgcactactaaagcattatccgaaccccatgaccatgttccctatgtggcagcgtggcaggagacgtcgatggtgagttgaggcaacgacaaagcagccttatgatgatggccatgaggttgtcctatgtggtcctcgtatgcccctacggcacaacacacacgaacatgacttggcaatcgagcgcctccttcatggtgatctccactaagctactgtggtggatctcgccgcccactgcgtcgtcacagattaatcggcccaagtacacggcaagctcctcaggaggaaaattgagataggaagaagcagcaagagggttagggaaggaacaaggggcgtggtcaccggtgcatggctgggtggaggaagttggggagagacgggggctcacagcacctcaccacaaaggagcaccacaattcgcccactgacacgcatcctgagctggcctagagtgagtaaccgatgcggggaatcaattcaatggaaagggatacatagattgtactgcagggcgcaggtatttgtcttggtatcccaaaagtattaggcgggtacctccatagtatcagatttgggaaccgtaaatacgagatttgataagaaaatactacataacaatatcccgtttggacaggatgataactcgtatcatgtcctcatacctctgaggtatcatatcctgacataatttttacctataaattatttttatcgttaataagagtataatctaactatagacaaatcgatgggtcgactgagtccacttcatgcgaccatattgttcttcggcgctatatatttgaggaaatgacctgattgtatcggaaaaggtcagaaaggttgaaggtagtaacagaaaggaactctggttgaaaaccacttgggattgattaaatttgagccctttaggctctgggcttgtttgcaatcagtaggccgcaaaggaagtgggctgcccggttggtggccttctagcaaagagagaaattatataaatttaattagtatgtgtagtgtttattgacagtcatgatcactttggtaatcacttttagctgcctcaggtacgatgctttttgtcacaaatatgaacacatgttgtgcagagtactgaagagaggtctttagaagcttctttttttcaatttttatgaaagatatatatgacttcctaattaattaattaattaatacgtcataattaattaatacgtcatcagtttaagtgaaaatcgatggaaaaatattttttattaaaaatagtatactttttagtacatatttgaccgtacgtcttataaaaaaactttcatgaaatatgtaaaattatatgtatacatataagtatatttaacaatgaatcaaatgataggaaaagaattaataattacttaaatattttgaataagacgaacggtcaaacatatttaaaaaaatcaacggcgtcaaatatttagaaacggagggagtataaattagttaatatagatcataaattgataattaatggtataaaatgtagttgtgtaacctttattttaaaccgtgtgtttttaaaaataatggttctaaataaaattatgttatattgttaatataatgggtaaaataatagattccaaaaaaattttatttccaaagattatggatctaatttatttacgtatatattgtgatatatatataatctatgtttataaagttatagttctttaaaatttaatatcactaattatagttacgatctcatctatatatgcatagagaaaagaggggaggagatggaagcgaatgtaatttttaatgatatatgtaatatatatttatttgtttttaatcgtacgttgcattacagttgtatatgtattttttttggctttttgtgagcagtatgtaagtacctttctctagtcagtgcgctgagagagattaggtgtgaggttattaatagatttaatttaatgatctgagataacagatatactaatttaaataaaaatcgatgagaagttgttttacttttttcctcatattttcttgaattttttttctaatctattaaagtgcattttagaacttaaaatattaacagttaatatgtgtattaaattattaatttggttttctatctcatctaaccaagaagaagggaaaaaaggttaaaaaaaaaagagagtactatgtatgtatgtgcacgtatatggaacagtggaacattttttttacgtgcaaatctttcacaggtaaacatagttagaaaatctgaagatagatataggtgttagctaaaaaataggagtagttaccgagaaaataggagagagaggccggagggagggaggtatagcacgaacctgcacatgccgcatatatgcacgatggggatgagggctaccggatttttgtttcttaagaggtctaatgattaaaatatatgggtccaccgatttaacggaaaatcaatggctatatgtttattaaattttttatgatattctatatttaataaaagtgccacgtggcaactcgaaagtgtttatagggtgacacatggcggtttaaaaccgtttgtaaaaagtttaatagacttttagtatataatagataccaaatatttaattaatcatccattaatagatgttttgttttgcgtgccggggagaagccatggaagctacaggttttgtaccaccacctttgccaaaagtcgtcgcgcgacggcaacgaggaccggcgcggcctttgtccgcaacgttgcattccctccaccagcgccaaaactttcctttttctaatgaggcgaagccgtgccgtgccgtgtagttcctgcccgacccagccgtccagcctgcgttcccgtcacgtggcaccagaaaacttccccctccgctccgcacgctacggactcccgacaccgacaagaaacgaaccaaccgcgtgcgacacacaccggcgcccgcacgtacgtacgtgcgcaacccggcaaccgtaggagactaggaggaccggtgcaacagaagcgcttacaaaaaacgggcaggttaggtgactcgtcccgttccggtaaattatattctgtcgaacgctacgagctgagctgttcgcgttgccagaagccccatttgtttcgcgatacgcgcgaaacaaatcggcagatacgaagggaacattccaacctcctcccacacggctccaccaagaggcgcggcccgctcgatccgctgattcaccagcgtcggtctggtcgccgagtggcaacggaggccaacccctacgcgatgccgtcgtcgagtacgtccccggcgcggcgctcttggtcaaacagagctttgctacccgctgcgtggcttacacagttcggttgattgctgcggtgcaggcaggacggagacggtgaagaacgcgctgtcgcggtgggcgcggagagtcggcgagacgaccaggaaggccgaggacctgtcgcgcaacacatggcagcaccgtgagtaccgtttcgtgttccctcgtcgtcaatggacgaaatttgtcatagtcgttatcgattgatttccctttgtgattatcgatggcctgcattgctccatcgattctgcagtgaggacggcgccgagcatcggggaggcggccgtggggaggatcgcccaggggaccaaggtcctggccgagggcggccacgacaggatattccggcaggcgttcagcgcgccgcccgacgagcagctccgcaagtcctacgcgtgctacctttccacctccgccggcccggtgatgggcatcctgtacctctccacggccagggtcgccttctgcagcgacagcccactctcctacgaggccggcggcggcagcaaaaagtggagctactacaaggttcgtacagggtatataaacatgtactaactgtgcgtgtgaatcgtgatgataataatacagtacggtactccgttgttaatggtgagtgatggcctgatgggcaggtggcgattcctctgcacaggctgaggtcggcgagcccgtcggccagcaagcagaggcccgcggagaagttcatccagctcgtgtcggtggaccgccatgagttctggttgatgggctttgtgaactacgacagcgcggtcaagcacttgcaggaggctctcagcggcttccaccacctgcaagcgtgagtgcgtgacaggcggcatcggcatttgcccgcgctaatcttcgttgttcgctgattgacacggcgtgatttgtgtcttggggtgtttgtgctctagttcttcttgctgaggatatgtttatgagtgcatcggtcacttgagattgtttgggattgcggatatcttcgattgtttggagatacatgtcacacatctaagattcctgaagctcttcacttaaaatcttataggttttggaaactgtggttgccttattttttttttttgagagaatagccaacatgatccttgaagttttgctccatgatcaatttggtccctaaccttttatattgtccaaacgagtccttatataatttgtcatgtgggctaatatagtccttagttccacttaaattgccacatgagcatgccatgttatgctctcatgcaaaatatatggtaaaatgtccaatttacccttccatgtaccataaaaaataatgaaaagaatttacaaactttattcaatgtgactggatatatggcaaacttttttcattggattatgctaatacaaagttaaattagctacaaccactaaatatataattatcatgccaaataaatttcatgtaagtagttgcatttcaatgttaaaactctaacggatatttaatatgcaggatcacctacttctttattattattatttttctccttttctttctctcttttttccctatgacgatacgtgtaagggaaaattgggtatgtcatcatatatttgcattggaagatgacatggcatgtccacatggcaattttcgatgggccaaggactgtatatgtccacatgataaagtttaagggcttgcttggataatttgaaaagtcaggcactaaaatgatctcaaagcgaaacttcagggaccatagtggctattctccctttttttaaaaaatactccgatgaacctacgaacaaactccttttcaggcagatgccaatgaggacgagtggaatgaggcaccgaacacaaccgaacgacaagggtacgcctaataggcaggtaatcgctgggagtgatcacccgccctcccctatattgtcgctccctcctcccccctccccctttctccttccctttttatcttcatactacatcataaatatttaaatttaaattcagaattgaaacggttatgtaaatttttgacttataaactttgggtctataaactaatatttgaattcaaattcaaatttgaatcgggtatgtaaacttttgacttataaactttgggtctataaacattagatgtataaactttagatgtatagaaagactatatataaaaaatatttgaattcaaattcaaatttgaatcagatataattcaaattcaaattcaaatttgaattggg

SEQ ID NO: 16073 - DNA, 15281 bp, Oryza sativa
cccccctccccctttctcctcccctttttatcttcatactacatcataaatatttaaatttaaattcagaattgaacggtttatgtaaatttttgacttataaactttgggtctataaactaatatttgaattcaaattcaaatttgaatcgggtatgtaaacttttgacttataaactttgggtctataaacattagatgtataaactttagatgtatagaaagactatatataaaaaatatttgaattcaaattcaaatttgaatcagatataattcaaattcaaattcaaatttgaattgggtacgtaaacttttgacttataaactttgggtctataaactttaggtgtataaactttagatgtatctaaatactatatataaaaaatatttgaattcaaattcaaatttgaatcgaatatatttcaaattcaaatttgaatcgggtatataaacttttgatttataaactttgggtctataaactttaggtgtataaactttagatgtatagaaatactatatataaaaaatatttgaattcaaatttaaatttgaatcggatatataaacttttgatttataaactttgggtctataaactttaggtgtataaattttatgtgcataaatttactaaaataggaaaataatgcggtgtcaaaaaaggaaacgtggagggagggagaggggaggggtggcgattagcgatcgatcgcgcattagagtttccggaacggcaacctatgttgggctgaagcagattattggccattgactgggctatgctgtttatggtccagtttggcactacgtagtctagtttaggtaataagtctaattagcatcccacatctttgctcccaattgaattgcctccctgaactataaaaccggatatgacgtctcttccaactacgaaacccgatgcaaatcgactccttcagtggtttgagaagtggtttttactaacatggcaagtttactcgctgagtcaacaagggaacccacatgtaagcaattctcctctcttcccttctctcttagggatcacttatacatttgtcgacaaatttccttttaaaaatttgacaaatgtaattatggtacaatcgggatgtaattatactaacttgcgtgtaactacaatataacttgtatgtgactttcaaaaatctctccgtaacatgctattttggtgaaacggaggttgtggaaatgaattctcttacatgtgtgcgtgatgtgacattttctccttcctcacttgcacaaatcttgaaataaatctaacgattcaaaattatgtgaaagttacatacaagttacattgcggttgcatgcaagttacagtgtaattacactacgattatactataattacatctatgaaatttttaggagcaaatttgtcgacaaatatatagcaaaattgtctctcttaaagacagttttagtaggtgggatccactcgctaagttactaaggccagttttagttgacgtatcacctatgtaaaagtggcactggaagaaaataaaaaaagaacaaaaaaacataaatgagacccacctgtcatgtaaaaataaaacaaatatgatgggcttaagaaatctgatattgtgtcattgtcacaagtgggttttgttgaaatgtcacttcataaaaatatcattcttaagccatggctggattatgtttcttatgccactcatggatcctcacgcgtactagtattatctacatgctttaattaggcccaactcatttatgtgccaaaacgtccattgctggctattctagttcttctcaagaaaaaaataatgaaaaaaaaatcacatatgaaaattacactgagagaataaaatatacaatctttatatggagggaaaaatgtacagacacgaaagcatatagaaatcataaatatcttaataagaaagttgatgtacaacattggtagttgtttcaaaaacttttaaatataactacttcctccgttttatttatattataagataccttaacttttttctggatcaaactttctaagtttgattgtatttataaaaaaaattagtaactctataacaccaaatcaatttcattaaacctaacatttaatttattttgatactatattttttatgttaaaaagtatctatatatttttctataaatttgatcaaagttaaaaacatttgactttgaaaataagtgaaaacattttataatataaaacatatagagtataatataattggagtgtatagttaaaatttaacttccatataactcatctgcagctagacaaaatatttgtgtagctttttggcatagttttaaatctctgaatatagctatttgagaagagtctagctattttctttcattgttttggtagcattaattacgagccttcattaacctagttgcgcgttgaaccgccctctccaaagcgcgattgcaaaatttgtcgattgttttctagcaattttgatttgaagtaaagtcgaattaccttgtcccattgcttccattttttttaaacaccttttaccttcgtgtgcttccccacaaacagtgcaatatactgtttgatcacaaagtgcaagctaaggagccctgttagtctgccggatcaaggaaccttaccatgaaacacaaaacctaacaatttgatctggtgcagcagataacttcatggcgctactattccttcaaacggacgaacagttcattgattggaaccactaggctaaccagattgaaccagattgtcatgcgcacgaccgttcgtacagggaccccctgacttgcgctgacgctctaccagcccgatctgtcagtcctcttcccgcacgtacggttgcgggcttgcggcgcggtggccataggcctaaaggccagtgaccacaattgcccgtaccgttccacacgatacgccggaccacacaacgaacacagcccataaatcgatcggcgcacggggccctggtgggtctcgcgcacacgcacccgcgccctatcaaagcaaccgcaacgcgtgcaagcacagccgtaccgtgcgcgacgtcgtactggccggcaacccgacgccgcacgactcggcgaagaaagcccaaagcaacggctcgcggccgggaaacgccggcgcacgcgtcacggtcgtttcgtccctttcacccgcgcctttccgcgcgcgtcgcgcggactcgcgcgcgggcggcggcacgtacgcctcgccgtgatctggtatatggtctgctgttgcgtgccttcgtgcgtgctcgcatgtgttggtgttggtttgcctttgccacggtgtgtgttggtctcgcgtcgcggggcgcttttttcggtccgttcgacgaataacaatcatgagtggtggcgaccccgggaggaaagagagattcttctgtgtctaccgacaaatcttgccgactccggtcaatggcgcagtcgttgcacgaccgaacgagtaggtggtgatctagagcacacgacaacggtaggtatatgctgcatctgcatgcaacgaaggtcgtcgcaatgtaccatctttcctacggcggtaagaaagcatcatgtcttctttgtcgtcaattttacccggaccttttgggcacactctgctagctagtgctccgatcagagctctgatgaagctacgaagcaggctagagagtagagagagagcaaggaggccgggttattgcacacctgcagtcgcgtgcacggacgcatatgggcaaatggctgagcccatcctgagcccgtgtgtgctttatacgtgctctccaactttctctcggctcactttccatgagatgcacctgcactcgcggcatcaatgtgcagcagttagcatgcaagttgcaggacgggccggggagggagaaggcgctcatgattcaaggacgtgcacgcaccattgccgcatgcatgcattgtccgtgacagtgtcgccctctctgccctcacttttgcaccgtacccacgtaggccaaaaaggaagagaggcctacagtcttgcactgacaaaggcccccggctctctgcatttgtcgcctccgtctcagcttaaacttagctagctggtgtcatgtgtacctgttttcgtgaaatttgattacaaaaccagcaatggaaaataaggtagacgcggagttaactagctagtgcgctgatgggttgtacttagcggaaaacgtttctgtttttaatctgaaaaaaaagcatgcttaccaacaagcatcccacatgcaatctatttgggaaacgtctcatgaacactcacatcacgtacgtctggtcgtgattagtagggcctacgattagatatctcaaaccatcacctcagtgttgcattatccacacaccatcataagctaaacagggcatgcacaagggttgacttctttttttccctcctaccatgcatgcatggtcaaagtcaagtgtaccgaaaagctaggcctggtttctgtgtggtcgatcggtgtcattgttttttctcctttccccccttgagatagagagagtgagatcagagactgatcagtttgagctttcactgcacagtaccagctaaggtctgagccatatgttgtgatcacgcctacgccaaagttgcagctacgcgtgaatgatcaagtgcgtgacccgctgttaccaatttaatcgtgcatgccttgtccctgcagggtcccacccccggcacagtgtctttgactggatcccttaactctgtcgagtcattgtcagcaagaaggcgacgagagtgcaacagtatggtgattagtacaagctaagcaagcaataagcccttcactcctttcgcttgcatttggagcaagccgactgatcgctacatgcatgagatctagactgattgggattttgtggttgaacttaccattgcatggtggttactactgttcatcagaccgaaaggaaagccccagcagaatgcatgatccctgtatatacaggtacagcgagctctcttgattaattggctgactcctgcggtcgttgtagagtcttattcagatatataattcatatacactactatactaaagtcgcaaacatgcatgcaaaccgggaccatgtgtctctgatagaatttaaacgaggtttggtgagccaatggggatatatgtatcagtgctgacaaacacatgcattgcacgctcagatttcagaatcggatcagcaaagtacgtactacaactgtttgtaagatgttaatttggcaaaaaaggacacgctgagggcctcatgaaatgtaggagtatacagttgtcggcttggcgggacgacagtgaatttctgtttactgatcatgtagggtgaaaatggcagcactgattaatcaaccccaccggcagaattgcacggccggtgtgaatgattaattgcctatagttcaaacagtcctgggcaattatgtaactagctagcataccatgctttattttgaatctgatctgtttttttatagggtttgaaagaagcaaaacgcctggctaatttgtttcatacctagagcaagatttgcaacaaatatatatccgatttttattgctatagcttctgcaacggttggatgaaaatactaacgatgccaagcaatgttgttgccatttagtaccacgtcatggaacatctttaatttttgacaacgacatgaacatctctgtttaacaacagcttgctgattgtgcatgatcatctgcatgatttgtcatgctgatagcagataaagacttctgctggagttctaaacaaccaagcaaccgtattacaaaacaaagaaatctactcgtactaaacagtagggatgaaaacaatagccaagaaaaagctatccctacctgtcccaaaacggaaatggtacatggtccggattcggcttgttgccgtgttggtggtatacagggcaaagcagcgtggcaatatattgacgatgcagtactgtagcatgggattcagaatgcaaaccaacctcctcatctgaaaaaacagtgacatatttgattttcctaaaccaaagtgttcaagggaccacaggtgttttgtgttcataaatgccgtctccaatgtgcacactaccgagtaggcagtgaaaccacacaccacctgggcatgcatacacgcacttgggcagcaacttggaccaggcgtccaaatgaccatagctgagtatatgttgttgcgttctcttttccctgtaggcaccacaccactgcatacttccatggcaccaggtcagcacctgggctagccgggcccacctgccagagtgccagtggccagcctgggcagtttctgtgtttgagaacaaaactttgcaaccttcaatcagattctgctactacctgcccctgccaccgcccagtggccacgcctagcctataatcctagtagttgcacaacatgctatagcctagctgcctctttgatctgcatcatggcatggacatgtctccggccggtccggccgtacagtcaggcatccacgagacgccggcccggccggccggccagcttccatttctccaagcctgcaagcgatgaagccaaccactactagctcctagtatagtacatcacgaggaggaagagacggcgagagaaacgggggaaacccggaaaagtcactgtatttttcggtgacctgctgcggtgctgttccgtcgctgctgctcccgttaatttctctggctacgcatagccaccggcatggctgcctcatcttctcttcgcagtgtgcactgcggggcaagtatccaatacaacgatgtgaaaatcgaccgagggactcgtcttaaatttgtccgcggtccatggctcgccgtaataaatgcaacaaccgcatccatgtagcatttggccaagacggggagagtaaattaaagcgtaaagctctagtggcagggagcgagagaagagacgagacggcagtggcgctgcatgcgctgggtgcacagagcatcatcagagagtgtatatctctgaaatactactgaaactgtcgccagttcgtcacacccttagcttgctgcgtgtcaagaaaatgaaacctggacggatggatggacaatgctcgcggaatgggggaggagttaatgcggtatagagaaggagcaaacggttgcgcgcattaatgcaagatcaaaaaggagcgaaaaaaatgggaagaaaacaacaaaggatcacgtcatggagtagacctggccagtgcaagcatcaaactgaacaccgatcaaagcagtagtagtaattggtaaaacgtcatggttgtttcgagatttggaagttgttaggcactagcattaatccgatcgagcacagttaataaactcatgccctgatggagaacatattaccacaagcgtccgggaacgagttcggaaatgttgtaaatgaaaagatgaagaagaagaagacaagttgggagagaaggaatgcaacagtggcctatcttttttaggagtggcagtactccgtagtagccaacaaactattgctactagcaaacctagacgaatggcccgacccatgggtaaaattatcccagcgcgcaggtcccaaccacaaaaaatataagagcacatacactgaatccatgcagctactctagctagccccaatccccagacacaattcctcacctgcgctgatcgatcacttgaaacatcaggtacattcccaagaagaaccaaatcggcaaatggccaagccatgcataggaattaaacagcacgagcaacagttaaaatgaaaagaagaaagaaccacctactagagccgagaacgaatgctctctcagtctctcttgctacagattaacctaagccaccaattaattaagtccaactctaaataaataaggttcaggtacctaccataccggggtccgggtggctaagccacggccggtcgatcagctcagctagcttgggatggacatggatgcatgcgtcgtcccacaacttggtcatgcatgccgacgatgagatcaaatgcatttgctcccggtcatggcagcttcttgcccagggtgtgcttgttgttgtgcatccacaccttgagcacgtggcgcttgacgccgacctcgtcacagaactgctgcacggcggcctcgtcgtgcttctggatgcgccacccgacgcgctcggcgaacgccagcatcttgtccttctgctcctgggtgaacttggtgcggaaccgcttcttgccggagccggagccggacgggccggcgccgagggacatgccgctgagcggccccaccgccgacatgggccccaccatcccggacaggtcgtcgccgtcgtcgcggccgctgtgggaggtggacgggagcgcgaggggccgctgcgggtagccgccggctgcggcggcggcggccgcggctgccgcggccatgtggtgctggtggtggtggaggtaaccggcaggggtgcggtagtacggggagaactggtggtgcggcgtggcgccgtaggggacgacggcggccgggagaagggcgagccctcgccggcaagcgactcggactccttccggtggaagttgcggtggcagttgcacgcggcgcagcggagcgcgtcgatggtgccctcctcgccggccgccatgaactcgccgcagccgtccacggcgtggccgccgatgccaaccgcgtggttcttgaggcactcgcggtacctgccgccaccgcagctggggcccttcacacggctgccaatctcaccaggaggcttgggcgccatcccaccgccggcaaggccatgctgcggcggagtctcgtagctcgagctcaccggcatcggcggcatctcctcgtcgccgtcgtcatggtcatcgaagtccatggtcgccgtcgccggccggccggccggcaagcttgtctagctagctagctacctagctaggaaaacacttagctttactgtcctagctgctttgtctagtctttggtttgtgtgtgttgctgagcatggaaggaggctaagagaagctttagcgaggttaagaccgagatgaagggataagagatgcagcagagtgtggacaccatctggctgccagttttgacgcgccgctagctagcagcggcagccaggcaagccgctgctggctgcagcaagcagcagcgcctaggtgatgatgtaactttgtttctctcgctctctctctctctctctatctacagtatctctctctagatagcaaactcgctttctccatttctcctcctctgttcaccgcttccctcaagagtcaagccgaaatgcgctagagcttgtctctgaaccatgtatcgtgttgtggagtatgtgcttttgcttcgccgcgagcgcgcgttcatgtctttgctgtccctttctctacgctcttctcttttcaagtggtttggctccaacgccttttaaattgcggtttagaatatttgatcgtgacatttggtctttcttttttttttcgccttttactcgaatcaatgtgtggcacgcattttttcacaaatataattttggtcaaatacatatatacttgaagtaaaacgagtgtttcccatgtttcttacaaaacaaatcgatttttagttaactatgaacttgaatatgtctatgtccaaacttacggagtatagttaggaactgggttcttcttgacaagggcgtgtgacgcatgcaaagtacattgcaccacattgaattcaatttgttcaaggtaccgcaaactacaaagccgaccaaactgatctttattaacagttgtcgtatctgctactagtactgtaccaaatcattttttcccctaaaaataacattcagatgttcaacgtactgtgctgtacgtagtaatgtcctagccagctgctttcaagggatgtaaatcacgccctccatgcatgtttctgtagtttacatttcagctggagtgatgcatcaaagtcaataatcagctactttaatttcaactggagtaatgccagcaacgttaacatcgaatcgtggaaggcatcattttcagggcctagttgacgaaagcaaaaaaacaacaaccaggcctgcatgcaaacaaaattctccacagtaacaacgggaaactgttacagccacgcgccgtacatttctatatagtatgcatgaatcggctggatacgttggtgtgcgccactgaaaaaggttcatatttgtcgatcaactatagccttgttttatatcattttcccttcaaatacgaaaaggtttattttggtctcttagctacaaaatcgcaccatgtttaaatcaggatgctgttttgatgacattgcgagccacgtggtgttatagttaacaatttaaaatagatcatatacataaaatatacttcctccattacatataataaattttttttgacttttttcctagtcataccttttctattttgataaagtttgtagaaaaatgtagcaacattttcaacacaaaacaaacatattatcaaaatatatttaataaaattaatttggttttgtagatgttgttaattcttttataaactttaatcaaacctaaaaaaattgataaaaagtaaagtcaaagtacttatacctgaaacaaagggaataggagaaaaagagtaaaatgagatgatgtgaaaaaaatgataaaatgcagataaattgaagatgtttttttttttggtgtgaagttggagcatccaacaacaagcccgaaaagatgaccgttttgtgaagtcaaatatgttgtgttgcttatgcggtaagcttgacaatgatatgatgctatgtatttgagctccgttattgtttgttgtttggtgggtggggtgaattctgcccttattcataatggcctacttttttgctagactattcccgtctagttgtttttctcttttcttataatctgttcgatttttatttttattaaaatataaataacagtccttatgctggtatatttttttaaaaaaataagggacgaatagtaaacgatctcatgccatgacatttagatatttaagtaaaactggcccacatagggtcaaacagtcagcgacgaactgaattgactggaaaagatggaggaataaacgcacacccatgcgtccaaatttacagtgtttttgacggttccaaggtgtgtggccggctgatcgataggaaaagcgttggaaatgagaacaaacaggctagtacccctccctacgcacgaccggctccatcgctacatgcgcccatgatctggtccccggccgatgagctcaagccctccattccatcacaaactcgacaatcttgtggcgtgcttacctcgtcacaataacgcccggccgttcatgccttcatggtgtggacttacacgcaacgtacacaccctgacacgcactacgcatggttgatctagctttctttcggtggctaagcggctaatggtctccaattccggccggacttaatagcccccatttaagccatggtttgtcccatccaggggcgcccatgtcacgcacgcggataagctctgctcccctagctaagcaagcaacattagctacgtacgtcctacgtgatgcatgcatctatctcgcgcgccgctctctcgatcgccaggtgggttcacggccaaaccacgtgtttatgcccttgggcttgggcgactgcatgggcggcagcaccgtgtctcccgcgccgctccaccaacgtcaacggcagaaattgggatattctaacgtaaagttagattttttttttcgcaagcgtctaaaaggatcacacgcttatatattagattaacgtaaaattagaggaatatagttatttacatataaacctcaactacggatccacatgttagtgacggtttacgttagaggacgtgttttccacctgtgagtgctagagattatgaacgaaatcaaggcggcagaggccttatctgctgtgataaggagtgtgagagttaagcaccacaggtccacaggctgctaatctggctaatcctctggctcgatcgatcacggcggacggggaggtatcttcggtcgatcgatcgctagctcgcgcatcgccatggtccacgcgcgcgtggcgtcgttggaggcgtggagcagccggccagttgctgtcgatagcggcgtatacgtggacgcggccgccgcgcgccccagtgcggtggttgtaccggtatactccgtattgtacttaaatatttgcgtcctatttcaacaacaaattcatagatttttttatttattaaagaatatatatattatccattaaatatgatgtatatgtgtacgtttataggggtgagtgtgtacatgttttaagtgcctacatttgtattgtatttgtaaaaacaattaatccacatagctgatagaacttcgattaatttgatcactaagggcaagtaaaaaggtagagaccgttagttaaagaatatcatgttacaatagttaagacaatacggtctctaactattaatgtaccaaaatacttttttactagtcatctttcctttattagactcagggcatgtacaaaggcattaattagtgggctctctttattgccatgtaaacatatttaattaggtggaagagagagaaaagagaaaggagatgcatcgatgttttgcatgccatcggcttgacatcggctctcatcgagataaacacgagcacacgagataaacaacgagcgttgtatggtccatcttcaagaaaagtcgcttatttagattcaaagtgcagaaaatcacgtaatcattgctactagaatttaattactgcatatcagtggagagacgataaaaaaaaagccagcctttacatatctatgagcccgtagcgggctcaaccgttgaacgtgccctcagtgcagcaaaaaatttcctaataaatgctaagaatcgactctaaggtgttgtcttgcgtagcaaccatctttctctctccttcttcctctctcttccacgtcatccaatatgcttgcatgacaataaagagagaccgctaataaagacctttgtatatgtcctaatatgatgatgctggtgtttgaaactgaaaaggtgtatagtaccgaccaagtatcaacggaaaacggaaggacatcttgtctacctgtgccgtgggtcccgcggttattgttgcgtccgatttgcttggggcttcatatgcgcgatccggaccgaatccagtttgcgattttcttggtgggcctatgacagcgtcgtcgcatattgctagataactttggtttgtcacgatccatacatcacaacggcgctgcagcatatggaagcgttgctccgttactaagtgcgaatgcacgtgaaccaggttatacggagatgagagttcctggaacaggtttacatgaccaaatattaaattttcacttcacgacaatcgataactatttgaggttctctactatgtatcattccaatctagagatgtttatgttgttaatagtccaaagaatggaaaaaaataataatcaaaggtatatactccctccgtctcataatataagggttttgactttttacttacactgtttaaccacttgtcttagtcaaaaaatttgtgcaaatataaaaaacgaaaattgtgtttaaagtactatggataataaagtaagttataaataaaataaataataattctaattttttttaataagacgaatgatcaaacagtgtaatgaaaaagtcaaaatccggacggagggagtatatatatatatatatatatatatatatatatatatatatatatatatatatctcctatgggactatatttcagtcgcctaaaactacacaatgctatgctgaaattgtagtgctttgcaatgtgtaattctatttcattttaactgcaatatgtcgttatatattgttgtacttaatttttgtgttttttttacagaattttgtaaattttaatgacttttttgtaagttagaataatttattgttcagccattaggtagtaataataaataacaagggaagtgataataatcattgtataggagttgtataacaaattcaattctatattcattttgctctgtgcaaaattgaacgaggaattcaactccattgttttgatataatccactagaataaatctgaatgatcaacgaacatattcaatatacgattaaaattttagcatatatatatatatatatatatatatatatatatatatatatatatatatatatatatatatatatatatataatatatatataatcatcaataacaaacagtaaaacctattacttggtgacaatatgatgaactttagatcgtgcaaaactgtgctggaaatgcactatacaactggagaagggctcatctcccggtttgcaaccccctttatttcctctcgggtattgaaccgggagggagaattcaggactaaagatgacggtctttagtcccggttcaaatacccgggagaaaagccacatatttagtccctgttggtgttaccaaccgtgactaaacagagggtagcgacagcccctccaggtcacctttttctttttttttcttttttttcattgttgatttattactggctagagttaatccctgtattttctcccaaatcgagtgggatacatatccccaaatcaagtaacatcccaaatcattcacaacacaaatcctaagttacttatacacacaaatcaaatacatcacaaatcctaaaaaaaattacacacaaattaaatacatcacatattatacatctcagatccatgcaatgaatcacaaattctagaaattatacatccagtgaatcacaaattatattaaaaaaatggagaacgcagccgccactcgccacggccgccgccgtgcggccgccgcctgcccacgcgcggccgtgccggccgcctgctcgccctcacccacgcgggccgcctgccctcgctcgcctgcgcagagggggagggggagggggagtttaggaataagatctgaggggaggaggagagggacataaccgatcttatctaaatatctcatctgtgacttaaccaatcaaatacggagagaaatatttactcccggttggtaactccaaccgggactaaagataaatctttactcccagttggttaatagtaccaactgggactaaagtggtaatctttagtcccggttggtagtatcaaccgggactaagatccttggccccctgat

SEQ ID NO: 16074 - DNA, 3715 bp, Oryza sativa
gcctctccccaccgctgtcgtcccaagaagggaaaggccggggggagagagagacacgggagagagagggggagaaagaagagaagaaaagggaggatgacatgtgggtcccacaatatattttttttaatgacatatgagtccccacatatatttttatttttttatcctaatgccacgtaagcgccacgtaggataaagacttggtcaataccgccacgtaggcaccacatcagccaaaccaccgagggatattgtttgcaccggttttaatagttggaggagtcgatatacccggttttatggttggaggacatgaatcataatcgggcgatagttgagagagtcaaagtatactttttcctactggtattgatccaattgaaactaaagcccaaacagatcaaatcttacggatgactaggggaccgcctattcatcactcgggtgttttgagaaaaaatcacccagatttttttcttcccttggatttgcatccaacggactacaaaataaaataactaatacaaatttacttacacaatatttttatcaaaattacagtgcacttacatgtcatatcaactaaatttacatatgtaattttagttatataggactgtaattttatatttgaaatcaaataattaatgtaaatttacttacacaatatttttatcaaaattacagtgcacttacacgtcatatcaactaaatttacatatgttattttagttatataagactgtaattagaaaataataagtacatatttacttacacattatttttatcaaaattacagtgcatttacatgtcaaatcaactgaatttagttatataggactgtaattttatattttaaagaaaataataagtacatatttacttacacattattttttatcaaatgcatcgcgtgctgcggcggtgcgggtgctggccacggacccggatccaagcggcgtcgtgtgtgcgatgtgatgtgaacggggaacgagtgcgggcgtggtcgtgtggggcagtgagtggaccgggattggagttagcaatcagggttaggcatgatgatgggctgctgggctgttcgtgggcttctatgccttgtgcaaagatcatgtggcaaaaaaacgtcaaatgccaggaaaaaaatcacgcgggagatgtttagcaaaatcgctagcgctaagcctctcttttattagagccatacgagagcccacaaacatgtacaacaccctatcttgtgtccgttctcatgtctgctcactcactttagactttgttgaaatgctaggttcaataattcatttagttattagttactagcagtactatattcacaaacaattgctggattagtgactgcagttctgatcagtagtcaaggcacatgaagagagcattacaaacaaagtcactgactaaattgtcttagcagtgaagaaattgttaatttaacattaggtaccgaataaactgaagcgattcacattgtgtgagtaaagctgtacaaatatatagagtcaaaactaatcgattagtcgtgaactcgtgataggcataaatgatatagtaagtgcaacgagtatagatttattctttccgaattagatttatgcaaatgggaggtgaaatggaaaacttttaatgatcttacatgcttatgatgatgaaaatgttgatttgtcaccatgaatggtgtaagtgtgaagatgatgcttatgatctctatgcttcatactcacatgagctcgaactgtttcgctatctttataaaattaaagaaaaatgaaaatagagcaattatcttttgtccacctaaaaaaatgctcggatcaagagttacagttgcatttttcaggttgcttattcagatacaagtatatataaggtataacccaatattaatcagaccattgaattatcatccctggctccctgcatgccaccagcgtgcacgtaaagcttcacgaatcacgacccaatgcaacttgatcattaactgatcatacttcagttagctgcactggcacgtcggcgcttctcgtcgccgcgtggacgccggcgagccgccggccttgcgctccttggccgccgcgaacaccctggccgcccactgcgcgaagtaggcctcgtcgtggccgatctggcggttcttgtagcagctgaggatgtccggcgagccggggcacggctcgccgtggggatcccaccacgagccctcgtgccgcatccccgacctgtccgcgccccaccggtacacgaactgcccgcctcccgccctctctcgccaccccttggggtagaactccatgatgctgctgttcctgtccatgaacaccagattcgtcatctgcgccccgtgcgacgagatcagcacgtccgtcccgctcatcaacttcacctgcgagaaaaaaacggagagaaaacacgcgtgttacattacactgctcgttcgtccatgcgtgcatatgcatggagcgagctgggggtacgtacctggtcgcagaaggtcaggttgtcggagcgcgccgtggtgagcgcgcagccggcgacgcgcgcgcactcgctcttgaagacgcgcgtgactgcggcctgtccttgaacgcccgcgcgcccgtgcggaacaggatggtgacgcgcacggcggcggagtcggggtcggagacgtccgccaccacgccgcactgcgccctggccttgcaccgcatgaagtcgaacgccgcgagaagcagctcccgggtcatcccggccatgatcggcctgaacaccaccgcctcctggaagcacacggggacgttggacgcgttgaacgtctcgacaaccattcccacgccggtggtcgccttggccaacgacgtcagccacggggttatcccgagcctcacctccccgtggtggaacaagggccacctcgggggcctcgccctgcacccgctcctcgcgtgccacgacgcgaacgggatgagcgccgagatgccgtgccacaggttgctgtggtcgtacgccgtctcggacacgtacgcgaggcccggcctgagctccgcgccgcccgggagcgcgtcgcgccacgcgagcgcgtaggcgttcctggtgccgtcacggcgtgacggcgccgacatgcagaggaggcggccggcggaggccgcggacgggaagacgatgttcttggcctcgccctccggctccgacgtgtcgtcgagcgtgctgatgaaccacgtctcggcccactcccgcgtgtccttcagcgggaggaacgtggccgaggctcgcagtcggtcgacgtagtcgtcgccgccgccgccgccggcggactggccaccgcaccggaagatcggggagaagaggcccagcgtctggaactgcaggtagaagaacaccgcgagaagtagaggcgggacgaggcagagcgaacccttgacatgcttcaggttaccttctctgctcttcttcatggctgtcgagcataatttcacacgacgacgctcattgtctcgtgcaaatgggcacgccgtatgtatagattgatacacagatctcactgcagtgattctgcaatctacggaggccaaatcagacgttgacacttgacatatatcatgtacaatttacgtgtaagtaaagacgtgaattggagttacgacgacgagccataggatggggtggtttgatcttttctgtgatataataatttgggtaccgagctcgaatt

SEQ ID NO: 16075 - DNA, 4408 bp, Oryza sativa
gcgcgctccgcgtgctccctcgtcggatcctcccacgagcccaccaccgtcgcccgcaagcgcgcctgccgcgagcccaagcctcgcccggagaagaagaagaaggatccctcctccgatgacgcctccggccggggcggaggcgggggcgtggtccagacggcgccccccgcgagcggccgggccgcgccggagagccccagcagggggctgaagcggaagctggggtgcatcgagtccgccacccggatggggcggaagaagcggctcgagagcgagtacgagctcggcgccgagatcggccagggcaagttcggctccgtccggatctgccgcgccaaggttggcggcgaggagttcgcctgcaaggcgctccccaagaacggggaggagaccgtccaccgggaggtggagatcatgcagcacctctcgggccaccccggcatcgtcacgctcaaggccgtcttcgaggacgccgacaagttctacctcgtcatggagctctgcggcggcggccgcctgctcgacgagatggcgagggagggcaagttctccgagcagcgcgccgccattgtgatcaaagatctaatgtccgtggtcaagtactgccacgagatgggcgtcgttcacagggacattaagccggagaatatactgctcaccaaggcaggaaagataaagctcgcagattttggacttgccgcacgagttgccgacggtaatttttttttcttcatcttagattgatagtgttagtgacactgatactgaatttgaggctctacaatgttgagatgcgctctttgaggataatcttatgctgggatgcctcgagttgtctaagttatgaggaaacaaaaaatgtgcctgcaccaaaatgcattttttgttgtcatcagaaacaaaagttacccaaaggtagttgaagatcaactggaattctagcattgaattatagattaaaagatggtatcacaaagttagcatggacaacgttttagttaaactgcatctaacatgtaatattttgttgtgttattgtgatttagaggtgggtgccaggtttccaccacaattccaacttattaaatcttgaccactactcttttaccatgatcactagtatttttgcaggtttctcatatctactggccatgcatatcagctaaatgtgatgttaatatgttgggagttgtcatacccttatgagtttaagaatttaagcaagcattgttagcctggatcttcttggtttgatcatgtaacaaataaattaggctaactcaagtttacaaagttatgaggtccctcatttctggagtcctgtttaacttgtcattggcgactgattcagtgttctgtgtggtaccccacaagaagaaatttgttctttcgggatacaaacgagtgcaagctgtgtgttttggagtcttgagttggtagcagtgtccgttcacatgtcatctccatttgataggtatgctaaaagaattaaaattggtgagtcatacttgctattgggtttttgcttgggagtgtcatagctaattagttttaatagtttgcatggatttaaaagttcaaaacatgtgctaatggaaatggtccttgaaattgtgtgccaattcttaaggaattcttgtgcgaattgatatttggccggtctgaggctcaatgtagtgtccttgggcatttatgactttagtgatcagccggtgtacacactaaacagggcatttatgactttagtgatcagccggtttacacactaaacagagttaaagagctaagtgcactacttggtctggttatctaattcatactcatgaataattaaattttccttcatgatatgagctaccttaccttctcctgttaagttggcagtggttaattctttgatagtagtcctgtttaatctggtgctgtttactgatttaatgtttcacatagtggagcacgttctcataggaaatatctagaagtgagtgcaagttgtatcttttatgtcatgaattgacatcaattgctaagagaagtgaagctttatttgatctctgttgcaagatcagtcatacctttttttttaagctaactctgctgtatctttggttctaggcctgtaatagtccaaatccacctctaatctgtatttcgattagatgcgctgttgatttacttggactctattctttcaatcatgctatatgtagttgaattttgatatttacacttcctttccaaacaacacaaaagttttgtgaatgcactcagcttagtctggcctagtagattagaccattttcatttaatgcgtgaactgatatttttggtcttaattgagcaggtcaaaaattgtctggcattgctggtagcccagcttatgtggcgcctgaggttttgtctggatgctactctgagaaagtagacgtatggggagctggtgtgctactccatgtactgctgcatggttcccttccatttcaagggggttcactagatgctgtctttgaggctataaagacagttgaacttgatttccacagtggaccatgggaatcaatatcatctcttgcacgggatcttattagtcgaatgttgaaccgagatgtaccatccagaattactgctgacgaagttcttagtaagtgcaagcagtttctcatcttgcattgcagttttattggattttgcgtttacattgtcattatttaataataatgctatttttcaggtcacccatgggtcgtgttctacacagagtgccctttgaaggctgtaactgctaatttgagtattactaacaatatcgtagcacccagaattacatgggacagaattaggttacattgcgagtcaatatcttcagattcatcaagtcagagatcagcagatcaggatgaatgtggtatagttgatgcactgacagcagcaataacgaatgttaggatatcagagccaaaaaggagtcggctgtgtaacccagccattcccatacagcaggaatgctcttcaaacttgaagagcaacctctgtacggcattctgacccgacctgatgtacagctcctgattggaatggtgcatatttttctcgcagaggttggtctgatgccagttaaaaggctccatcaggtggtgtctctgagctgaggataataacctgggtttctgtcaaatcaaataagcgtttgacatgggtatgatgtagtttttatctggtgatgctgataaaccggccattagaaggccggttctgtaaattttgtaaatatcatgatccccttagctcctgggttgctaatctatgcgtacgtagcaaattgtttcaattaatgttgataaaatatcgtgtgccatttccctgtgcatgattcatcttgtttctttccagtctattgagactaattttgttggcagaggttttcaacctcatatcacaaaattcacttctctaaacttttaacgtacttcatcatggatctatatgcccttgttgtaatgaaggtataatttgttagaaaggaagttttaaagtatttcatcagggatataggccattgttctagaataaaggtataattaactagaaaaggggctatcttaagctgatacacatcaccaacatgacatctggtgcatctgtgacatgctatgctaccacctgactttggccatccctagctgcaccgacgctacgccatgttttctgtggttagtgccggcgcctttgacgtcctgcccaaaagctctcgactttgtagctggccggccactaaccccgcaagctaaacgccagaacaaagacttccatcttaaatagtttccagttcttttgaaattatctggacagctaaagtgtccacttattttacaaaatgtgagtaatttcgccagcttttggaacttgatactttaatttacagcatgcaaaagggtacacgagtaaaaactactccatatattcgttaccagactgtcactgtttcatgtcatttaattggagccttcgagggtagtcgagtcagtcacttgcctcctaaggaaatttacggtactcctctgaaaacgtacgtcgtgctgaactatagtgtgtccggctattctcattgccggccaagcctttttcttctactctttttggcatggaactcaatacgtgccaaagataatccatgactaaaaatgattttagtcaagaaaaaacatagtatctcttttcatgttcatgtccctaccctgttaacctctctatatattttcctatcagctcaactgttcaagttggtgcatgcatacagcacaatgctttgaaatgtatgcttagtttaatactcctacgtgattgatgtgctcattaattgtactagatagaatcagaccatatgtgactcactgcctcaccctag

SEQ ID NO: 16076 - DNA, 15256 bp, Oryza sativa
tgtcctcaggtggcccccagcgccgtcctccgcatgacacgggggacactccttgtcattccttcataaattcctggagacttttgtgggcttagcgccggtcggacattgatcccccgttattgatgggacggggcatacctgacacagggcgggacgtgggtgcgctgtacccgtcccatccgctggtggatggtcacagcccagtcagggcgactgacgcacgtctaatcgctgggcggcgcacgaccagccacgccgcattaaatgcggcgagggggcggttggggcggtgcccataaatgtgcctgatagcgctcctatctccgcccactcgaccgccacgtggcagccgagtgagggcctcagggtggcgcaacccctcgagcccgaggggtgcaacgggacaccccgaggcccctagacggaggtaggcgcctcttcggctattcgctgcctgcgcgtccgtcccccccgacgcggggggggggggggggggtcgggccgcgcggccacatggctgggggaaaggattttttccctttagcgcacgtacccctgggcccatatcaccgacaccatgccacttaaattttataaaattaggagcttgccactgtcgtcacgttttccatccatatctctttttttcccccattttcttccttctttctcctgtcttcttcccttgagcgatgttctcggcaagagaggagcagcatggtggcgtcgtcctcaccgcacgacttgcacgactacttggatgccgttggcaaggtggaggcgttgtccgccacgacagcgagggcgtcggagtcgccgaagcattgggcgggggcgttgcggaggaggaggtggtcgaaggtgaggcggatgccagccgcaacggcctcgttgctgcaggcgagcccgcacacgcctggctctcggtggcagcgtgacggagcagctcctctagctcgaccacgtggcggtgagcagcgtcgagctcggcctccttctcccgtagccactgcagccaacgccaacgccatgcgcaccagcacctagcactgcctctccgcgcctgctccagcccgtcgtgcatccgctcacactccatccgcactaccgcgtcgatcttcgctctatgtaggcacatctcagacaccagcgcatctcccatcactgcagccgaggccactgaccaccaccaaccagcagtagcgtcgtgaatgccgccatcgccacatattgctccactatctccctctcccgcttcctcgacacccccatcaccgcaccactacaaaccccacagccattgttgcacgttagctcgctctgcgccgtgtcactcaccatgatagcgcagtcatacccactgtcgccattgttgaagcaaccacccaacgttgagaacatcactgaaggaagaagacgagaggaagaaggaagaaaatggggggaaaaggaaaatggatggaaaacatagcgacaataacacggttctaatgttgtaaaatttcagtggcacggctataaatagacgaatagtaatgttatttatctgaataggcacatttgcaattgcatgatctaatttaccctcgattttacccaagtttgaaaatcaacaataagcttccaaacgaccaaaccatacacaatacatccctaaacttccggggccaacccattcaatccaaccttctcaaggtaaaataagatgatttttgtttgtatggtgtttatcatcgtcatataagctaaaactcggggcaaataataaagcaaacgatttgaaaagttgaaagatgaaaagtgtccggtttaaaattagctttgattttagaatttgtaaaattaaaatgcatcttttttctatcaacggtactttacttaccaaaatgcacatagcaatttccatttaacctataattttctgaatttgaaaacacctttttcactctttctcccttttcaaaaggggttaatttgatccatgccattgcaaatgtgtctatctaaataaatgccattacaattcgtctattcgtagtcgtgccattttttacaaaaaatgtaaccatgccatcgccgtcatgttttccatcatattccctatctgcacgtgggacccacccgctagattcatcttcttcctctatcctcacctcttctctccttttttccatccctctccaccacttctcagcctccataactgggggagtggcatgggtggagcgatgaggcaggaggaggaaggcgatgaaaggggaagaggtggttggcttcggtgcggggaggaaccagaagaatccatcgccggcgagaggctgctgccgcatgggctcgccgccggccatggcgcctgtcagggttacgggtaaggtataccctctacccctcgatatacgtcacatatcgatatggtatgcttgcgcgtatacagacgttctcagcataagttaaggaagtccatcacggagtctatagatggaaagagtcctactcggatagaactgggtcgtcattgtatcgtgtcgggtccgatatctccgagtcctacttggagaccagttgacctgcggtataaaagggaccccccgggaggacctaaggcatcaaatctcagagccaacacatccaccacagcctacgaagccggagcttgttggagccaagtcaccgggagatctagtcggatcaactcaactacgatcccgacggtatcgtcgagttccgctattccctttgtaatctgtggtttctatcatataatcccatatcaactggattagggctattacgtaccaaggggcctgaaccagtataatccatgtttcctgtttgcttgatgtcgtactatgtagatcctcgtaccagcgtaccccaataccctctatatccggtttacgggtatcccccatcgacagtggcgcgctaggtaggggcacttggtgctcaaggttctactactatgacatccagcttcgtcgacaacagcgtcaacaccaacctcaactaaggagttcctacttcaacaacactggtgtggactcaagtcggcgaaattgtctttccggtttacaccacagtgccgatcttagctggtccgccaatagccggaaacgagaacgcagtggctacaacccggggcgactccatgtcgaaggatcctcccgccgaagcggagatcggaacgtcgacgacatccgagcccgagaaggatcctagtgcggccaagccttgtttttccaataggaatcacgagccgacgaggattacttccgaggtgacaaggtcctggtgtcctatccacaaaaccaggaaacacttcctgcaagcctgctgagtctttctcaacgtccatgctgaaattcggcctgcaaagagcgtgaaattcagcgtacctctccaactcgtgatgtctattgttctattcacaagacaaagaatcacgacctcttgagctgcaaggtctttctcagcgccatgaagacgccgcctcctaaggtacagcagtcacgcatccccatcagggataaggacaaggaacaaggagcgacgccgatttcagatcgatttattggggtaatcgacattgatccccacgaaccatcagtcttgcacctgctcgaagacatggatcatcgacaacaagtacgccatgtgaggtattggctattgatgatgtcggcacgtcagcgtgcaccaatacggaagcggagaatcaagtgactactctggcccagcacatcagagctgtcaacacaatactgagggaaaccccctacgatcccgttctgaacgacgatctcgcacgttggatagaacgactacgggaatcagtgaccaacctcagcaacgcgttcgaagaggccgctgccgcagcgcacccagaacagccaccaaccgcgatgctaatggtgaaaaccctgaacgccgggaatcgcctcatcgagtcacccctccacctcgcggcaccggcgatctccgcgatcacctgaacggccgccgagaggcatgacgcacacgagacaacgagaaccgttcacggcgtcatgtctcttcacggggtcacgataacgaagatcgaggaggccgttcaagcgaagaccaagaccgtgataaccgccacaaccgccacgatcacgacgatcgcgaacggcgggtgctgggcgatactggtcgaggacgtcgccataatgacgacgatgatggagattggcgccgagacaacaacgggagacgatgacaggattctcgagaacccggccgacgtcctcgtaatcgtacgccggaaccaagtgacccatcgtcatcgttatcatcctcgtcatcttcatcatcagacagacatccacgaaggacgtatgatcgccgacaacccaccgcccccagcgctgggtgtagagctttcggtcgttcacttcgggatgtccaatggcctgaaagattccgacctggagcaatagagaaatacgatgggagcactgacccagaagagttccttccagtttactccacagtactctacgctgccggagcggacgacaacgcgttggcgaattacttaccaaccgcattgaaaggctctgcacgtcatggctgatgcatctcccccctactcgatctcttcgtgggcagacttgtggcaccagttcgtagccaacttccaaggaacttacaagcgccacgcgatcgaagatgacctacatgcgttgacacagaacccgggtgaatccttgagggattatgttcggtgctttaacgagtgcagaaacacaatccccgagatcaccgacggttctgtaattcgcgctttcaaatccggtgtcagagatcgctatactactcaagagttggcaacgaggcgcgtcacgactactcggagattattcgaaattgtcaatcgatgcgctcatgcggatgacgcactgagacgcaagaacgacaaaccgaagaccggaggagagaagaaaccagccaaggatgcacctgagtcaagcaagaagaaaaatcgcaagagtgggaaaaggaaagctcaatcggaagttctcgcaacagaatacgcggaccctcccaatcgcgcagacccacaaggcagcgacacgaagaaagcatggtgccctatacacaagtcggacagacactctctagaagattgtctcgtcttcaaaaagtcgcttgcaaaacacatggcatcggaaaaagacaagcgagtacgcgtggttgagaaggacgttgaggcgcctactcaggaatcggactcagcataaccagattccgatctccatgtctcacacatcttcggaggttccacggcatactcctcaaagcaagaatacaagaaagtggaacatgaagtctgttcgacgtggcagggggctgcgcccaagatgaagtggtccgagcagaagatagaattctcagaagaggaccaccccaagactgctgtcatcctagggcgatatccaatcgtggtcgaacccactattcgtaatatcaaggtcgaacgagtcctgatcgatggcggcagctcaatcaaccttctcttcgccagcaccttggacgcaatggggatcccacgaagcgagttgacgcccaccgatcaacccttccatggaatcactcctcagtcatcgtccaaaccattgggcaaaattatgttgcctgtgactttcggccaagcaaacaacttccgaacggaacagatcacctttgatgtcgctgaattcgatacagcatacaatgccatcatcgggagaactgcactcgcgaagttcatggccgcatctcactatgcgtatcaagtgctcaagataccaggaccgaagggaacaatcactattcaagggaacactaagctggcggtacaatgcgacaagcagagcctcgacatggtcgagcatacgcccaacccgcttgccacagcagagccatccaagaaagtgagcaagacaaacaagacgccgaaaccagacggcgcaatcaagatcgtcccactctccagtgccaaccccgacaagaccgttaagatcggggcgtcactaggagagaaataggaactcgcgctcatcaccttcctccgcgacaatgctgacgtgttcgcttggcagccgtccgacatgtcgggggtacccagggagatgattgagcacaaactcatggtgcgacccgatgccaagccagtaaaacaaaaactatggagatttgcaccagatcgaaaacaagccatatgagaagagctcgacaagcttctcaaagctggtttcatcagagaggtactccatccagagtggctagccaacccagtcatggtgcggaaagccaacgggaaatggagaatgtgtgtcgatttcaccgacctcaacaaggcgtgtcccaaagatcactttcctcttcctcgaatagaccaactggtggactcaacagccggttgcgagttgttgagctttctcgacgcttactccggttaccaccaaatcagcatggcgaaagaggacgaggagaagacatcattcatcacgccgttcggggtattctgctacgttaagatgccgttcggactaataaccgcaggaaacactttccagctcacggtccaaggtgcacttagcgaccagctcggaaacaatgtcgaggcttacgtcgatgacattgttgtcaagaccaagacaagcgactcattgattgacgatctgcgggaaacgttcgacaacctccgacgatatcgcctcatgctcaatccagagaagtgcacgttcggagtaccatcgggcaagctactcggcttcctcgtctctggcagaggaatagaagcaaatcccgagaagatcaaggcaattgagaacatgaagtcacctacaagactcaaggaagtacagaagctaaccggatgcatggcagcactaagcaggttcgtcgctaggatgggatagcgaggacaacctttcttcgctctgctgaaaaagcaagacaaatttgtatggacacaagaggccgaagaggcattcattgcactcaagcgctacctatcaaatccacctgtacttgttgcccccccaacctaatgaagaattatttctctatattgccaccacgccatattccgttagcactgtcattgttgtcgagagagagaaggtccaacgaccagtctactatgtcagtgaagctctccacgacgtaaagacaagatatccacagatccaaaaactgctctacgcagtaatcatgacatcaagaaagctacgccactacttccaaacccacagggtcacagttgtctcctccttccctctcggtgaagttgtgagaaacaaagacgttgtcggccgcattgccaaatgggtagtcgagctaagccaatttgatatccacttcgtgccacgaacagccatcaagtcccaggtactcgccgatttcgtagccgattggaccatgcctgataacaggtcagacaaccaaatcgacaatgaaacgtggacaatggcgttcgacggcacactcaacagccagggagcaggggtaggattcatcttgacatcaccttcgggagatcaattcaagcatgcaattcacctcaacttcagggcaaccaataacacagccgaatacgaaggactactcgccgggataagagctgcagctgcactcggagtcaggcgactgatcgtgaaaggggattccgaactagtcgcgaaccaggtgcataaagattacaagtgctctagccccgagttatccaagtatctcgcagaagtcaggaagctggaaaaaaggttcgatgggatcgaggtccgacatgtataccgcaaagacaacatcgaaccggatgatctagcacgacgtgcgtccagacgagaaccacttgaacctggcacctttctggacgtcctgacaaggccatcagtgaaagaggcaaccggcgaagatagcccggacgcccccaacgtcggctcgggggctacaaaggcagagcgcgctgttgccgatatcgagaccacagacgactggcgcaccccactcattaaattcatatgcagcgaagagctgcccgaggacgacgcagaagccgagaaaatatcccgtaaatcaaaagtctattgtatgatcggcaacgatctatacaagaaggcaccaaacgggatacttctaaaatgcgtctcatccgacgacggcagacacctcctcctcgacatacatgaagggatctgtgggtcacatgccgccggtcggacattagtcagaaaagctttccgacaagggtttttttggccaaccgccctcaaagacgcctgcgacatggttcagcggtgtgaagcctgtcaattccacagtaaacacacaaagctgccagcacaagcactctagactatccctctcacttagccgttctcgtgctgggggctagatatgctcgggccattcccacgaggacagggcggctacaagatcctattcgtggcgatcgacaaattcaccaagtggattgaagcgatacccacgggggaaatcaaggccgacaacgccatcaaattcatcaaagggatattttgcaggttcggattgccccaccgtatcataacagacaacggctcccagttcatcagtgccaatttccaggattactgcatcaggctgggagtcaagatctgcttcgcctcggtttctcaccctcagagcaatggacaagtcgagagggcaaacggcatagtactacaaggaatcaagacccgcgtctacgacaggctcatgtcacacgacaagaagtgggtcgaggaacttccatcagtactatgggttgtgcgtaccacaccgacaacgtccaacaaggagacacccttcttcctcgtgtatggctcagaggccatgctccccaccgagctacgacatcaaagtacacgagtacagaagtattccaatgaggatcaggaggagcagcgatacgacgatgtgaatctactcgaggaacatcgcgaacgagttgccgttcgagtagccagctaccaacaagcccttcaccgttaccacgagaagcgcatcctagcacgcacgctttcgatcagcgactacgtcctccgacgggttcaaagccaagcagggcgcaacaagctctcaccctaatgggaaggaccgtacacgatcacacaagttctgcggccaggcgtattcaaaatcgcagacggcgatggtcgcgagttggcaaattcctggaacattgatcaattacgtaaattttatgtataagtcaatagtatccatacttgtaagacaacttacagcctcaataaagcctatttttcaggtatagactacagtcaaagtgttccttcctgacgatcccttacccagatgacacctagcgttgaaacctatcctcatgtccctttacgccgtcttgacaaggcctccgaggaacctaagggaacttcggctagggacgcccagagccgataaggccttgtcagatcctgtagagacgaaagactatgtcagatctggttgtgtaagagttctcgccgtgcgtattaaccaagccgtgtaatcggaaatatactttccaacttcacggctgggggctaggatcagtgcttgttcaaccgaggcatgtcaaaggtccaagagccttatcttccgagaagaattctccgatgacaaggctgtgggctagggagagtgtataactcaaacgactgatcaaagtcgtgaagtgagaagacactcatacacactacatccagagtaagaaagcttagatttcttttctattccacaagtatttcttacaattccatcaaaatccgaaactatatcacactttttccctaagacatttgtaacaggacacggagactaccaggaaggccaacgccagtccatcgactggaagaccttctccgccagcaacgccatcaatttcgccaggccatctatctccgtaggagttctccgagaacgagaaaacccttcacggaggaactcgaggtgcagctgcgggcgatgatctcgtatgcaggccaacacgtgccccccggcatatcggcttgagcaacgacactcctgcttcaaggcctcgtcgatacgttgaccgatgccttcgagctgggcgcaggccccattcagccacgagatgtatccggccgccgattcctcgggatccccacggggtactcggagctctctacagactctcgacatggatgtgcagcaactcttcagatacgagttgaaccacacctcacgaccccgaagtgtctctacagcctggtcctttctcacttccagcatattcctgtcgagttccgcgacctcaaacttcgtcctccagtactggatgcgacgatcctggtcagcaagcgcactctcgagatctactcagcatggaaacgactaagtcaagttgctcttctctcccgagaacacaacaaatcaagtcgatccagacggaagggcaaaggaaatgataacaaagacaaccaacctaagggagtcgtcgccatgctcgtttcgatgggcgaattttgagctacatcgccctccggcacatgtggctcgaacgcaagtaacggaacgaccaccggcaactcagactgcccgcgctgctggacatcctcgacatcaacatctctacaaacgacaacaaagtactcaagatcaaaatgctgaaaacgctaaggtgatgactgcacacacaaaggcggtcggaaccaataaaagttttacaaagcatggccaaagagtacaagaaagctaagaccctactcttcaaaaagagggaggacggactcctacctgttggtattcaccaaggaagaaatatccaagtctcctacgaattctatcaccctataagttcagctagacaacttggattaggccaactccgaatcggcttattctttgctgacaagatccaatgccgaggagaaatttcttcaactctaatgatggatcgactgcttaacctccaaggacctcccttaggcagtatcgacaatattgagttagcaggattcaggagcaagaactttgacagatggtgggggtgaatggaagttgcatctatttcatcaatcggccacaatgtacatgacagatctattccctgacgtcataccccaggtaaactttgtcatcactaaatttcataacggttagccgattcattacttaactaatcttttgttcctgtattgtagacaacagaatcctcccctccacatcagagcaatagtggtaggaacattgaatatgccccaggtctgattcctaatagaggcggattgtctccccctgtcatcggctatcacgcccccaaggtctcaaccctcctccaaggcgccatcagggaaccaaccaatgtaaccaagaaaagaaaaactagatcatcggctgtgagcaccttgactctagctccaaagaaaaaggccaaatctaagaaaaccaagccaaccgacgacctgcctgcattggatccatccattgaacaagctctggatgaagaagatattgaggatgatgttgatcaggctgcagtcgaagtaagtgatactgaaaaaacaccatcggcttcgcctaagcagataccttcaactccttctgcccccactcacttcttcagagtaaaacatctttccttgcaaacccttttgtaatcattatttttcagccgactactcataggttttgtagttgcagaagaagaaaactgctataaagaagaaatcggcagcaccaattctcaaaccagctccatcagtaagacactctcaattttactagccgattttgtctaacacttgtctttttacagcctcctcctcctccttcttctcatgtacaacaatcatcgagtgaccgaactccatcggccgtggggagtcatcatattgttaaagaagaacaaccagctgctcctgctattctagtaagttttcctttgatgcaagaatttagatcgactatattgacttagctctcaaactttctgaacttatacctgcaggttctagccgatctcttttcttttgatatcaaagattatcttgatgaggcagaagaagatacttcaagcaaagctctagctcccttatctgacgatgcaaagaaaacacttgaagatatctcgcgtcggctagaagcctcttctctggatagcttagttgtcgactgtggatcgattaggacacgattgcacgaagttcaagctctaattcctgaagaactggccgatgtcctaactccacccgcttatcttgagtaacatcaatttaaactagaaaaagccaagctaagattagccgaacgccgtgagcgtaaggagattgaagccacaatccaagtcaatcggcagcttgtgcatgaagaaaaagtcaaactcgatctgctatccgaaggtccgatcaaatccaatatcgaccggcttgaagcccgtaagatcgatgtcttggcacagcttgaagaatgtaatgctgaattggatatggagcgcaaaaagctagccgatctcccaaaatctgtcgaagagcaaaaagcaaggctcaaatcagctatcaagaatgttgttgacctaaccaagtccctgaagatcattcctaggactgattctcaagatgcccaagccaatgaagaagtcgaacaaattaggcaaagagctatttcggctatccatcagtacttgtctcaataacttttgtgtaataggacttagaaattcttgtaatcgactaagataccttaataccctgctgttttaacaatcctttgtgccgattaacataacttctaattttcaagaatttcttgtatatatgtgccccccaattttataatgtcaacagcattgataaaattaaaaaaaaacaactaagggcgatataacaatatcggccgttatatatcggcaaacaaaaaccgattacaattagaaaaacgactaagggcgatataacaatatcggccatctcaagacgatgtaaaacacatcggctgtcatgcatcaacaacactagccaatcatgcgtcaacccaaacacttgggtaatacttcttcaagtatttgccattgagcgctcgtccataaactttaccatcaagcccttgcaacatatatgcccctttagacacagccttatatatttgaaacggtccttcccaatttggtgaccacttgccgaacttgttatcccgagttccaatcggcaaaatcaacttccatacaagttcaccttccgaaaaatccttaggcattactttcttgttataatgcctagcaactcgttccttatctttggtaaccttagcaagggctcgtaaacgcaattgaaccaagtcctccctctcatcggccataaggttataatactcatcggctgtcaaaccgtcttgcaattctatacttctagagccgattctaacttcccatggcaaaacagcttcatgtccataaacacgcttataaggaggaacttgaattgatccatgacaagccatccgataagaccataatgcttcggccaaccgggtatgccattgccgaggataatcagaaatcttccgcttaattaatttgatcaagctcttgttagatgcctcagcctgcccattagcttgtgcataatatggtgaagaattcaacaatttgatacccacgctatcggcaaactgaacaaactcattggacacgaagattgaaccttgatcagttgtaatagtttgaggaataccaaatcggtagattatatgttcttgaacaaattgaattgcattcctagaatcaactttcttcaaaggaatggcctccacccacttggtgaaataatcagtcgccaccaatataaacttatgccctttacttgatggtgggtttatcataccgatcatatcaattccccaacctctaaatggccacggtttaataataggattcatagccgatgccggcgctcgttgaattgccccaaacttctgacaatcttgacaccccttataatatctgaagcaatcctccagcattgtcggccaaaaataccctgcacgccgaagtaaccacttcatcttatgggccgattggtgaatgccacaaattccttcatgaacttcgccgattgcaactttagcctgatcagcactcaagcacttaagtaacactccatcaatcgtctgataataaagctcatcatccaatagagtgtacttcaacgccttatatcttaatttcctagaagccgattgagatggattatgtaaatattgatgcacatcatacctccaatcatcggctgttattgctgcaatttcaaccttaacatctttgatcatcggcttataccccgatgccccttgggccaaatcattagcttcaatattttgttctcgtgatacatgctttaaagtaaccagccgaaattccttcatcagttcttggcacttctcattataaactattaacgtatcattcttgcattcatactcccctgccaattgactgattaccagcaaagaatcccccatgatttcaatagcatcggcttcaacttgcttgagcaattgcaaccctttaagcactgcttcatactcagcttgattattagtcgcataaggtttaatagtataagcaaactcgaaacatgcccccaggggaaattataactaggccgataccataaccatgagtacacaccgatccatcaaagaataaagtccacaaaaattttgggggggcgccaaccccccaatttttttcaaccggagccgattgaatcatcacgatgttccacaataaaatcggctacagcttgtcccttaatcgccttcggagactcataccgaagatcaaactcagttaaggaaaatatccactttccaacccttcctttcaatattggagccgataacatatatttaacaacgtcggccttgcatataatagtacattcattggacagtaaataatgccttaaccttgtgcatgaaaaatattaacattagcataacttttccacaggagaatatttagtttctgcattcaagaaccgacgactgagataaaatacaactcgttcttttccatccaactcctgaatcaggactgaccgattgacttctcaccggccgacagatacaatctaaaaggtatccctttctgtggaggaatcaaaacaggaggggaactcatgtatcctttaatattatccaaagccttttgctgctctgccccccaagtaaactgctgatcggccttcaatctcaacaatggtgtaaa

SEQ ID NO: 16077 - DNA, 2431 bp, Oryza sativa
tcaattcccctctcatggacaagaaatcccaagaactggccagccgatacaccaaaagcacactttgtcggattcatcttcaagccatatttcctggtcctctcgaaaacttttcttaaatcggctatgtggtcttttatttccttagatttaacaaccacatcatcaatatagacctcaaccagccagccgattagatcatgataaatataattcatggcccgttgatatgtagctccagcactcttcaagccgaaagtcataacaacccattcaaataagccgattgcaccaggacatctaaaagctgtcttatggatatcttcttcagccataaaaatttgattataccctgcgtttccatccataaaactcaaaattttgttccctgatgtagcatcaaccagctgatcggctactggcattggatattcatctttcggtgtagctttattcagatctctaaaatcaatgcataccctcaccttgccgttcttcttgatgacaggaactatgctagaaacccactcagcatatcggcaaggacgaataaaaccagcatcatataaacgcttaatctcagctttgaaaggttcaagcatatcggctttgcatctcctcgaaggctgctggtgcagcctatcccctggcttgataggtagccgatgttctacaattgatcggctgagtccaggcatctcataatacttctaagcgaagcaatctctaaactcttataagagctctatcagcttggttctaaattctggagacaaattcttactaataaatgtcggccttggccgatcgcctggacctatatctatttcttccaaatcatcggccgacataaaaccttgacttgcttgtcatcgagatcatctaccgtatccttagtgtagacacttgaaccctccacgacgccctcaaaataatagcttgggttctccatcttcaactggttgtatatcagaatcggacacttttagaaaatctccattccaaacttttctagataaacaatcaaggccatccatctcctaaagagctaaatcggcactggcaacattaactgacctgtcggctggtacaatctctattctgtcgccttgccactaaatcaagcattgatgcatagttgaaggaatacaacaattggcgtgaatccaatcccttccaagcaacaagctgtaagaacccttcccatcgatgacaaaaaacgtggtaggaatagtcttactgccgactgtcagctccacatttagaacacctttggtttcctatggattgctaccaaagtccttgagcaccatatttgtcttaatgagatcctcggcatttctacccaactttctgaacgtagcataaggcatcaaattcaccgcggccccaccatcaaccatcattttagacatcggcttcccattgacatagccatttatatacaatggtttaagatgccgattctctgtcccctcagacttctcgaacaccgcctgttctggtgatagaaccaacttagccgattcctcttccacctcgtcgacatcggcttgatcgatcccgaattcggctggcaaggtaaaaaccatgttaactggtgccgtcacaacactctttccttttgccaacctctttgcctcatcagctgcaacatcgtcggctacaggagcctgattcttaacacgccactcctgcctcggttttgctttcttcagccgatgattaatttcttgctcgacctcctggaagcgttccctactcctcaatctttgaacccttcttttctgattcttcgtaaaaatactagcaggacaccattgagtcttcttattttcgtcatattccgaatcaccacgttggtttactggacccaatctctgatgaacaggcactcttgtctgttttagccaattgcctccatcgtacaatcggcttgaaccccttgcaacatcactgcatccaggacaatcctcgatagatggtaacctcataccttcattccgacagaacctgaagaactcacagccccaatgaggatcaaagccaccattatcttcttcatgatgcctttcctgttgcttgtcatatttcctttgatatttgtttataattctagccgaacttacttgataacccctcatgcaccccgtatcagctattcggccaactgtgtgtactatgttaacgggaaatgggttaccatcgaccctcatcggcttttggaatcatcaaacttaatcttgcctccctcaatggccacctgaatctgttgtctaaacaccttgcaatcgttagtagaatgggacccagaattatgccatttgcaatatttctttttgcctaattccttagatgatggaatcgtatgaccagcagggagttgaatttgcttctctcggagtagcagatcaaaaatgttgtcagcttt

SEQ ID NO: 16078 - DNA, 12902 bp, Oryza sativa
ccagcagggagttgaatttgcttctctcggagtagcagatcaaaaatgttgtcagctttagtaatatcaaaatcatattctcttcctttccatacttttacccattggcacggtatgacctttttaatcctcacccattcggctgtagctatctcagagtcatcctcatcgtcatccgacccatacatgtaaggacaaacatgattaaccttcttagagcttttcctagtctccgcagacctatgctcgtgcaaggttaccttttgtatcagatgtgacaagctatcaaagtcttcagacgagaatttctccctaatcggagcaatcataccctgaaaggctagatcggctaactgagcgtcagttaaactcaagctgaagcacttgtttctcatctccctgaatctctgaatatactcgtgcacaggttcatcatgccgctgcttaatcgccgtcaagtcagaaaacacgaggcctgggagatctgcttaactcagataagatcggctgaaactccgatactaccctaatcggcaaccagaggacaggctagagattgatattctaagcacgacttaatagatcaaactcaactgatgcagcattaagtatgaaaagaagaacaatatctagacaatcaagctgctgggtgtttcataaagtggtagatatcctatataatctaggacaacgtcgctatttaacctaatcggctgccttctattaacagatgttagccgattgtaggttaagatgacgatattgccagagattatgtaagatatatgataacttgacgaattatatagacaagattagagtgtcataaagatggaagcactaatcccgagaacacaagtcgtcataacaagttttacctcttgttgaagatcgaaaccgatgcagctcaacccgaaagcaagaactcgtcgaaacaaaactaaagcaaaaaggtggcgatgcgccgaaattgtgttgaacgtgtgtgttaaaaattacatagggctcggggtctatttatacccgagaattacaagatatgtccataccagacacgaccactatctctaacaaactctaagataccataagtctttgcggcagacttttgcccaaacatatctctaaggaagttacataaaacatcctaattaatagatacaattgccttctcaggactctatccatgtgcggcaatcatcttgaagcacctcaattcaacccaatgtcatacaccaaattatactgtcagaatcggctgcatcggctcacctagtccgactcagacccagccgatcctaatcgtagccgatctggacttcagccgattcttgctctgttctcggatcaatcttcgccttcgactccaccttgatctaatatccttttccgatgctgatattagcaaatttggtcgttaacacatgccccccaagtccgggatatttgataatgttccggatttgctgtgtaccgactccgagcaagtctcgcactctgccgtttttcgaccgttattctatcgctttaaataccaaccgttgccctcaaaaaatctcacgccgtgacttccgttttcaccgcccaagcgaaactttgtcctttctctctccggcgattcctccgacgcaaaagcgatccccaggcgattccgcttttgatcagatctccgcctgcggcgatgtcgtcttccactagcccgtctactacgccattggccgagtacgctgaggtaagttctcaccggctagatcccttttcctcgcatgaaatcgatttctccttttctcattatgttttctgcttcccgattcctttggatttgcagcacctttccaacctagttgcgattcccagcctatcgcacaaaaaccactattttcttggcccaatccacaatcttgaccccactatttcatcattggtgaaaccaacagaatcccctttagactagccaaccctaacttgggtcactggaagaataccttcaagtcttggtcatctctcgaaaagcctacccctgataagagctggaccacctggtaccaacgcatatcggctagtaagaaaacccactgggatgagattgggatcggccaagcgcttgctctcaccatagccaattctgctaaggatgaacctctgatggctgccgccacctatttctggtccaacaccatcaatgccttcttatttaaccaagggccgatgactccaactttgatcgacatcatcatgattactggattagatgtaacttcatcggctaaccctatgagtatgaacaccaagaaccaatttgacttcaagaccaaaagcataggagggtggtctggttatgtagcggcatacatgggcaaagggcctgtcactcctcgggagcacgtagctttcttgctaatgtggctagaaaagtttctcttctgtagatccagctgtggtcccacaaccaattggcaatttgtagccaaagccttagaatcaaataaacaatttcccttgggcaaaatccttctcggctatctataccaaaagttgaaaaatgcatcggctaagatagccgtcgactcaatagttggagcaggtggaccatggtggctactgcagacctggctaaacctggtagtcatgaaagttgtcaatcggccatctataacagaagctgaattcccaaggttggagccaattgtagaagacgatggagaagaactcacccattgcagatgcatgtcatatggagaatatgcatccacaccagccgatgctggggcaaaactatcggctgagctgctcaaagattggttctgcagcttttatgaaggcttccagaaagatgcccgggtttggtttctttatgaagactcagcagaccttgagctcccattagacttcagatttgaagacatcaatcatgaaagatatcaaacgtccagggaagtctttacagctgcaatcagcccatgcatcctacctgtcggtattcaccaaggaagaaatatccaagtctcctacgaattctatcactctataagttcagctagacaacttggattaggccaactcccaatcggcttattctttgctgacaagatccaatgccgaggagaaatttcttcaactctaatgatggatcgactgcttaacctccaaggacctcccttaggcagtatcgacaatattgagttagcaggattcaggagcaggaactttgacagatgatggggtgaatggaagttgcatctatttcatcaatcggccacaatgtacatgacagatctattccctgacgtcataccccaagtaaactttgtcatcactaaatttcataacggttagccgattcattacttaactaatcttttgttcctgttttgcagacaatagaatcctcccctccacatcagagcaatagtggtaggaacattgaatatgccccaggtctgattcctaatggagtgcacttacgttgatggcagcatcgcgctcggctgcccccttctcgcaaagggggacggggacgttgctcgctgttgtcgggccactgatcatcagttggccgactcggcgctccacggttgcgctgtccaagcctgcagatcgagaccggaatccgataagtcgggaagaacacgcgtataagggagtcaatttaactaaaaaggaaaataccccgaggagaaatccgggtcgcgtcctccgtcccagaataatcaaaggtcggatgagctcgagcctgaagcggctggatctgcctaccaatgaagtcggcagtgacttcataccccgataacccccgttctcggaggtcatcaatgacatcgatgaaagattggagggatggggtcaaggcgggtttggtggtccaggatggaatcttgtctggttgctcctcaggaacaacgaagaccggatccgaatcctctatctgaagatagaaccacctcccccgccatttgctgcgagatgaggggcactggaaggggatgtatcgcgacttcaggccatcccgaagtcggaaaccaacacacccggacacctttttgggttccatccaacacaactcatagtaaaagcggaaaaggtcaagaaacggctctaccccaatgtaggcctcacaaagatgcgaaaagatatttaggaaggcgatggaattagggttcaaatggagcaaggaaagaccatggaaattcaagaccaagagaagaaattcagaaggcggaggaagaaaaccacagagaataaagtcctcgatcgcaaccatgcaacccaggacaggctggggttcagtacctcctacttccctctccgcggtcccacgaccgggaagggcaccatcctcctgcagtttcttcagcgatgcaccggtggaggttgacttgtcgagatccatcactgctggggatcgccgaagaaaggatcgagatgagctagctagggttttttgcgggagcgaagaagacgagggacgcttggaagctggagagtgttttcaacaggcgtacttcaaatgggatccccaaaactcccttaaatagacgcacttccgacggtgcgaattccaaggaaaggagagagatggccgccggaaatttcggggtccgttacatgcgacagtttttcggacttcagtttaaattcactcatgaccgttgagcttcacccgacgttgtcgatcactccttgtctctcggtcttcacaccgagaacaacgacaacatcagaagccgcgatcggtctcacaagttcatttaagcagaagtcgggagctactgtcagggttacgggtaaggtataccctctacccctcgatatacgtcacatatcgatatggtatgcttgcgcgtatacggacgttctcagcataagttaaggaagtccatcacggggtctatagatggaaagagtcctactcagatagaactgggtcgtcattgtatcgtgtcgggtttgatgtctccgagtcctacttggagaccagttgacctgtggtataaaagggaccccccgggaggacctaaggcatcgaatctcagagccaacacatccaccacagcctacgaagctggagcttgttggagccaagtcgccgggagatctagtcggatcaactcgactacgatcccgacggtatcgtcgagttccgctattccctttgtaatctgtggtttctatcatataatcccatatcaactggattatggctattacctaccaaggggcctgaaccagtataatccctgtttcctgtttgcttgatgtcgtactacgtagatcctcataccagcgtaccccaataccctttatatccggtctacaggtatcccccgtcgacagcgccgtcacaggaatccacacctccacccctcatcgccacggatgacttcgcctccgccctcgtgaccgcaggcgtccacgtctccgatgttgccgctgtggagtactcgtccaccctcgtcgccatgggagtccacgcgtcctccctcgccgtcacgagagtccacacctctgccctcaccgacacggacgatctcgcctccgcccttgcggccacagacgccacacctcccccactcgcggccgcacgcgccacgcctccgacctcgccgccggggaagtccatgcctccgacctccgtcacggcttgctccggcatggtgctggcgccaacggcctgcgggaggatggaggaagtggtgcaacctgttgctgatgaggctgagattgaagtggtagagagggatggaaaaaaaagagagaagaggggaggatggaggaagaagatgaatctgactagtgggtcccacatgtagatgaggaagatgatgtaaaacatgacagtgatagcatggctccaattttgtaaaatttgagtggcacagctacgaatagacgaattataatgacatttatctgaatagacatatttgcaatggaacggatcaaattaaccctttcaaaagaggggtaagttgagagaaaacggatgatatgccactctctaacatcggttcggataaaatgccactttggagacttttatgcccaaaatatccctggagagagaggaaaggggagcaccggggagggccggccgggcggcgcaggaggactcgctgggcggcggtggtggcgacggaccgcggggatgacgggggaagaggacagggcggcaaggacgacggggcggaggaagagccgacattggggaagcctcagacggacccgtcgtccccgtcgccgcccggccgctgctgctccaacgtcgtcctccttctcctgcgtcgcctcttcctcctccttcccctgcatcgcctcctcgtcctcccccggcggcaagcgcgcgtgggtgccaccgccgccgctcgcttgctcctcatcacctcgtcctcctcctctcgtcagcgacgtgccagctccgtcctccttccccacgtcgacgccctctcccgatggagccggcgctgtcctccccccttcagcggcactgtcctcctccccttctcgccgcccacccccgcgtgcttgctgcccgctggcgacgagcacggccgccgtctttcctctttcccttcctctctctccacggtggggtattttggtctcaaaaccacccaaaatggcaaagtatactgatgataacctattgagtggtattttatcctttgtactctagtgggtgacattttatcctttgcaattttctggagtggcatattttccgttttctgggtaagttgaatggcaacgcgcaacgcagcaacaagccaacaaccagccaaatgcgagaagcgcggcgcgatctccctcccaaactccggccgccgtctccgcctccagagactcaagcagcgccgcggcgccgcctcgcgggatctcgtgttggaccggatccttcaaccgaggatcccaaccggcaaccgcaaccgctccgggggcgtaagattcgctaatcccatcctcgcctctctacttctacttcccctcctttccgaggccacgcccacgcatccaggtgtcgatgggtcgatttgcttagctccaatccagccatggcgatcccgaattgtttaaaccgcgccgacgtttcagctttcttgttatagcaaccctcttcagcgcgcgcacgcgagcttaggcccaggaccacgcctgcataaaatgttcttaaattccctggaaccagacccaggggaaggcaacaagtgcaaggtgacaagggagattgttggattgggggggaagtggaatttactccgacacatgtgcggggtggttggggtttgtgggggcttgatgatgcaatgcggacagtgtatctgagcaagctcgcatgttggccgtccccaggatcctcccagtgtaatcatcagtagggaaggggtgatgattcgctcggagctcaggttgcgtcgtatttaattggatattcagatgctaggtggggctgggggctttgccattggaatgatggggtcgtttattagtgtggcttggagtggacattcttcaggaggttgcgaagaacaatgagcgtagggtgaggggctcactgcattagtttaagtgactgcttagattaagaatgatatctgtttgatcattaggtgatggggagaaacataagaaaatgtggtctgttgttcactatctagtgcccacttcttttttttttggggcacgtttactgttattagttccaaaagctgcaaaatggaattgctcccattatcttctgggttcaagtagataataagtaaattatcttcatgatgggaaaaatgcacagtagtttgcaaattcagattgcatctgaatgaaggatagtcctgcaagtagataaaaataagcatatcttgatgaggggatagttgcatggtagtttgcttttgagttacttgacactgacacagagttggacagttggttcacttctatctttgtatgcatgtgttggagcgcatttcaaatctagattgcaattaattaaacatgctgtatacaagagtaccatctactattaatagaatcagtgtcgctttgatcagtaccttgaccatttattgaagacagaacaagttcaataattgcatagattaaagacatcttgtcttggaggtattcaaatgtaatctgtcacattattgttccagttgcggtgactttaaaaattgctttttaatgttaaattgtttccataattggttctatccagactacttttttagttccccccagatgagaatagatagtgtatattaaagaaatgttaacctttgtgtcaattagaaatttagaactatcatctgttggctgttgtgctgttttctttcgatttacaagtggtgtttaggcagatatagaatttattaaataaaattagacatttctttggctggcattaaatataaataagttgcgggcttgcggctattgcttgaaatctatactccttttaaaagaagacaatggtggtggcagtgaatctgccaccccaccaactattgtatagagttttcttaaccaactaccccttcatgttttttattaactactacttcatttgctttaatattacaaaatagttcttctatatataattctatcgatttcattcctataatacaagtttatcatacaaagacatcaacaaggacaaaattgtgcaaaaatgtcacaattaatttgttccaaacgatattagcacaatataatttgtttaatccgtagtaaagcacgactatttagttagtgctctattataattacaacagtcctttcgagatagcaagagaaatgtagaatagtatgattcagaggacatgcacatgttatttggtttggacaatgcatatactcactgttgtaaggtccgattctgttttaagatgttttacccgattatgtatggtggtgttgctgttaaatcaattaaaaccacttaaaatgagctagtgtatggaatactttttctatttcatgcgtgtaaagttattttatgtatgtgcagggatgctcctaaatattgctctttggttcagaatatgatatttggatttctattttttagatttggttgtcctgttgccttttggtccttttttgcgccgttggatgaagctgctatcatctttttggaaatttagtagattacctaccaagagagaatccaagaggacctaaactgcacaaaatgaaagcaacttttgttaaagtcagaatattggttgagtaaatagcaccctgaagtgatggaatacagccaaatttgttggttggattgtctctatgcaatttatccttatggcagtcctacattgcaagtgggccaaatccaacaggccaagaaagtatgtactttaggcccactagtcctccatttgtccaaccaactgatgtttgaaggcagcacctgctgcctggaaacttccattggttcatctaactcaattgaatatctatgaaaaatgatccttggtttggacccttttggacatgattcattgtttgcttgttagcagtctggattctaatggaagcacatgtgattcactgttaagatgacaaaaaatacctgttttgagttttgacagagttggttgtagtactgtttaaattgggtatgggtatatagaagaaccaactccatgatgcttgactgctagcttagttccccttgacaaggagtgcactacggctcttgaaataaaccgtgcagattgtgagaagctagcagtcaatcgaatgattcctagtgtcaaaagggcaaaggcataaatgattccctcagccgtgctcagttttttttttctttggggggtgtgtgtgtgaactttctcagttttacatcagggcaagtttcaatgccccctctttatattatgttgccatcttgtcatttgtggccttatttttggagacatttgtcatgaattttcattttttgaacattacttgaatggttatgcctatttcttgcagaatataaattttctacatagcctgtgcgttcctgttcaatccaacactaacgtatcacttaggaaatactgtgcttcaacaaacctgcacctttggcagcaatacgatccattaacgcatctccccaaaatgaagcaccgtagatcgtcataactggaccggacagaagctatggaccactctttcaccattaatttgctttgtatgaagtccaacaaccttttaatatgtgtttactggagtaaaaggaatatcagctcatgttgtcttgttgagtttttgtgtttgccgtttctagagaatggcagttagctaacctagattgtcttgatatgttggaagattatagagattaggaagatatattttcccctatccgcttcatgagctgatcacggcgttctgtgttatacctgcaattagacggtactttgtctcactgcagatgattattggaattagaaagcacagcatattagccttttactagtttcttgataactacagcatgtgcatctttcactactactatcttcattgcagatgattatttgttctgtgccattgactcattgtgtattgagtactgacgtgtccaatccaatactttgttaaagtttaattagttatttctttcatgtaatccacaataaaatttcatggcgatgcactgtactctgtcttcagggcatctgcaatattaattcagttctataaaacagcctatgctttatgttatgagtaacttgtatgatgcattttctgttgaaccatgggaagttattagttatgtacagtggcggatccagcatggggtctacggggtctcgagccccactactaggtctcgagccccactactggcgttgtaaccgtgggagcccccactaatttttttctgtcatacatccattagaagagggggctatagttttgtatagtttgtttagcctctccttttatccgttcctggatccgcccctggttatgtaggctttgcatattcacatattttcatggctttctcttgcagtgttaattttgcagatctactgaaaacagctctgttttttttcctattgtgtacagaacatgtgttgagttatattctttttcctttttatacaaaaggaaggggatagcttttcatcaaacatgtcgattttgaatcttacagtacaaattattccccttgccaggcagtctgaccggccaagcatcaattcaggttgacaacctgatgtaatattaatacatggtacatgttactaattctttactgaagtgaaaaccgcaatgttgttctaagctagatattataatatagtatggtaagagcatatatctattctgcataattagtctgaaactgttgtgttaatttgcattgttcaatacaagtttacatccagtatcctgtttcagtgtttcatgtctgtcacaggtccaaaaataccatcaatggcgtccttcagccgcctgttgatagcctgcgagggccgaggatacgccattgcagattcagcacttccagctgcactcaattataagtcaattataatcagtaataaactacttcctccatctacttttgatagtcatattttatcttgacacagactaagaataattaattctacttatcatctatttaaacatgctactaatcattcatcgtaaacaagcgattcattaatatttacatttctcaaagcccatgtacccaatcatatgtggaagaatggagagtcacgcattaaattcgagaaaatcattaagatgatagtttgttggattgaaatatgcctatcaaaaataaaattttcagatttagaaatatgactatcaaaagtagacggagtactatttttttcttcttctgaagactgcaatccatcatcacttcactgttatgtgtcgcaaatgcaattgatcacaactgatcagatcactttgaaagacaactaccatacgcaattgatcagttgccttgtagaaatccaaaaataacatctcacatcaaaattaccacaggaaccttttagttcgtctcatcagtgcaactcggggtgcagctttgcaaccgttgcgatggaggcttgcaggacaaaatcttactaattggaaattagttagatatatagttatttataacttaatatataattaagtatcctagcaatggcctgtgcatcttcttgggcgatcgccatgtcgcctcggtcagactgacagaactcaaaaactcagaagtcgacgcccttcaacagcttccgaacctgctcgagggtcacgaagaggacgatggtgaagggcccctgcctcgtcaccgtcgggacgaaccccttgtacagcgccatcgccccctccgaacgcacggtcttgatcaggcagtcgagcgcaccggagtagggcggcggcgcgccggccaccaccttcatgttcatgaccctggtcttgacgacgtcgacgggggtggacgccgacgcggccacgaggccggcggcgaggccggccgcgacgtgcgtggcgagcccgtcggcgccctggccgcggcgcgccaggatggcctccttggcctggtcgtacgtggccagctgcgacgccgccacgatcatggcgcgcttcacggtgagcggcgacccgcgccacaggctgcacacgccctcgtcccgggccatccggacgatggcgtccgcgacgctccggtagttccgccgctgcgccgcggggagccgcccgtccgcctgcatccgcaccatggccacgtcggccgggttccccacggccgcgccgacgccgccggagaagagccccgccgcgaccttccggtgcagcggcagcgggccgccgccgccgccgtcgtcacgctcccacctcctcttgagcgtgtcgtacagccccatgcaggtcgtggagtagag

SEQ ID NO: 16079 - DNA, 2432 bp, Oryza sativa
ggggaacgcgagcgctggggcagggggcccctcgccgtgaagctgcatccggaccttgatgagatcgagcgggtgggtgcagctgccggccacgacgcaggcggcgccgccctccacgaaccccttcagccccatgccttccgcgccagcgccttgggtgcgaatgggggaggagacggcggaggtggacggcctggcggcgggggcggagaggaggagaagggaggggaggcgaggcggccgcgcggcgcgggcgggtggggtggtgtggggggctagattcacgggccttgccgtataaagtttgcaaggacaaaagtggatgctcgaagcttgaaaccctagttgaaaacatgtccaattgtccatgccagcctagaaggcctctttttttattctctcttgattcatatgttcaatttgaaattttgaatgctcaacgtttcgttcctgcatatcgttttacacgcttatattttctaaaactatgtttttctatatatatatatatatatatatatatgttgcttaaaaatcatactaatttattttccaaatttaaaataattaatatttaattaatcaatcatgcgttaaccgttcactttacgcatcttcttaatcttcttatttcccatcctctcaaatactccaagttctcattttctactatagtactatgttcttatttttctctttttattagtatgctttctaaccaatgtatttttttcaaaagatctctatacaaaaatttcttaaaaaatattaatttatttttagattaactgttgcttaattaatcatgttctaatgaaccatccggttttatatgaacggagagaagatccctacctccatccgaacgcacactaggaatgtttttcaactagaaattcttcattgagttgaggtctcatacttaatttcttgatttagttttaattaaagatatgattcatagtctacagtgatatcatgatatggaagtatatcgtaggcaacaccattaactgaatcaactctgattttagttttttttaatcaaaagaattcatcaaacaacaaactacatacaaattccgatgtttctttcttcactggtgcaatgcttttcttgcggtggaacccgtctaccaatctacctacattcagtgttgaacgtagtatatgtgcttgcatttatgattaattattttttcagtgataggtaatatatatgtcgatagcgagatatctatgatgactttgttaatatcaatatatatcgtcctagttttctggagatattgagagatataagagtaagttcaatagtatagcccactactagctacaattcacctatagctaatctaatagccaattcatacaatagttacttactgtactattaatatatggtcccacctgtcatacacacacaatgtcttggagtccgtgctgcagctggctacagatctgtagcccgctgttctctctcatcttttatctcattaaaatatgtttatagctggctactagtctgctattgtacctgctctaatgtgtactccctccgtcccaaaatataagtatttttagaacagtgtgaagtcaaactttttaaattttaactattaatagcaaataaattaaaaagattaatcatgtaaatttgatggtactttgtttatcattaaacgagctatcataatatgcaactctctttatttaaaacatcttatttttataaatattattggtcaaagtagcacctcgaagactgaaccgaggttaaaaaaaatacttatattttgggacagagggagtattacgtttgtatggtgttaaaaaaaagagagtaacaactggtcaatctacagctggatcgaaattgcaaatgtcccagcatcgggtgatgcggacgtttcccttttttaacacgtggccgtccaaccaccacaagtcagattcagattcatcgaacgactaggattcgctgacacgtggaagatcgtttaactcgggcctactcaccagtgacataacctccccccaccccacgcagcgcgcgcctctctcttttttctccccccacaaaacccggagaagcgaaatcaaccaccagatacgacgagcgcctcgacagcgatccgccgccgccgccgccgccgcgtcgggtgtgtggtagggtttggggcgatggggcccccctccgcctcctcctcgccggcggcggcgccgcggcggtcggcgccgacgatgaggctgcggagggaggcgctggagtcggtgctggaggaactccggcgggcgctggacgagcttcgcgagtgcggggagctcggcgtgcctctccctgaccccgagggagccgttaacgacggcggcggcggcgaggagcagccggataacgaggaagaaggcggcggcggcggcggcagcggcgg

SEQ ID NO: 16080 - DNA, 10238 bp, Oryza sativa
agccgttaattgccgtaactgctgacaaattgcgatgatgaaactaaaattcactaccactgttcagtttatcctgataaattcagaattaattgattcgatttgtcatgcatttagatctgataatctgagatggcttgttttcacaatctggattcaatactactagtagtactactgtttcatatttgtctatctgatgccctagtggtgtgatagtagtttttttctcaattaataaggaacctagtggtggctgttgtatcgagtcaaattatctactacttatactatgaatcctatgtacggagtactactttttatcaggagcatactgtgtccttgcacatgtagtgtcgattagttggtctgtcagaacatcatgaagtactgagtaggttagtggattactgcggagtgaaaaggagtacgttagtggcttatttctgaatggagaagaggaactggaaatccagctgacagaacaattgtttctatataggagtagttatgaatgtgtgtgaagtccttcaaaataaaacatctcccctgttaacagtgttttcaggtttgtaagagtatataatgtttaactttaggctagtcatttctgtagttttacatactagaaagaaaactgctaacaggggaaaagggtagaatatctgaacagtctcataataattatggagatctctttctttatgactgggagaatgtacaagttcaattacagttcatttttatgttaatctttcctaatgtttaaaatcgcttgcctttattttttcagctatgtgatcttcttaaatctacattcgaatcacccaatttttttcaaaaggttgatgaaattcagaagtcactgtatcaaaatgatgcaggtattcctttactgaatgaacttattattgattgtgatgtgtaagctattgcatatatggagctgaaattacacttgttgtcgtgctggatctgaaactcacttgctgttctagtaatgcatagaatgaaacggaggctatcatactctaaagttcattgactgttctttgccgcagttgaacaagatccatcatgggatatagtaaaggcagtagatttgtgggaagacgatgacttaggtgatggatatgttcttgttaagaacgatgatgcaactgaggggatggctttctttattgccacatacatatcgtcgcttaaaacagccaatgtaggtactccctattattaatacttctgctccaattatacatcatttttcttgttttgttgtccatgattcactgaaaaaccttgcttaatattgttcacgcggttataattttgagaaaccctagtttttatctgttgcatatcttgtctcaaataagatctgtcaccatattttgaacatgatctagttttccctggtctgaattacgtttatgttcctttaagtaatacatcttgcttttctgcctaaaatatcatcattggacaatcatatatctgatgcctcaaacttaatgttgtacaggaatgttctcctgatcaaattagaaaaggtttgtttccctttccttaattcagataaatggttgaatcattggaatgaatgtttcagtgctgaagttgctcatcattcttttgccagccctcaagaagacattttcatctcgaaagagaaaaggtaaacttcggaaggcatggaatgggacaaaagttatttataatgtagattcatggagtgccacagctattgggtaagttattccaccaatatctgattgtgaatcttctttatggtattattctccctgcaaaatgatagccttgatgttcagttgagtagtgttgaatcaaccagcgcagcttgtcactaagctagttcggaggcaccccaaataggccttagtttcatacccaagcttcagtagccagctttcttgcaggctgcataagtttttataggctgtccataagattgtcaaacagactttcgagggttcatctcagtcctccattatgtagtctcttccaacctggttatgataggttagggggcaaacctaaatctttgaagtgatcctgaagatcaagaaaccataagatcacatctgagctttgtgttcccgattttaagtccaaatatgttctctgcgattagtgactgtcataccttgttattaaactgtatctaaataaacacgtgttttctgtattggtttacttacaagaacttcattgcaacactgcagaatctaccataatcaagcaattcttaaggtagcaactacagccttccggacgtcctgcagtgtgatatccaaatttctgtgagctgctgctgttactggcatgcttcccatcatcattaggtaaattggctaacacggccagaaagacctgcaatactcatgtaaaatagtgtctattcgttggtttgccattgtaagctttgactttctacaacctaactgtaaatatgacattcgtttgaaactttgaataaacatttcaataaatttagtgctggaattaactttccactcgtttgattggaaataattgtaccatcttcttggttggaagttgaaaaagggcacgggatgacaagatcattatttgtctgtaattaaaacagaaaatctataatctaaagtacagggttgcggcagtcatgccatttgcaaccgaataaaaaactaattgctcattggaacaatgcatggcccagccataggcgtcgttccttttattccaaagcccacccaattttacacacatccaagaccggaaattctaagcagcaagcatatcctcatctacattgcattctccaaggtaaaccttgatgcttcgaggagaaccgcagctgccttctgctatgagcgctctatcatttgctgccatgtgctggattattttgtatatcatctcaatctgatgcaacaaatggaatagcacgagttattaatatgaaagggtaaatctgttttgcagttcgcaatgaatccagatagtaacagaagttgagtcaggaatgaatattacatcttcagggcaatgacagcgctctgctatttgatccagcgtcaacggctcggcaggatccttgcagctgaaagacagcagcaagtaatcagcagaaattcaggaaccacttagaattgtaagagataccccatcggggagtaaacgcaaaaccgagagtttcatgtctttaggttaatacactgataaaacaagtttaagcgatgtgctggaatttcacacatatgagcaagatatgttccagttgttacacaaaggcttccctttgtcagtaattaggtttaaactgtccaagacagctaactgttcaaatagaattcatgctatctggtgaatttgcagccacatgaggtaggttctctgattcccaataataacccacagaagagtttttcccaaagaatttatgacatctccaatattttggcatctgaagctgtctagaggccattaatcagagtgcaagtcattccagaaaagtattctctaggtaaagatatagtaatgtaggaacatctgtttttcaagtgctaaaacctaaaagatatgcatgcctcaaactactgtgcacaaatcaatatctgtagataaataatatacgataaataatatacaaatgtaaataaagatataacatgcctggcctcattcagaacagtcagcaccctcttctgaagtgccaacacttcacctgctgcctttttcccagcctcaacacctgtacagcgcatagcacaaatacatcatatcataatcataagaatcataatgcaacaaaagaatcctagtcaactttagcttgtttgaggaatgtaccaggctgatgataggcattgatatttactaaagaagcataaatccccacagcacgttcatatagagcaaccagcgctccaacagccctaggagtaacttcttgcacagtaacggagatggattctcggtcattagaataaagagcagaacgggttccctgcaaaatatttctttcctctgtcattgcattcatagaaaaaaatgtcatagttctgtatcttaaaaagctgaatatcaacctgcaacatcccgaacaaatagtcaccacatgtaactccaggttcaagctcccaatcatgaccaggaggcctatcacgcaaaacctcaataaaagtaacgaagaagttgtgtacaccttctctcagctgctgaatgtagctgtaaccggatataataccattagatttttgcacttttaactacagactcttaagcaagtactgcagaaaaacaggaaaaaaaaacttacgcatgctgatcggtgcttcctttgttgccatacacagttagaccttgattaacctgccattaaaaatttctgtttgtcagcaaactattggagacataatttaattattggtaactagttaagtttaggctctgtttgtttcagcttaagattattgtaatctagattattaaatcagattactctaagctggattataataagctgatataaaataatctacgagttgtttgtttctctggattattagaggcatctaaaggtagtgggtctttacccacttaataatctggaaaaagctcctctagaggagattattggattatagtaatctggcttatagattataataatctagcataataatctacttgtttgttttagcttacttctaataatctagattataataatcctaagctgaatcaaacagggccttagtaacatcagttacagtgagaataaaacggaagaatgtgtacccgattgccatcaaggtcaaattctttcccaagagattccatgacaagctgttgcaaatatctactcaaaagtagcaaactatccttgtacggaagtacaaccatatcctgaaacatatgttcaactcaaaacataaaaataatgcacaaaacaatgacaaaaaaacttaaacagaagtaatcaacaatgctaaccttatttcctattccttccgatgcccaataccagcacaaagcaagtaaggctgctggattttccttaacctgaatgagtggatagcaacatcttgatatatcctcaacagtccattgtatcactaaactacaaactgtatgtattcttataacatcataccacagtattcctggtttcctcatccattagtgctgcgccaactaacatttctttgatatcgataccctggcaagcaaactcgtgttaatctgagagctaatgaaagttcagttctcagcaatataggagaacggagcagcactgacctgtaatgcagctggaagcaatccgacagctgacatttctgatgttcttccaccaacccagtcaaacatgggaaatctagctaaccatccctctattctggcagtgttgtctaacagagaattttcttgagtaactgcaactccctgcatagcagtttatgctgtcacataatggtatgtaccacaccagtcatatatagtactacctccatattttaatgtatgacgtcgttgactttttgtctaacgtttgaccatttgtcttattcaaaaaatttatgtaattatcatttattttaatgtgacttgattcatcatcaaatgttctttaagcatgattttatatttgcacaaaaattttgaataaaacgaatggtcaaactttggtcgaaaagtcaacggcgtcatacattaaaatacggagggagtataatataatgatctttatatcttgagttacaaaatgcacgttaatatcatgtcacacaaatggatccagaacagcccacaccacatgacctacttatgaacactgatggtttgcttgtaaaacaagagaaacaatattgtttcagtgtttatcttaataccatcagtatataaatcaagaaacgggactagtacaaatcgattacagtctaaattggcttaaaataaatgttgcacttcctattttgttgataaaagacatacaagaagtaaaagagcctgaggtaaaaacctgtttcgagaaatccagcccagcatctcggaaggctttttgcacttcaagcagaccattccgggtttcaggtgtgcctccactctgcaagtatagacaaacataaaatttgcaaaagaagcagggagaagagagggtgaataaggaaaaacaagcgtgatatcaaccttagaaataacaattacaagagtagatgcaagctctggtcctagttgagcaatttgatggtcgattccagcaggatcagtgttgtcaataaatcgtatctgagacatcaaacagaacaaaaggtgaggttatagctacatgagaaacaccaaaatctacaaaggggcaaatgagatcgaagcacattgcatggatataaaagtaggggcgcaccttcaatggagggttatcaggtgcaagtgcctctgaaacaaattgaggccccaaagctgatcctccaattcctattgagagtatttgagtaaatcggccagctggagatgacggaggtttaatctacatttgcaccaaatcactttgttaatagtgtttctcaagatcaaaaaagaagtagcaagagcctgcataagcaaaactcgactggcgtctatctattgaacaatgcacattccccagtacccatttcatggtaatcaccaaaacataggtggctccttttcttcacccttgagcacacagcttactaagcttaaaaccgcactaattttaccacaatatgctaatagggtttcgtttgcttatttgctattagccgccagaaattaagctttttttatagtagcagtagcagaactagagatatcaaattagtaacacgtgaaaatcatctaatttcagcgagtccagactcctaacagcaacaatttttagcatctcgagcaaatggaaacttctgcaatcaccttgccggagacgacgtcttgggagaaggcgaggatgcggtcgagggtggtctcgatcttggtgcggaggaaggagttgggggcgaggcctgggtcgcggagccagtaatggccaaccatgcggccctcgtcggggttggcgatggcccccttctcgagctcccgcatcgccgcgaaggcgcgctgcatccgcggctccatccggcggaggaactcctccgtgaaccccatccggctcacgtccacgaacaggccgagctccttgtgctggtacagccactccacgtacctctcccacagcttgatcgggtccttctccaccgcgccgcgggtgctgccgttctgccccggcctggaggcgagcggcgccgccggggtagaggagggctgctgctccgacgaggacgaggaggagcgggagaggtccgcgatggagtggggggcgcggaggcggaggtgggaggggcggaggaggagctgccgccgcagccgcagcctgcacgccgccgacgaggacggaggcgccgccgcgccggagatggacgccatcgcggccgccgccgccgccggagtctcacccggtagtgctcgctcccgctctcctacacgagctcacgcgcatctaactccggcgagagcgagagaggaggggaagcgatggtttcgtcttggagtccacgaagaagaggagttggtggcatcgctgggcttggctttatctgggggaagacgaaggcaccgggtggaccccagccacgtcaccacgtgggacccacctgtcattgtgccacgacttggccccacatgtcagcgtcttggggtgaggcggcgcgtgcgagcgacggcggggggcggaaaaatctcgacggcgagatccggtggtggcagctgggtgccaatggtaggtgggcccggggatcttttcgcgagcttgacgcgacgagtacgggacaaggctacaaaacggtaaagcgaggagaactcgcggtcgaggaggggcagagagatatttggcgaatttttggttgtgatttctcaacggctgctgtttcaggaagtttgctggtttctgttctgtcagttggatggatggctggacggtgaccctcgcaaggagcaagtagaaaccaatttacggccgtagaaaacaatttacggcgtctggtgaatgggaatgtggtttgattttgatggcactttcgtctcacctctgttttcttagacctgatttggacggccaccgtgcagcacgtgtgaccgtcttgtcgtgtattggaagagtgttcaagttgttaaaaccacttccaggtttcaaaaactgcttcttttgcatcaaaattttggaacataaaataaaagtgcatacatacatatggaccaatcttcctctagtttattttggatgatggcatgcatcatttgtcagcgcaaaacaccccagtgaccaaattaatattgcccagttcgatctttaatatcgtcccacacgtttgaaaagcccaagattactgcctcatgctgaacgctaatggccgcttagtgttaggaaagcgattggctcctcccttccctgacgagctacatgctaactgattgcgtcagtattccaattgctcatcacagtgtagctactgttccggctgctatgttgaccttgtcttcctacattctcaggagtcaagcatgcggacaggcaatatccgacatgacattagctagtactccctcagtcccagtatagtggtcgtccgagaatcactgacacaaatttgctttaggagaaaatgaccaaaacacccccaaatcattagctggcagctgcatgtagtcatttcaacatgcagagaattgacacacaatcagaaaaatctcatgtggaggagaaaaatcccacgccacccacggtactagatgggcccacttcttttttctagagtacttctcgctgctgggacttctttttttcaagtacttatcgctgctggaacttggatgcgtcaagctttctgggacatctgctacggggtaaaacgaccgctatactgggacggagtatagatttcacagaatattacaagtttagatgaaagagggggagaactatcaattgggttgagttgctttgtggaatttattttttgggaatatacccccttttttttaataatttgagtttatataccttaatggaaagatttagcacaaatatacctctaacacataatggagacgcgggagagcaacataattacggcgtggacgtgcgggacaggcgggcgggccggttaagaatgacacccgagcagcgccaagtcccacggctcagaagagcagcactgatacagtcccgtgtccccattgcacaaaaccgaggcggtcctgctaccacatgcccgttgtgcagcaccgccctctccccgtcacgcggtagtgttttggaacccgcaatcccgtggcgcgcaactaatttgatccaaatagtccacgccgaaagttattttcacgcggcaacaatgtcgcaatcacgcactaccagagaaaagagtaatttctctcgtccgtctcagctttattcacacggcgtagcagttattttatcgcacgcaacaatgtcgtagtcacgcacgcctatagaaaagagtaatttatctcgttaagactcagctttatgcacacgctgtagtagtgaagtagcaccgaaagtttgttatactgtaccatcaaaaagtttggatagtctactcacgaactgcctataaaggaatcttacgaagggaaataagacatacttcagtagattgtatcactctttaaagttcattgttattgtacttatggtgtataaacttcactgattagaaggtctcgcgaattcacaggacatatcttgtggtatgaactaagtacgtgatgatttatggtgtgtattgggggcttaccataagataaggctgtgaatttgcgaaactttcaaaccaacttaaatgttgtgtaaagattgtggaaaaattcattatcatgctgcatgaaaatatttataagtgtccatttagacgcaggaaaggcatgttgaaagggtcacttaggcctagaagggggtgaataggctaagttaaaacttaataaaatgcataagctaggattttcggatatatgccaaacgacaatcacactagaaaaatgaatctagcaaggcacaacaaataatctaaagctcaaagagaagctaaagctatagcggcacaagcaagtgaagatagtagaagggaaagcgaaaaaggatgtcaccaaatttcttg

SEQ ID NO: 16081 - DNA, 675 bp, Oryza sativa
ttgctgggagggatgcaactcgggcccttgcattgatgtcgtttgaccctattgacctcactggagatttggatggccttggtccagacgagctagaggtcttgcaagattgggaagataagtttaaagagcggtatcctacggtgggccaccttgcttcagaaaatgcagcggatggtaaccacggtggcgcagcttgatcacgaggaaggaatgctttactccatcggtttgtcagtttctctgttcttttttactggattgcaagtgggtagatctgatcatatgatgctctggtaggctctgttgcttgtgtgctgtgtcgtgcgtgactaatgtaccagctttccccatctgcttttattttggtttgcagtggatgaggaggaaattttgagcgacttgactaaaaacttgagctgtgactctcttgagtgctcagaccatgtgtatatgctttcaagtttatgccataatttgcggcttacttctcgcaagtcgcaacaattatcttgctggcagctaaagcacgccatgatttgccaaccatacttaagctccactccttttaacattgtcggagaacagcatcagcatcatgtccactctttaccagattttcgcgcccttttcacacatgatgcctgtacgatttcttccctttctttcagcacc

SEQ ID NO: 16082 - DNA, 23859 bp, Oryza sativa
atacagagcgtcagcttcagtagttatgctgcgaaattacccggtctgcgctgcaggtcttcttcaacgtgctatcttcttgaaaaaggatgcgcctgctgccctgcaccatagaccaaaggttagcgacgacttccagccatcgacaagaacacgggacagtactagctgtacccaagtccttgtagttatcgcattgtttttacataatgaaaataacatcctcgatctctgcgacacacagccaactagccaagtcatgacggagtaacaagtaactagtacatcgagcaaatggctgctgctaacaacggcgagacgcgagtttcgtattatgggctggtttggtttgatgtctaaattagacttaccaatatttgacaattttaatagtgttcagtgtctatttggtttgaagccaaattttagcatgcctaacaaaataggctattttaataatgaacttaggctattttggtttcaatccaaacacaactttatctttccaaaattagtcatgccaaaatttaccaaaatttaacactgacaaaatttggtaaggcctattgaggccacaaaccaaaccaaccctatgtgacagagcatcaggacagagcgatggaatttgagaggcaataaagaaaaatgcaaagctagtgatgacggcagcggagctgagcgaagcatatttttattcgttgcttcgcacgcctacaatttgcagttttgcaccgacaatataattgcacgccaaaaatgaatggtcccctgacacaaacgtccaccggactgcagttctcttattatcaccagaagacgagatcacgatcccaaaagcaccaactcagcagatcacctctccccctcctcctcacggtgcaaatgagcatacctcacgcaagtggcgtccacatgagctagcaagccagggtgggtgacgaggcacctgccttttttcccgatctcccgatcactagtgctcccatcattggaggatgagagatccacgcggatgcaaagatgcaatggtaggttcgagatgagagaaacagctggttgttctgtgattaacgccccggtggagcctgcgaatttggcgagaaaagtatacactcaaaccacctttttttcctgctccgagtacgtgcacgcatgggatcggtgtggcaactggcaagtgctgaagtgcacatgtaacgcccccataataaccccatttctgagttcgttcattgatgcaaagtacggccacgccgccacctgatggcacacgagcacggatttatccttttacactgggtaatgcaatgcttttctttcctctattagggctctctaggacgcgggaataaaaaacacacaaaaatataaaaaatacagtattaagatgatatgacttgttgatattataggaaataaaaccatgaaatgttgtttagatgttttaaaacaaaaataaattgcagcaatttaagtcttgtatattgaaatgtgtgtgtgtgagagagagagagagagagagagagagtgagtgagtgagtgtgagtgagaaagtgcattggaatttttcgctcgattttgtaaaggtgaatagctaaagtggtcctccaaattttatctgagactcagtttagtctttaatgtttttatatgtccatattagttcttcaagtttttattaaagttcaaacttattcttgaactcacttagaagtcatatggctaaacataaccaacaactctcttgataaatgacacttataccctcccttcactcacatatataagagaaaattttgcgtgcaatgaattcttttatagatagtgcatagtaatttatataaacgaaactaaattatgtacttgcaagtgtatacgatagccattagactcaagtttcaagtgtatatgttgaaataatggaaagtacatatgcattgttgtttattcatcttggttttctcttttctagggtagggtaaaaggggcattttctaacagaactgttgaatagaaatagccatatggcatattaagtgggcccaacaatgattttaagccaaaacaaatacttagaggatctatatggataaaataaaacctgaaggatcaaattgagtcttcggtgaaacttaaaggactaaattagctattcacccatcttgtaaatgtgaggtgcgagcacgtgtagaatttatttgaaatatggagggatttttcccatccttttaaattcatttgaaataatcttaaccatccaaaagactcgtatataggaatttttcctttaatttggattgaatttacctagttttcctacaaatttggattgaagcccttggtcttcagatatgcatacaatggttctatttggcacagctcgagacctaagattttctaacgctagccatttctgcctatagaaatccataaatatgatctaacattacagtttggataaatctttctgttcgtattttataggaaatattaaatttcaaatcactgtaattttacttacaaactttaaatccaacaaagatatgagatctagagccgtgcccagggccgtgccgtcaaatttgtaggccctgtacaaggctctaagtgaggcctaaatcaagtaacaaatatagctaaaataatgtatatactgtagagcaaatgcgatataccaagaatagtatattttttaactcttgttttgcataatcagaaactgtcaaactgaaaacggagaatggtcgttgttgttgctggcttgctgcctagtgccttgcttgttggttgcttgctaagttagtattcactggttgaataaaaatgtgaaattggatgagccggctggcggcttggtgctcggaggagacgagacgtcgagactcgagacgaattgaataagtcacagatacgaaaacgaaagagaatacaaaacgccgtgggccctcggggctcggagttgagaatacgaagcgtcgcacacgcgaagtcgccacgtggagatacgcgcggactcgaacggggttctggcgctctggcctcacacgaatacatgggatgggccttcttcagttgggctgattttttgaggccctatacggtcgcacgagccggatgcccctgtgcacggccctggccgtgtcagttatgtgcatgagcctatgtttgagggaagcttctggcagctgcagtttttttaaaaaaattcttcagctcccctaaattgtccagattattttaaccaaattccaaaatatatatatttgtagaataaaaaacaaactaggagttagaagctagaaacccatatttttatattcttgtcatcatttgtttcatagaatctcgagctaatagaatcttgagctaacatatatataacagggcctcaagagcctattaagagaaactttagattctgataaataactgatgagaatttagcaggtgagaatccgaaaaggttaggaaaaccaacttatggtatctagtctatttttaaaattttgtaactacagtatatcataatttgaataaaaactaactattcgagggaacttgtgagatgtgttacaaaatccatgcatgggcatgggctccaacgagaatgaattaacggaaatcatgatttagcaattgagccaaggtgaagtaccggaaccggatcacaacggtaggcgtgaaatggagcaatggagcccgataggcgatagcgctttacatgcccattattcaacgacgtccatgatttagcaactgccattaggtacacatatatcacgaaaacgatgtctacatgtgctgattcaacctgctcccacttttcaccctactttgctgaagcagttagacgttgcaagtcgcaactatttatcgaccagccttcgatcatccccgaaaaaaaagaagacttctcgatcgtgctatatccttttcccgtgagttatccgaattcctacgtgaatcttttcgataagtttggcgagaagcctgctagctcaccggccggccggccgtccattcgagcccaacctttcccgggtcgccgtcgtacgttgtcgttgccttctcgtcgccatgcatgcggctgacgcgaccaacgagctgtatgcgcgtactgtgcgcgtctgcgtgcaaccgacgccaacagtggtcgcacccgtctcgcgaaaggaagggtgaaaaaaaccacgcatctgcagacggacgtcgtcgccgctggccacagtacgccccccaccgaccgcgcgtacgcctcccgaaaggcgcttttttgaggggaaaagatacacgactactcagaatctaatctatcctcgcctagctagcttttagtttttttgttcggtcgatcgatcgatcatccgatcgccacggggtcgaagagcggaggcggcacatgtgctcgtgggaggcagcagatacggcactctcgttcatttgtttcgtcggccgcggcgcgatcgatcggcagtgaggtaggagcggatgggtactgggtacacatcatacatacacgatggctgaatctgaacggcttcttggtggtggccgcgccgacgcgcgtacgtacgggcaattgataactgatcatctagtatgctgtatgcatatgcttgcttcctctttgcgccacgtactgtagcaaattggtactgtactgatcatttctcttgaattcgaatagttgagctctgttaaattaaacaccataggagtattttgtttcttactaccgtatatttgtatggaacttgtctggcgaggccagcatcaattcgatttctcatttctcgcacagactccgtttcggaaccagtacacaggaaatgaatgaattaacggcatccttggtacttgggaaggaagactaatggactagcgtcgacgtgttgcgtacgtgattccggtagaaaaattgggggcagtcggcggaggtcgacgtcagtcgacgcttcagtacgtgccagatttgcttacaagtctcggttgtatatatcctcagcctcagatcattttgcctgatcaaatttgtttaattattagtttgtcgcagtcaacgaatgacctggcatcgacttttacctacgtactacaagtcgtggattggttaactacaagatgcaaagagaattcatgcacgtaagcaaagtgagcgtgaaaactaaaaactaaataaatgatcacgtagatcaactatacaaaaccactttctaagaggagcactgctgcacgtatgataaatctcaaatgatcagcgtatgatacattgatactttgtaatatcttgtgagtgcggtaaatatagggactaaaatgtcttcacgtaatcaataaatcatgagaaaaattcctatgtactcttgagaattcgtccaatcctttatatacccctgaatttagcctcatcctttatatatccatgagtttttattttgatctcctctatgcccattccgttagttgaccgttaaatatttttgaaattgacaatattacccctctcttttacttatgtgctagtttaatgataaaaacataattcttatatgaaaaaagatctatttgtaaataaacaacgggaatataattatttgacaacaaattttaaaaataaataaaaacatttaaataaattttaaattaactttgttttcatcaaaatttgaacccgacaaataaataattttggttcacaatttctagctaaaactcttatatggattttgtcaaaaaaaaaataaatttgttcaacaatttaaattttcttttcaataaataattatgtcccatttgattttatcatgagttacagtttttcacattgtgaattgtaagaatgggaaatggacgatatggtcattttaaaaaaatttaacagtcaactcacggtcagctaactaaatagggatagaggagatcaaaatgaaaactcaagggcatgtaggggatgaggcaaaattcaggggtatagaagagattgcgaattttttcaggggtatgtagggaattttctcataaatcatctaatataatcactgtgtgcatagcaatttccttctaagagcaccatgttaacttaaaaaaatgattacatagatcataaaaagtatcacgttgtacatgttgattaaatatattgtgcctataaatttgcatttaacatcgtaggcaccaaaataaccaaatacattgtacattgtgggaacccatgtatttaatcaacatgtatttttgttatgtacattgtgggaatccaaattaaccaaatcctaggttaaaaatctatttgttatgcacattgtgggaacccaggcaccaaattaaccaaatacaacttagagtatttattattgattataaattttagacttgagaagctacaactaagtctccaatcaagtatattatttatgaatttaaaaataattaaatcataaagaaaaccccttttgatatttttaaatatcaatacgttcaacacacatgttaacaattagtgcagtatataatgaaattaaaaaaaaacttttgattatatggcagatgcacatgcacgtacaccaaccacacatgaaacacgacactttatattcgtgaatataatttctaacgcatactcaagtagatggaaaccgacagtacattctttatcaccttaaagttatacttaattctatgtagccttcaactttggtttcttttttttgttgctcagaagtcagaagtaatattgttccgtttacattcgttacactacaactttttccttgttatcttaaatattttacgagtgcgcaatatgaaatgctaacggttccaaaagggtccgtccttttctcttcacaattcacaaagaagcataaataaagaaacaaaataaaaaaaaaagatactattgcgcaccgctaatgcggtggtaatgcagcgccaccattgatccaaaggaaaaaagaatagaaaaacaaaagaaaggaagaaaaaaaaaaggaagtctaaagaacagaggaagagaacaaatgccagcccttccgtttcgccctttcggctttcctccgtcgtggtggactcctcccggctacggccacacggcgccgcaccaaccccccaccccccgcgcctgaattttttacaatttagtccttttgaaaacttatttcacaaatagacccctggagaaacttatcccagaaatgattttttctgggataagtttttctaggggtttattttagaaataagttttccaaaaggatcaaattgtaaaaaattcatgacgcctgggacccaaccgcagggacacacacccacacgcgcatccatccatccatccatccaacccacctgcgcaggacgcaccgcaccgcaccgctccgctgctgctgctgctgctgctcatcatctctccgaagcttctcatctcctctccactcctcctcctcctcctccccctcgccacctcccacgcgctgccacgccggcgacacgaccactgcctccccccgcgcgggcgcgccaagcgccgggatcccgctgctgcgttccagttcgcggccggggcgtagtaaccacaggtgaggtttccttttgggcggttgcggctgcgttttttttttctctctgagaattgtggtgcgcccccgccctacgcgggggatcggtgaattggatgcgctttgtcttcctgatggccgctgcgagggaaaagtgggatctttttgttgttgttctactgatttgatttttgcggggggggggggggggggggcgttctgtcctgtttgcgtagtgagtagagttcacgctgatggtggtggggaaggggaatggaacggatgagttgccagaattttgggaatcggggggcggttggcattggtctagttgggttagttttacttgcttcgttagctggattgttaaagctccaaacttttcatggctcttctgctcagtttgagcctgtatggtgtagttcaggaggtgtgttttgccgtgggttggttagagaatttgatgagcctggaatcgacgtaatgaatattggtctctcttgctccagaagaactccgaatctgttgccttgatggcacgtgaattttcagttgataaagttggagtttcatcatggatttgtgtggtaacttgcgggataaagtaagtttcagttcgttttagaagttgaatttctctatcctactttatgagagattctaagagttttctcgttttgctctgaatttatctgtatatgaggacttttaggggggggggggggatgaccaatttcttgaaaaacctattgtttaattggagctgttcatttctagttcccaattttcagtaaatgcgttcttagcaagtgattgcttgataccacgatgataccccgcaaatgcatcctctccgtaattcaggatcatatgatgttaaattgttaatcactagttctttcccagtatgtgagttcctttttttgttcttctctgtaaatttagcccttgtttgtgtcacagtctctcagagttctagaattcacactactgataccgaatcttgagcacagtcagtttgactgtttgagcattacgtatgaatctgtttctacaacgatgtatgtaatgataatgatgattgtaatttgtaattgatgcagtatatatagactaacatacagagctgctgatgaaacattagcttatctttcttgccagcttaatcaactctttgataccatctaatagcaaactccctttatataaaatacagacacaaagttacacagttgaccattatttcataccaaaatagcttccccaaatactatcttttatctgcagtgcatgcccgtaactttttgtttcttgtgaatttcagcagtgcaatacaccttaaaatggggtctacacgatcaaagaatgaagatgacaaggccattgtcttatgccacgaaagaaaacgatatgttagagaagcacttgatggaagatgtgcattcgcagctgctcacttcgcttatattcaatcactgagacacacaggatttgctctgagaaaatttttggagcctgaagtgccaacagattcttcgctgtacacatcgacatctgcaacaccagaacctcctactattcggcagaaatcgaggaacttatctccatctatttcacatcaggccagtgactctttctccccagttccatcccctttatcttccggacggttccgtatcaatcatatgaaatctggggggaaccctgtcatgaccattgaggagaaggtgcctgttcctgtaacagcaactctacaaacatcatcccttgttcctaaagctgtacatgacctggatgatagttccacatttgaagcacctccagggacaccaccgtgggactactttggcctttttaaccctgttgagaaccaattttcatttcatgacgagaaggagcctggtcatgactttgaaaacgctgatgatatcaggcgtcttcgggaaaaggagggaattccagagctcgaagaggaaggggagaagactcctgtgcatcctgacaatgttaggcgcttccgtgatgagaaaacttcagatctcaaagatgcagaaaaatctcctatcaatggaagggaggatgattttgcagagtcagaagatgatttcgataatccatcatctgaacctttagtgagggtgttccagaaccgcaatgatatgcctgttgaaaatactgtgatgaatcagacacctgaacatgtggcttcagaaaagttagcttcagagaatagcgtttctttttctcgaaaacaggagaatagtgattctttttctcgaaaacaggagaatagtgattctttttctcgaaaacaggagaatagtgattcattttctcgaaaacaggagaatagtgattctcaaattgacaggccaaacaatgacaaggaggtgctagacattagcatgtttgaaagtgatgatgaaagccctgtggcaagccctgtaaaagaagtgagatcttccattgctgctcttcctatgaatgggaaatcaaaagaaccttttcatgacgttagaaatggtgcgaaggatttgcattcatgcatgaaagagattgaaatcttgtttattagggcatcagattctggaaaagaagtaccaaggatgcttgaagcagataaagtcaatttccggcctttactgcctgaagaaaaaggttaggtatcaataaaattaaattactgttctgtagtatcttatttggaaattgcatggaaaataatggcagaaagattttgggatgcaaaaatatcatgatgtgaaaattttcatgattcttttcaatgttatccatctatagaatatcttttgcctgtgatttttatcatggacaattctgtctttactaattttattgcaattttggtgcagcacatggatcaaaagcatcaggcttctttgcgacattctttgcttgctgcggtggggaggaaattcctattcctcagcgtaagtttttatatctgaaatacagtctttccgcagcagattatgttgctgtgtatagttttgcatcatatcatgtttgtttcatgccgtttattcctggatctctggttaaaagatttgttttttccacaaatggaaaaattctatgttatctacaagctgatatgtactttccacattctcacacgagcaattttgacagaatcttaattattttgtcttttaccttgtattatatatgttacagctttttttctcccttccaccataacaagaggtgcccttttgtcataatgcagctcctcctgaggctgaagtgaagtaccttacctggcacagatcagtttcttcactctcttcatcatctagaattcctcttggggtgacttcaaaagatgatgctgatggtctcactggaaatatctttagtggtgtatacatgaattctggcagtcacgcttcaacactagatagattatatgcatgggagagaaagctttatgatgaagttaaggtacttgtattttggctggtcttgttactaaaatatttactttagtttatctgttctagccagtttttgaaatattgtaaagtagagaggtagcaatgaagtgttttaggattgaaactagccttctttttttttctttttttttttgcaaaaagggaaataagatcgattttgaactaattaaaacagaacctacctagaacatgtaataaataggaactagccttttttttttttttgcaaaaagggaaataagatcgattttgaactaattaaaacagaacctacctagaatatgtaataaatgggacatacgaaaacctgaatgtatttgatagaaggattgcgactcactatatacaacatggcaattgcacaaagtgctactgtaatcattccacagcaaccactcaggctatttaggacaattatgtaagtagtgtgagccagttacattattttcttatgtacctacgtaatacagccataaaaaaattcactaccgatgcccacttatatgttcattttgcactttttattcctattcccttcacttaattcctttgtactaatgttcttgaataaataagctatatccgtgtatgtttgccttaatctgtgaatttctatgttgtaaacatagttaaatcatataatgatggcaaatttgatgatttgtttgaaatgctaacctttatattgtcttcaggctagcggtgcaatttgtaggcaatatgacgaaaaatgtaggcaattgagacaccaggaatcaaaagctgaaagccaaatgagtatcgatagaacccgtgctactgtgaaggatttgcactccagaattatagtggccattcagagaattgacatgatctctaagaacattgaggatctaagggacaaagagcttcaaccacagttggaggaattaattgggaggtatggttcaccatctatgttttactatactgttttctagtgacatgttacaattcaatgaacactttaatgtcgatgtcagcatatttgaccagcctgatcaaggcccctttcaacaccttaggtcaagttattagtagatttactcctggttttggattatgggttttgaccataacttgcttggtcgaacaaccgccaggtgtatgaatgaaacaaagggccaacttgccctggtcctgtttttgctctagtctacattaacagaagataaatggataaggtagtacttaccattgcatgttgcttggggatgatttattcctacctccagcattgcccaagtttcataaagttgtttgtgagctttgtagaatataataaagcaatttgatgctcatgtactgcatgttacctttgtctagttatttactgatagttttccaatatttgcattttaatagatagtatatacatctcatttgcagtttaactcgcatgtggtctacaatgcttgagtgtcacaaacatcaacgtgagattattaagtccagcagtggcaacacgaaggtcttaattcggtcggagtcacaatttcaagcagctctactcctccaggttgagctaaacactttatattcaaccttcctgaaatggatagcataccacagatcgtacttgcatagcctaaattcatggctacttaagtgtgtgaaaccactgaggggcaagaagagctccaggaggaagaaggaagcagatactcccataactaaatttgctgttgcacccatgtttaaaacctgtgaaagctggataaagttattggatgatttaccaaccaaggacttggaagatgctatcaaaggcctcgtggcagatataaaccactctgtgcctcgccaagaaaagcggcgtggtacttcaaagttgacttcctcattatcccgttccagtagtaccaagacgatttcctcattttctcggaatggagagttaaatggtgaaatgtcagagatccacagaaattcccatactacggatttacagtcaagtttggagacattcctagaggggtttgcagagttttcagatgtttcactgaagaagtatatggaactcgcggttgacattaacaaagcaaaggaacaatatgagaatgtgaagttaaagaacatgggaaagtgaataagttcgacaaagtcagaccaaaggaactaatttctggaaggaagaatgggctacaataactcaaagccatttagaagtggataagtggatcacccatgtgtatattagcctgtttaaacaataggtataaattactgttacttttctttttgggttcagtttgcaagataggtttaggtgggagaggaatacttgtagatttctggccaatgccatgccgcagaagtgtaaatctgaggtttaggtaaaattaaactgatggtgggggatacaatatgtgtatttatcctgggtatatcattatatgagttttcccttttcttctctttttgatctgtgtagaccttccagtcctttatacagctagacgtatctatacagccaatttctccttttgcggtgaatccctgatcgaattgtgattgctagaaatgtactgtttctgtgcatttcgcagcgaatgtttcactctgaatgctgtgttacactgaatgtttgtgttgaacctggaatatatttccttcgttgctttttactaccttctcaaaggcctcaaaacgtcaatttcgcaaggtggtattgttggaggcatatgtcacgcgaatgtttcactctgaatgcggtgttacactgaatgttgtgttgaacctggaatatatttccttcgctgctttttactaccttttcaaaggcctaaaaacgtcaattttgcaaggtggtattgttggaggcatgtcacgagggccttcgcctgggcctgccgaaaccacaagaaccgtgaggtgttggctgagtccatgaggcgaagcagctggcgaagctagatgatgaagaccgaggggttcgccaccaagcccatcatcctaacaagccttcactacgggcgaagaccgtagagcgaagcaggaaggttttgctctggttagaagcggttacggcagagggcttggaaaacaccgtggcccatggaggcctttcgtcagtaatgggccagcctaggagttcacttataagcttatgaatacaaaggatactgtatgccctcactaaagtccctatcataagggtaccatgtaaattccactgtataaattaaaccctataaagtgtcagtgtgtactaaggctataaatagcaccatagggctatgtaatgggggatcccaaaaatttcttaccaattaatatattacttttactattccactcaactcagtgagtgaaccatatctttcgatgtgacgcagttgtctttcgacagcaggtatcaaggaagaagcaacatgattttgcctagaagaaaatttcttaaaattttctttattatgctcttcatattctctttaatgaaatttatgaaatatcccaatgaatattacagtaactatctcatcctgttttttctttgttttatccggacgaacatgatgtgtacttgtgcagagtgtgtcgtgcatgtgcagtggtgtacgtgtctaatataggggctgtaagtgtaaactttttatattatcatactacctctgttccaaaataattttaattctagattatttgacctatattaaagtttgagaataaagaatatgatgtttcttattaaatgacgtatagataaaagtgaggatggttgaggatagaatggagagaaatttaaatgagaagtgattaatataacaattagtactatattgtaataactattttatgataaattaaaccctataaatataattattataggacggagaaagtattttttttcgtttggttttatatgtgcttcagatattactggtgggtgtgtgggtgttcctaatgctacatgcagcagcggcccatttaggcccaagagttcatcgcgaatcgtcgtcttctctccatttccctttgccacgaacaaattccagaaacaccctcccatatccctcgcggcgggccaacggacggggccaccccacggcttcgcggcagatctccctcctcctcctcctcgtcctgggcggctccggcggcgtcgccggcaggggaagccagaacgcgatggatctgtggaacaagctgcggagcctcgacgcctaccccaaggtgaacgaggacttctacagccgcaccctctccggcggcctcatcaccatcgcctctcgctcgccatcctcctcctcttcctctccgagatccgtacgtcacgcgccacctccctgatccctccctctccgcctcagatcccccttccgatttttcgggtttccgcctgccttgggtgtgggggcgcggtggctttttttgcggattggttccgtttgttcacgtgtgttagggcgggtgcgaaacgggaggagtctgtggttggttggccgtccgatcgagtgggaattggaaataacgggcggataattaacagtccaatttaacatgcatttgaatcgtgtattcgtattggttagaaggtggcgtgaggaattaattacatgaaggtaagaggcgcttggtgtggagggtacggtagattagtaggatgtatgatctagaatgctgttgatttcaattgccatgctatggatcagttggtgttatcacttgtcagagtgttggtatttgtttcattttgcaaggatgtttttgtgtggatttagtgagtcatatgtaaattgttctgttatgctaatatcattaatgtgaagagccatggtttgattaatttgagagcatttcatgttaccatttctagttctttttttctgatgggtagattaattgttatttgccaatactttactagttatttcctgcactgaacattcttaacttttctgcagggctgtatctatattctgctacagatagtaagctcacagtcgatacctcaagaggggaaaggctacacatcaatgttagtgtggatgttcattttcattttccccgaagtttccaattttcttgcattgctaagacattttgcatctccagtttcctcttgttaatttgtgcccctccatgcatgtattcctatttggaaagccacgctcttgggcatttaggctccatctatatattatattattaagacaggcttgataggagacatcatgttccttgtggaggctagaaattcccacattaatcggaggaaaacaaaaagagagttaaataggaatacaatttagaaataactgaaattcggaattagaaataaggaatattggaataacagtccatatagaacccaatacgagaataattaaaatctctactacttaaaaagactaagatgattctgtcgtccatcattgacgtcacagcgcctcacgcgcattcgcgtccaagtcgtgtgcgtttcaatcctgctgcatggcaccgtatcgatttaaaggatttttcttttaaataaaaggggaaaggaaaacgtggcaggaagactgcctatgataatctgagagcaaatcaggaaagagttccaataaaaacgacttcacgccaattcaatcgtcacccaatttcttgctacgtaataggagttttgggttgtgcttttatagagaattgaatcgggttttttcttaagattggtttgagatattcttgtgcctttcatccagaaaagtaagatatgccccggtcgatgattggcgatttatctgtagcccgcttggctctgtagctccgtatgcatgcacatccaattaagctctctgatgcaaagatggacatgtttatgagtagattttgggatttctccctgatgtgcaatcatgccaaagatgtctaaattgaatcctaatcatttaagattgatcgtaaatattaattagtttctcccattacaaagctcgggcacatttgctagttccagtctaatttatctttctttactcttctaaaaagaggagttgaggtgattggtgtgttctcacccccacattataagatctttagtggttgcatatacgtggtaacaggatatttatacgttctttgcattttttttatgtgaaaaaaaggcattccatggacgtatgcgctaattggtcttatgtaaccatgtaaacaatcttgaggtccgaggtatttttttttgtatgtgtgtaatcttatgtggccactgcacatgccattttctgcaactagttgaggaatcctatacttattgttaatttatgttgctgcacttttgcagtttgatgttacgttcccagctcttccttgttcacttgttgctgttgatacaatggatgtcagtggagagcagcactatgatatagtatgtacgacagttttcatcagtttccttattatattatatatattttgatctgttttaaaaagtgcttcccaagcactgtatcacataatattctacctgaggttccaaaccatctgctttgcagagacatgacataataaagaaaagaattgataatcttggtaatgtaattgaatcaagaaaagatggagttggtgcccctaaggtatgttttcttacttttaacttgaaaaggtgtacaggtgaaactgttctgtttctttttccttcacattcatcaccattggaactgttcactagtttttatcttagaaaatttgagatatactttagttagccaattaattttataaccagaccttgaacattgtggtctgtgatatttttcttttactctggaaaatagctggtcctattgtgcttccgttataaaattttggccttcatagtgcttgcatgcagccaggaagttattttagattcttctagttgttagtgactattcttgttgtgattttccagaaaaacaagcataggttatttatgctgccactttatttatgtcagtaacctctataaagaaacaaattgaatataaatccaggcatactggcatgaagggatcggtataatggttgtgaaatatgctgtcaaggataatgttcttatatcatatccacgcatagtagtggtgtactggcatgaaggggttgtcatattattattccttactgtatgatgggtgtgcgctatgttggcaaaaacaatatttaactttaactaacttgaatcatggaactctagattgaaagaccactgcagaaacatggtggaagacttgaccacaacgaagtttactgtggatcttgttatggttctgaagaggtaccttgtacacttctctaataccattatgttgagtttgcctatttttattaatgtaactatttatgtatttacacctatattatttgcaacactaatttttatccttcctcttccattgaaattgtaagaaaaactaatattgtttttattaattcatcagtcagatgatcagtgctgtaactcctgtgaagacgtccgtgatgcctatcggaaaaaagggtgggcactcaccaatatagaagagattgatcaggtactacgcacttaaccatttttcttcacacttacaagagattgcataatcttgttcaatcttcctgcacatggttcttagcaaaactcgtccatgtattgccccttgtcatgtgtttgtccttggtctgttcatttgctaactagtcagttcttgaaacagtaatttgtggttgagcattgtgtttccttatcaccacatagatcaatatagaatattactgcactactatcttgatgtcgacggcatgttcattatatatttgtgtaatgaattatattgggagccatggcttgtactgcatctagccatatgctagtaagtagcctgcaacccaattggcaatccaaaatatgtctataaaagttaagtttgaattatagcctctatcataatgttgtttggaaaaaaaatctgtattaattttgatcaaactatcttatagcttgcacttgattttctcttatgttgcaaaatgcgatgtttggtcattttgttgcatgcaacatgaatatgttaacaaattaatgcaacccattttgtcttcctaatgaacttatttaagagtttgtactgcctgctgcctgcaaccaatgcatgcagacatcttctctatcagttttatgcttctatcttatccttaattgacttatgttccagtgtaagcgagagggctttgttcaaaggttaaaagatgaacaaggagaaggttgcagcattcatggatttgtaaatgtcaacaaagtagctggaaattttcactttgcccctgggaaaagcttggaccaatcattcaacttccttcaagatctcttgaacttccaacaagaaaattacaatgcaagttgattttttttcttcatccaccttattgaaccattgataatactgagcataaacaattaaacatgaacttataatggttttactgaaacagataagtcacaagataaacaagctttcctttggggtagaattccctggtgttgtcaatcctcttgatgggtatgtttggaatttagagaagctatatcacatctctctttggtccttattttccatgttcctgatttcctgtgtatttcagtgtagagtggatacaggagcacacaaatggattaacaggaatgtaccaatactttgtcaaggtaatatttttagtatctagtcacgtttttctcttgtggggaactagtcatgctatttaatatggttgcacaatgtcatgctgttggcgtatgaagagatgtcatgctgccttctttagtttatgtgcctcttttgtgcaggttgttcccacaatctataccgacattagaggacggaaaatcaactcaaatcaggtaagcaacaccgttctataacatactttattctgaagccaaaacttttgattttaattctttttttcttttgcagttttctgtgacggagcactttagagaagcaattggctatcccaggcctccgcctggtgtatatttcttctatgaattttctccaattaaggtgaagaatggatatactgattttatgtagtccttgaagcattaggtagcgatatttctgtgctgtctattgattagtctgtaactatgctatctagtctacttagctgcatgctttaaaaccacaagcatatgcctgtttttgtttcctgaaagcatcatgtcagttttctagttacatgtcaatttgtttagctcttaatacatacaattagtcaatataggctatttagctgtatgctcggatgatcgtcacaagcatgcctgcatttatttcctgaaagcaacgcatttgtataagatattatgcaacaattaccatctttgcctgcattcttcgtcctttagattgaagttatgtcatttgcctgataatttgattgttctttggcaggttgattttactgaagaaaatacatcgcttcttcacttcctgacaaacatatgtgctattgttggaggtctgtcatagctcgcaaacttgtttatctttttgtgctttccagaaaacataagcaatagactgatttttgcatgaacatattttccaacccatctttcaattgcaatcgtacagggattttcactgttgctggcatcatagattcttttgtctaccatggtcatcgtgctataaagaaaaagatggagatcggaaaacttggataattccatatttagcatataccctgtaggatcatagtttgaattgagtcgactaatgcttgcctgagaaaggtacgaagtaaattcaggaggaattttggctaatatgttgtaatacattttctagccgctcagacttttgctgattattcaagcctagagcatagacatgtttgtataagctgttgcatcgtcgtatttaactgtgttttgggctaaatgtactgtaacatattcataaaccttgcagaaagatgtatttcgctccatccccagttgcccaccccacaccttttttctttttttggaaaatttcatccataccacagacaatttggtcagtagcaataaataccacaaaattatcccacatccgttttataccacaactccgtcagatttgtttcaaaaatacctatctttacttctttagtccaaagagtacttttcgcggagatgccactccattaatgtggtttcgatgaaatactactcactaggatgcaaaggataaaatgtactaggatgcaaagaataaaatgtcacttagtaggttacctttagggacagcatgcgagcgtgggcgggccctccagcaccgctccataggaggccatgctgaagagtggtctttgccaccacccccgccgtctcgtaggatccacgcactaccctttcttgcctgctctcttcctatggggctacgtgttccccgccttcggtgccacctgcacacgcgcatgtcgtcctcgtggccctgccaccagtgagcactccagcaccactgtccaattcggtctcccttgacgctcccctattccttcctctctctatatccaagggtattttggtcttacaactctctaaactgacacaatatcctaaagataaaccactgagtggtggtttatcctttgcatatttcatcgaaaccccataaggccatgggggcatattgtcctttttctcactttttgggcttgtttactggagcatctccaatagattaactaaatcaggctctccaaacatccatatagccatctctctatctaatttggcaaatttaactcgttactcactccaacagcctctccatctacgctctccattctgagtctatgacagtgagacctatatgcagtcttttcaccatatttccaactacaatgccttcaatattccatccttcagcggcaacaatgctaagaagagggggagaagccgatggtggtggtaggcagcgagagggatggatagccaatggaggcggcacgtagcaagagaagacgagagcggcaacaacagcaccaactatgacggcggtgggctcacgaggtggggaggtgaagctgtgatggctagcgacggaaggagcgagcgaccttggtcggcggtagaggtgcactcgcttggtggggaggcggaggcctgacgactattgacatcggagtaacgaaggagggtgttgtcgagctacccaatcggtggcgtccttgctatcgagctgccccgccagtggtgccctccccacctcaccgttgagtcaccgccccatcctcgccgtagagccgccccgccaccctcgctgtcgagccgtgccaccactacgccctttcacccttgcccctcccttgtcgttgctgcgctgtctcgccctagctcctcctcgccatcgagccaccccgccaccctcattgttgagccgcgttgccaccacgcgctctcgccctctcacctcccttgccactgtcacaccctcctgcccttgttccttcctcgtcgcacccgctgttgcgctctcccgccctcgttccgtctcctccaaccacgggcagaggcctgtgctgggtggccggcgctgtggagccctgctggtggctgcctggcactctcaatgggaagggggcaagactgcaggagggcggagaaaaagaatcatggggcccatggttgacaagtgatgttgggtggccaaatttggtcagggagggaagagatttggctagggagaggttgttggacttggaacacttttttttttatagagttgctaaattttggcttagagagacacttggagaggagatgatctttgtcaaagttaccaatttttgacattggtaaggtgataaactaaataagattttaccattacaataccaaactctgttaaaaatgagtaattctacaaacttcaactcacataacacaccaaattattgttacctctgtccataataattgtatttctaggatttgaatttgtcccaaaaaaaattgttacaatagagtactaatggtctcattaatcacatcacgttcaaatttctttctattttactctcaactacccttccactcttacctatacaccatttaataaggagtatcatagtctatcttttcaaaccttaatatatgctaaataatctagaattataattattttgggacggaggtagtaagatattaaacctaacatcttcatatttttaaccttctcataatttgatattgcccgtctttagctttactaataaatggtgaggtttattttggtaacggtaaacatatactacctccatattaaaatatagcaatctagaatgagatgagatatattctaggactatatattcatagtcctagttgttacattttaggacggagagaatatttttttaagcaagtttactgggaagctttgcaaatacatgcggcgtgcacattggtccagaccaaacgagcaaatgttcgatgtactcaagccaaacgggcagctggctgaaactgttcctgccagcaaagccagcggctgaacggccaaccaatgccgcgctgcactgaactcagcatcagtcgcgcgggccagagcaaacgttctctctcgcaccgcacgcggcctgaccccgcccacgtcggcggccgtcccggactccccccggtcgtgcgcgccccggagaaatcgcgacagggagagccgcaccgcatgcgcccccggccatcccatcccgtcgcgctccccgcccgagcgattcctcccgatcggccgtccgggccccgtccccctccgtcacaataagtgcccaaagtcgacgaggcctttttcacgtgcccgcgacggcgacgcactctt

SEQ ID NO: 16083 - DNA, 17169 bp, Oryza sativa
gtcaagcatttttctagtcatttgtcccttttgacaagttaaagatctcaactttatggaaaacagaaacattcttattttttttataaagttcatgatcttagcaagagaagaaaattaaagggtatattcgcaacagatcaaagagcaatgactaggaaatcagtcaagatcttcccccatatctccttctagatccaaagttttcaggatcattcaggttcctaccatctttcaggtgcaaaatacctttctattgtgatcacaagcaaaatatgcattctgcacaaagtcacagcaagccccagcagattcttttctctttccattgttgatatcaagaagcaaagcgtttcctaccctgtaaacctaaggactcttgaaaccgaagaaaacaaaaccaaagccaatttcttgattaatcgccaaggcaaggctaaataaccctttatgtcagggttgacccaaacacctcacctcatgaaggaattccagagcagcaacacaacggcacgtaatgccaacggtaagaacaaaggacgccactctggaggcaattaaaattttgcttcccaagatacggacgccgttttttctactacgtttgattgcactaaacacaatactttaatggccatacggccatacagacgaatatcttaatggccatatggactaatattcccctaatccttcgtcaccagtggcaggcaatggcattaaccgcattgtctagtggcaacgggagaaactgatgttgactctctgatgagagaggcaggcctgaacatgtctggataatgctcgcatcgtcacatgacagtcgaacacgaccgttgagtgtgcttagttaccttggatctaaagccatttcaggctggcttcaacgctgcaacgcctgcttgattggatcgatgcagatactacatcttcgttgacgagagatcccatggttttagtgtccgttgcgatggtaaatccaacacagtgtttggttcttgatgcctgaagaagcagctgaagaaaactgaggggagaaggatttacagtgtcctttcaagacggctctgaatctcagtatctgaatctgatgattctgatcacctaacattcgtttaattagttgataacttgattatatattactaacagcttttacccatccatgatgctgtactatttgattctgattctgatctctgagccgacccacagctgcagttttgtcattatccaaatggactccatcaaagatcacatcaaaggccataagacagggacatcagcaaaagcgattgtccgttaacccaaccaccgtctaaaatgccatatggaatgattacatttcatctcatctcatttgcccccaacacttcaccaataatcaatacttattagcaaggacacagcacaaaaccattaacatcacaaaaaagagagggaaagaaatcactaatagtaataaagttgttatcaacaggttgtttacctttccttccgtcataatttatctcttcctagcactcctccactagctcctacataaaagaccggattaatcaaatccagggtcacagctgcctccattactaaaaaaaattgtatctttaaaaaaaaggggaaaaaaatagcgattgaagaagcaatttgtcacaaacagttcatgcttcacctaacgcgaaattggacaaagtccatctataatcactagcagtagttggtaaccgtggacaagaagtatacaagctaataagctatggattagtatggaatcatatagctggaaacatgtgttctttttttgctaatcccctccctaattaccacacacatgccatctagctcagaatgatacatgcaaactcagcaaatcatgcacatttttcttattttctcaaaattaaatggttgaattagtcaaggacactattgcactaatgccagtagccgttggaagggcaacagattaacaacaagagagtacatatttcacatgtttgcagctcctgggagacagtccagataagagcatctcaactgccttctagcattttgacaatgccaacttcttcaggctcaattatggaatggattatacactgattactctccagaactaaattatccttagcattgaaggtgcacagaaatgtgcagtatagattaagtaataagacgatccgaaatgctgcgtaattgcgcttaatgtaatgcagtatagattaagaaagcttgttcgtaccactaagtaactgcaagttggcaatgtaccatatatcgtccgtcccaatctgggagcgtgcaagaaagaatcaactgatgataaatatgaaacaattggattagcattataatgatggatcaagtcactgcttttctttcagataagttggacatggcaatgcagatgtagaaaggggaacaagacttagcaaagggggaagcaaaactggttaccccttagctcatccatttgcacattttcataggtgaagcaatagaaagaaaaaggagcaagccaaggcaatcgtggaattgccagtttaacaagaaggccccacagagcacatcgggagatcctaaagattgtcccaaaatcccttgttatcttttcgaacggccaaatcccttgttatccattcactatctgtgcaattttcaccctttgttctatggaaggaacaaaaaaaatccttttagataggcacatgaactgaacaaattgcaaattggatgcagtttcacttctgaatttttatataatggacatagattacatctccggctctccggcttctgttataagaagcacagccataagtttcacttcagaatggcagagagtttctctcaagaaaggtgcaggatttgacaatgtggttgcttaattccattttgtcgattcatgaaatggacagaaccaagtgaagcattccaaatttctaattccattatttgttgcgaggatgatgctaaggcagtatcgaaaagtcgaggagacacacgatcgctgttacaacatggacgaacacctcggtgtgccactgaatcgagctgagctgaatagctgatcagctgaagcgaagagagcagagcgatctctgcacgggccatggtggtgggtggcgatctcaagttctcaactctacgctctcagaagccgttcatctctagcaggtaggtgcggcgcttgctgagcgcgctgacggcctccctgtacgggccgtcgaatgcgtcggcgacgaactcgtcgagctccttcctgccgccgccgattccgccggcctcgccgacgggcttgatgacgacgagcgtggcgccctggatccgcgtgccgtcggagagctcgagcatcggcgcgtaccggagcttcatgttgcaggcggggacctgggtgcggttggccgcggcggcggcggcgagcggcttgtcgcggaactccctgatctggtcgcgccccatgctgagcgtgccctggccgtgcgcgtccgtgagcgccacccgctccagcgtggggtgctccttgacaatctcgcggaggaggtaatgccttgtggccgcggcgatgagggagctgatggtccacaccacgcgcagcttgagcccgccgttggtgtagaacgactccgggatgctcccggtgtcgtcaccctgcgaggcctcgctgtccccggcggcggtggcggtcgccgccgccgcggcgggggcggcggcccggtccaccctggtgccgccgaggatgacgcagctctggagggtgctcccgaacacggccttccacctgagcagcaccccgtcgtcggtgccgacgtcggagacggggagctccatccggaggttccggatgctgctgaagttcttcagcacctgcgccggcgagtggtgctgctgcgcgccgcagccgccgccgccgccgccgtgcttccccgcgcgctccccaccaccgccacccctgaccccggcgtcgcagtgcccgaacggcttgagcacggcgagcagcatcgccttgaggaggtgcgacagcaccccgcggccggcggggcgcgggccggcgaggccgagcgcgtcgtcggcgtcggccgcgtcggtgatgacgcggtcgatgcggaggcaggcgtcgtccacgagcggcacgagcgagttgaaccgcttggacacggccgagcaccgccccagcgagcgcgcgtcggcgaggcggttgaagatgaggagcacgagcgagtccgggacgcggtcgaagtggtcctccccttccgcctcccgcggcaggagcaggtcctccgcgaacaccctgtgcctcgactgcattttcggttccgcgaacaaggagattgtgagatcgaagaggaggagggagggaggtaggtgcggtaggaggaggcgagtgaattgaagggaggaaggcggaggtggtgggtttataaagaggagaggacggggctcgctaaacaccatgactcgctgtcgggcccttgcaatcataccgttacagatgcggcctctcctctcctctgctcggcgtttttgcgtgttgccattgtttaatggtcgaccaattagtgtgtagggctaatggcaactaggcagcaacggtacactttccatcggcaagtttatactggtgtggtgtaaatacatgtactcgcgttcctgctgcatgcagtcaccgcgccctacgtacgtggcgagcgaggctgtgtaatgacactgtgcaacctcataaccggtggcagccagacagaaatggcctgtctgtgtgggagagcagtgataataacacgaatgaaatccgttctgatttctagtggcatcaaactggcttccgttttccacgttttctatgcaacgagtttttcatatggtcccttagaagtaacccactctctatttcaatttacttatcagtctacgtactccgaattaataatacttatcattttagataataacacggtcttaaaaacataactttgacaactagtaccttctattataatatatataaaaatatcaataaatatatggttttattaaagtactttttaatactaatctacacatatggtttttatattctaagataaatattttaaaaattatttgtagtcaaagattttaaagtttgactttacccttgtttaaaacaactaatattattagccaggaggaagtagtatttaatttttttttattaaaaaacttattgttgtcatattgtaaagcacattcagaagtgtctttcccttcatatctttcatcattgtagccatattaataatattacttcttaccaccatgagttttaatgctggctttgggtaatattacttttaccatgagttttaattaattgtaatttttaaccaaacgtcctatttagtgtgacaagcaaattgaaacggacggactatatccatttattaagttgtggtatctcaacataagtatgtatgagttgcggcgcaaataaacgctataatacgtggtatggtgtctctttgataatttttttaaaaagctattgtcagacatgatacatcatgcataatacctctaaagctcgcgtgcaaatgagtcatttgcatcagcctaactagaaaatgtagcaagctagcttaatttgccaaataaaagtttgcacaaaactattgcttgctaaaatcatactaaatcaaactatatatagtcaattattatccaaaaacactttttcccattctttaaaagaaaagggagaacaacagaatctatgagatctaaccatgtacaacacttttggggataaagtctctttacactaatcatgcatatcattgaatcaaaagcaatttaatattctggcgtcactgaagtagaatagagacgataagtgcataatacaattctttattacttgcaactaacttttatatacgtattaatttctgttttgtactaatacatttgaaaaataaaacctttacacacatagttgccattagaaataagctaatatcaaactttttgaacatttaagaactcgaagagaaacaatccaatctgtaaaatatttccaacaaatattccttggactgaaaatgtatactgctaactgtcaactgattttgttggcacaagagttgcttttctcatgaccggtttactgggcagatatcctgctgatcaagtactatgcacggccgtgtacattttacagagtgggcgtgactttctgcattgtacgtagtagcagaaaaaaacttactgctccacgaacggaactaccgaaatcaaagcaagatcagtagcttcattatttgtcctatcataaggacagcttaaaaccaacacgtttccgttgtgtgcaactttagttcgatgtaatagtactacttctgtcccatattacttgttttgacttttttacaatgtttgatcattcgttttatttaaaaaattagtacaaatataaaaaataataagtcaaacttaaagtacttttgataataaaacaagtcacaaataaaataaataataattctatttttttaataaaacgaatgatcaaacattaaaaaaaaactcaaagcgacaaataatatggaacggaggtagtagctgtttaatttgtggtccttcatccttgtgtgctaaggctaatacaccatgcatgcaactaacatcaaggacatgtatggtagtcctgtggtgaggagaattgcagttattttgcaatgttagatttttttgcttgttctaatctgccacctattattgattaataggtagtaggtatcttcactaattgtgcgtctctctgtcctagcttaggttcacaaaggtagatgggagtaggtgctatgacttatgaggagtaggttcaaggtttgtcttcccaactgagcatttgtaccaattgaactttgccaaatgatgcacctctatctctatggctaccgttattttactgggttttgctttcgggaaatattggagttggaaacaaaaccatataggtagttccaatgtctctgtgaaacatgacaaaaaaaatcgatagaagtcatcttttgtttatcttgatttcccaaatgctgatattttcccttcctatgtaaattgagacttggaactataaataagcacaacaatgaacctaatgtagaactttttagataatggattgaaaagcattattgttgttgaagtatactgtacaagtccaagctttggatgaaactagcttatacacttgtaacaaaatatggcatcagggttagaggtataccccgctcaattcctggccagtgaaatcaaataaaggaaagaaaaatctaggagttaattttcaaaactaggtgtagatattttaagcgataactggttttactaggaggataatgcatggatatactttcattttctcattaattctcggtgctaattaaaagtaacttcattgtgattcgattcctaggaagtcgtcataccaattttcaagcttcctcttagctacaaatgttataaaaccggctctgaaattcacaccggaaaacgtcataggagatccaaacatgatgatgacaccgaagcacgatatttggtaacggagttcagccgtagcctacatatcagggacactgaaacaaattcgttgtaagggtgcacctaagaaatttctagagcttggacgaaactttgggtaaatgtagtatcctttctgaacgcagctcctccctcttttccaccatgcatcagttatcccactcagatgcctagagtcactagtctttcggcctcatcttttagcttatgtttatgcttataagccaaaatttaaatttttaactttaaatttggagttgattttagggttttttttttcatcgtagtttattttcagcctttgcttttatatcgctaagaacacgtatataaaagttttatttataaatcattttccatttataaatatgttgtttctcttattccatcaataagcaaaacgatggagtactttagcctttaggtttaccatggtttggttatccggcctcaatcataaaaggaattaagaatacaatataccacacctgaaaacaatttaaatggaagggaagataacctaccacgctcgtgtgcgaatatattggcaacttggcatccatgcaccgatagaggatgaccgtttcaatgggagttttccactcccgcacaggcacccacctcgcaaccgaatcaatcagttgcacacgagcgacgagctagcgtagctgctaccagtttgcaagcatgcgaccatgcgttcgtgcccagcgttgcacgcaaggccagaggagaatctaatcgaccacgtcctaataatgcgatgcgataacatcataacagtattatcactaatctttcagctcactgagttgtacatatggtccactgctggtaacatgattgggaaccaccaaaagggaagcatcacaaacaaacttaatactgcaaagaatatgatatatattcgtattgatgattgatcggtcagcccatgaactgtccgtactcgtgcttaagctaccaattggtgcatttgttttaataaaaaagtatgtgcatgggttttgaatgttttgataccatgttgctgccaactaggctcttcccgagctataaataatcatggtaactaatcatggtgtttcccaaaggtagcagcaggagccaagaaggaggaaggaagaagaatggggctctcacctagaatgctatagaaaaaagagtccatgtcgactccatgatgtggattggaatcaaaactaatcgaagtttagtagttcacttattgttggagcgtgtcatgatcttgtgcctaggaatgttttttaatgtgccattgctttcgtctctctgctggcagtgcacctaattcttcgatggagattcggatattggagaaaaaccttcccacggttgcttcactgcactaccaagtgttgtactgttatcatttgttaattgccaggtagttatcccgcttggattttgaaaaaaaaaacagagaaggaaatgatttgtcggactaatttgtaaatattactcaaactataaatatttttgcaacattgattgagattgagatcctttaacttacccctctaacaaacctcagtgatctacaatgatagggagttagtcggagtaattgcttgtcattcatcggttggcactgagatgagctcatcagtgtaaagtggaacacaatgttagagttatattctagatggtttcttatgcggattcccttcgctttcctctcccggttgtgattctataagccggttcgagatggatacgatcggattcacgctgctatatgtactggcgttttcggtatgaatcgatattgttttctgtgtaattgtctcacatggtatcagattagtttcgattctcgcttccgctttctcgccacgatcatttcctttttcgacgcgtgcgccctctaacttcttcgccggttctcctcgcgacgccgcgatgtcgtctaatgcggagtcgccctcttccaaaactccgccgccttcaacgggttctcttccaccaacggccactgctcatcaagccgctgttgatgaaatctccaaagtcgcagctgaagccatccgggctgccttcatcaagccgtccacttctgtcgatattgaccctgtcaccgccagcaacgttgcggactctgcggcgcgcattgcttccgcccgcagtccgtctccgacttccatccctgctggatacacttatctcctccgcaccgatcgactcttctcctgcggccgactcggtttctggctctgcggctgccctgacctctactgtgccacccgccaccaccgaggtccctgcggcaccaaccctgccggcacctcttgatttggccgccctcctcgccaatgcacagctacaagccggctcggttgcttctcttcatggcatccctatagagcacggaccacgcctccctattggcatacctgtgacaggccatctcaccggcagtctacctactgttcctcaggctgcaccagtactagatgcagagacgactgcctctcttcactcccaggctgtctctgtcctaaatgtgaaggctctcgtccctattactctcgacattgccgcagcaaactattccaagtggcgtggcctcttcctcgtcacgctcggcaaatacgccctcaccgaccacgtcttctccaatgcgttctaccccaaccatgcgcattggcttcaaatggactgtgtcattttgggttggctatatggctctatctccgtcgatcttctggaaaccgtcatgacgccaaacgccaccgctcgccttgtatggctcgccctcgagaaccaatttctgggaaatcgggaatagcgtgcgctccacttgtcagctgagttccgcaacatcatccaaggtgatctcaatgtcaccgattattgccggcgcatcaaatccatggcggatcgtcttgctaatctcggtgaaccagtacaggatcgctcccttgtgctatgcttgctcaacggtctcaatgagaaatatgatcatctcaagactctcctaccgatgcaacgcccgttcccaacattcattgaagcccgctcgcaacttcttctagaggaactcaccaagtctcaccggctctccagctctccggccaccgccttcattgcctccacagcaagcggcggcaaccgttctgattacgggggactacttagttattcttgacgactgctcccattttgtctggacttttcctcttcgtctcaaatctgacacatttcccactttgttacgtttttttgcttatataaaaacacacttttccaccaccatccgttctatccaatgtgacaacggtcgtgaattcgacaactctgccgcacgtgatttcttcctccgcaatggcgtctccatacggatgtcatgccctcacacttctcctcaaaacggcaaagccgagcgcacgctccgttctctgaacaacattgttcgctctctactctttcaagccagtctccccgcctctttttgggttgaggccttgtacacagccactcaccttataaaccgccaccccactaaaactcttaaacatcacacacccttctttgcactctatggtacgcacccctcatatgatcatcttcgagtttttggttgcaagtgctatcctaacctctctgctactgccgccaacaagctttcccctcgttctaccttgtgtgtcttccgtagctatcctactgatcataaagggtaccggtgttttgatcctatttacaatagggtttacatttcacgtcatgtggtgtttgatgagcattcgtttccatttgccgaaaagccttttgttgatagctgtgctgctaatctcgattttttggaggatttttctttacaggaccagccggctgcacctccagggtttactaccaagattcaggataagtcagtacaaaacccatcaactggatccttttccacgactacactacctgcgccagctgttcctccgggatttcctgccagaacatcgcaacaaattattctccaagcgccacatcacgccaaaactagaaccaaaacagctccggcatctcctagatctcccacttctccctcaagcccaacctcggtcggcccatcctcactctatcagccatcgccaccatctagaccatcgccaacatatgggccactgccatcaacagggtcatcgccatcctccgggcccaactcgccctagccatcgccctccacttcggatcgctccagtctctgccttgggtgccactgccgcctgttgtttttcccacgcgcccacggagtgcccggttgcctggtgttcctgcgcctccctcaggccttggtgtgtctcctgttataaacacacatcaaatgactacttgaggtaaagatggaatattcaagcctaataatccctggaatttacatagtggttccctttctcctgtacctcggacctacagggctgctcttgctgatcccaactggcgcgctgctatggaagacgagtacactgctcttatggctaacaatacatgggaccttgtgccaccactaccaaatgccaatgtcgtcactggcaagtggatctttcgacacaagttccaatccgacggtactcttgacatgtacaaggcacgctgggttttgcgtggattcacacagcgtcctggcatcgactacgatgaaacattcagcccagtggtcaagcctgctactgtgcgtactgttctcagcattgctgtctctcgctcatggcccgtgcatcaactcgatgtgaagaatgcttttcttcatggcactcttcaagagacagtttactgcattcagcctcaacaaatcactttatggactcaaacaaacccctcgtgcttggtacaacaggttcgctatgtttttgctgtccattggtttcactgaagctaagtccgatacatctctctttgtctatcgtcacggttccgacactgtctatctcttgctatatgtggatgacattgttctaacagcttcttcatctaacattcttcgttggacaattacttcactacaaaaggagttttccatgaaggaccttggacctctcaatcattttctcggcatcaatgttactcctcattcaggtggcttgttactcactcaacgacaatactgtctagaaatcttggagcgtgcaggcatgtcagattgcaaaccttgtcttacacctgttgacacttcggccaagttctccactgaaggaagtccgtctgtctctgatccaacggatttccgtagtctcgctggtgctttgcaatatctgactttcaccagacctgacatttcatatgccgttcaacaagtttgcttgcatatgcacgatccccgtgagtcccatcttactgctctcaaacggattttacgttatattcgtggcactttggagtatggtttacatattcaacgatcatcgtcctttgatctcatggcatattctgatgcgaattgggctggttgtcccgacacacgtaaatctacctttggatatgctgtgtttcttggtgacaatctcatctcatggtcctctaagcgtcagaatactgtatctcgttctagtgctgaagcagaatatcgagcagttgccaatgcagtagcagaaacctcttggcttcgacaattactccatgaattatatgctccaccctccaaggcaaccttagtttactgtgacaacgtcagtgctgtatatctttcaacaaatccagttcagcatcaacgaacgaagcatgtcgagatcgatctccactttgttcatgaacgagttgatgtgggagcagttcgagttctacatgtaccaactacatcacaatacgctaacgtattcactaaaggcttgcctagtccagtttttaatgaatttcgatccagtcttaacgtccgttgttctgacgttgcgactgcgggggggtgttagagttatattctagatggtttcttatgctgattcccttcgctttcctctcccgattgtgattctataagccggttcgagatggatacgatcggattcacgctactatatgtactggcgttttcggtatgaatcgatattgctttctgtgtaattgtctcacacacaatgtgcctaattttcactccatattttgcatgatatattaccgatgtgctcctgcataagcaagcaaaatggcgaacacctcgaaaaaggagagggtttataaaatacatctccctgcaattatatccaccagcctaccacatgatattttgttatattagcagcaactgaaaaccaggtccctggtggcctggtcgtcacacaatttggagtacagctacaggcagcgagagagagagagagctccgggaggacggaggagccagaaatatccagagcaagtacacggttggcagggtggccatcctgtcctgtgcagagtcacacactctgccgcgagccacggggacggatcggcgtccgagcggaggagaggaaaacaaaccaaaccaaacgaaaccaaaccgggaggaggagcacgacgaggtgggttgtggccgctcgctgtttccacatgacacggcgcggctcgaggaatgtggatggcgctacctgcgtgcagcgcgcgggcgcgcgccggtagaggagacgacgcggggggccatctcatcctcaccatctctcatctctgctcggggacacgccatgtgacgaggtgtgcgcgcctcccggctagccctttgctccgacaattattggcggccgctgcatctgcatgagcggacacgcgccgtgtcgccgcccttgctgctgatgctaatccaataaatctctcccacggtgttttcacgggctatataggttggagtacgatctaaagtagtaagatggtgatgatgagcagcagttttggcctagctaggcgcctcggtcgcacatgtcaaacaggggtagtgcactctgatgagaacgaaatgggggaaaaaggcacggggtcttttctgcctggatcgagattccagtgctggtgccgaaagaaaggggagaaatcgtacaggcatcatgtgtggaaagggcggcggaatctggtaaagagtggacatgatgctgatgctgttctccgacaatgctaaaaggagtggagcttaagtatggttggcaaatcatggcgtgctttagctgccagcaagataattgttgcgacttgcgagaagtaagccgcaaattatggcataaacttgaaagcatatacacatggtctgagcactcaagagagtcacagctcaagtttttagtcaagtcgctcaaaatttcctcctcatccactgcaaaccaaaataaaagcagatggggaaagctggtacattagtcacgcacgacaacagcacacaagcaacagagcctaccagagcatcatatgatcagatctacccacttgcaatccagtaaaaaagaacagagaaactgacaaaccgatggagtaaagcattccttcctcgtgatcaagctgcgccaccgtggttaccatccgctgcattttctgaagcaaggtggcccaccgtaggataccgctctttaaacttatcttcccaatcttgcaagacctctagctcgtctggaccaaggccatccaaatctccagtgaggtcaatagggtcaaacgacatcaatgcaagggcccgagttgcatccctcccagcaaacaaggaatatggtccttgaggaccataaaagagcctgggagttaaaaaaaaaaaactgagaacacaatcatgaataatgaaaataaaactattgatgcatgatgacaagcaccagtaggatctaactgcatctcagagctgttgttcaagagcaaattataataagcatcagatagagctatgcttctgacaaaatacaagcatttcttttatgcacgatgtaatatattaggagatctcattttaaacctcatgtggacgtggaaattgagaagtatgtaagcacagaattgacagttgttgcagtatattgcgcaagtaccagtgcgtttatgactctaatccacaacatggcacttgtggaatatttgtacaaagggtccagaccttcaggtacatatacctaattctttggcagtacatggggatagtggatacccaactagaaaactacagtatgagctctagagtctagacagcatcaacaaataggaatatgcttgttgtctgttgaaatagcagactatctactcctaattgcaggctgcaggacaaacagttcactactaaacaacagttgcagataatgtgccaactagaatataccatttgctagacaaacatggactaaacaaggaaagaccacacatgataaattgggatcaatgagacagcaagaaaatatgtaacttaaggaatagtaaggtggtctggtggagacaaggctacaagcatccaagcataaaaaatatttttttacaagaaatcagaggagaaataaacaaagaaatagtacatcaaaataggtgtaagggagcataggaaaaatggtagagtgaaatacaacaaatgctaaatatggtagtgtatcgagccagctgtttcaaacaaatggtctagttattctctaatattaggcaacacatttaagcatctgtctggtgcacaaaagaaaacttaaagctcatcaaatcagtagagcaataaataggcaattaggcagtaagtaaaaaaaggagtttagctttagaacttagagaaatgatccaacaagacaagagtatcacaacccttttcatctaaagttcgacagtacccactaaatttcttttgctttcacattgaaaggttgtgtaacagtacaaggcatacatggatctgttatcccacattgtacgagcagttatattttgaattaggaagttccatgagacgaatgttaccaataccgatattttacacattaagcaggcagcactaagtaaaagcactaggaacaatcaaggaagctaggatggtgtcatagctaactaaagtggaccagaggtttgaggcttgtgcagacgatccaatatttacagagccacatatgtcccactacagcatttgttggttgcggatatgcagcaagtcatttgaaccaacgcccttggtggtagatataacttcaactctctagtctaagtttaatccaggataatcaaacgcacaacaacatccttacaataaccctagtgagaaccagcaaaaccatgccaagttgatgactgttgctcaaacttgcatagacaataggcaatttcctcgttactcgtgtagagttccctaaaccaatttaattgcaacaacagcttactaagctgataagacccatcgacctactacctcagggctcgcatgtctgaacaaatggaatgtcacaccaccagtttgataacctactcacaagcactctatggtccatgatttcacatacttggaagagctcgtagtttcttaccactttgaaacttgcttaatggctactatactaatgctgctgcctattcgtttcatctacttgttccagcttagatgtgtcttagcagtgtgaaatcagttcaacagcaatcctagtctgccgtaaaccatga

SEQ ID NO: 16084 - DNA, 3554 bp, Oryza sativa
atcaattacccaattaaatctaacaatccccaccaaatttcaaggctcatgagaatgctctctattccatagcagcttttatataccagtgttttggtgaagactgttaagttgaactttcacctagaaaaggagctacacctgaccacaactgaacaatggactatgccttgaattggtagtcttgtgcagttaggtttcactcaattccataactgatactaggcaaccattagtattccctcgggttggagcttataagtcatactccaggcctttcatgagtatctagagatcacccaaatctcatagactgtgactagcagtcgaacttatataggtgtgttccttctaagatgttctgcaggtcaacatctctgcttaatgaaagtcactcggaacacgttgaggcataagccatccttccatacagaatagaagagaagtacatcatgaaaatgagcccatttaagggtctcttctctcggttacacaatagtttgtttcgccatccaaattcacgggatctccgatcacaatggacaggtttccactattgtgcaactctaagtgggtctcaagcccatttccctcgatgcactgtctatcacattacgtggtagccccttggtaaactgatctgccagatttttagctgtctggacatagtccagtgctatcactccggagtttttctgctttctgacatatttcagtcttttctttacatgcctagatgacttcatgttgtccttcgaactgttcaacttaataatcactgtttgattatcacagttcattaggatagctggcactggtttttttttcaaccaccggcaaatccatcaggagttcacgaagccactcggcctcaattgtggcagtatctagtgctgtgagttctgcttccattgttgacctcgttaagatggtctgcttgcaagacttccaggaaacagcgccacctccaagtgtgaacacatatccacttgtggcctttatctcatcagcatcagatatccagtttgagtcactatacccttccagtacttttgggtaaccagtatagtgaattccatagctcattgtaccctttagatagcgcatgaccctttccagagcttgccaatgatcatctcccggatttgaaacaaaccggctcagcttgctcacagcaaatgagatgtcaggcctcgttgcactagccaagtacatcaatgaaccaatgatttgggagtatctcaattgatcccttgctattcttcggtttttccttaatagcacactggagtcataaggagttggagctggcttgcagtcactataaccaaagcgactcaaaaccttgtccacatagtgagattgcacgagtgtaatcccaccctcatctcctctcagtagcttaatgttaagaataacatcagtcactcccaaatccttcatttcaaagcttttggacaaaaagtccttaacctcctcaatcacattgaggctggttccaaaaatcaatatgtcatcgacatataaacacaagatcactccctctcccccatcatagcgatagtacatacatttgtcagcttcgttctcaacaaagccagcagatgtaagtgttgtgtcaaacttctcatgccattgttaggtgcttgcttaaggccatataaggatttcaacagtttacacaccattccctcctgaccttctagtacatatccgtctggttgatccatatagatctcctcttctagctctccgtttaggacagctgtcttaacatccatctgatggacgagaaggccatgagaggctgccagagcaagtagtactcgaatcgtggtcaagcgggcaactggtgagtatgtgtcaaaaaaatcatcgccttcttttgggtataacccttggccacaagccttgccttatacttttcaattgtaccaccaggcctaagctttttcttgaaaacccatttgcattctacaggcttgcacccatatggacgctcaacgacttcccaagtaccattagacataattgagtccatctcactgcgtaccacttccttccaatagtcagcgtcagtagatgaatatgcctcttctatggttcttggagtgtcatccacaaggtatacaatgtagttatctccaaaagactttgcagtcctttctctcttactctttcgagttgctacaatgttatcctcctcaggattttcctcaggcgtttgatcattgtgttctatcggtgcaaagtgctcatggggtaaaacaggttcttgactagacgtgctaggtgtatttttcatgggaaattcattctcaaaaaatgtggcatctctggactcagtaattgtaccaacacgcatgtcgggtactccagagtttactattaggaacctatagcccacgctgtggatagcataaccaaggaacacacagtctacggtctttggtccaagtttacgctttttggctataggtacatttaccttggccaagcagccccatgtgcgtaggtatgagaaatttaatttcttcctttcccattcttcgaatggtattacttccttatgcttcactggaattttattcaggacatgacaagcagtcaaaattgcctcaccccaccattccttggaaagtcccgcagtatctaacatggcattcaccatctcagttagagtgcgattctttctttcggctaccccatttgattggggtgaatagggaggcgtcctctcatgaataattccaaactcttcgcaaaaggacgtaaactcattggaaaaatactctccacccctatctgacctcaaccgtttgattttcctttcaagttggttttctacctcagctttatagatcttaaagtaatgcaatgcctcatcctttgttttcaataggtacacatagcaatatctagtgcaatcatctatcagtgtcatgaaatatttctttccccctttagtcaacacactgttcatttcgcacagatcggaatgaactagttctagtggtgccaaatttctcgcctcagatgccttgtgaggtttgcgaggatgtttcgattgaacacaagtatggcacttggaacctttgaccaaagtgaattttggaattaaactcatgttagccaactacgtcatacaaccgaaattcacatgacaaagtcgcgaatgccatacattggactcatcattcttgctaatatggttcacaacattattattattattacacatgtcatccaaagaaaaacagaacagacctccgctgtcataaccttttccaataaaagtttcatatttagatacgacacatttattggattcaaacacaagtctaaaaccatctctacacaatagagagccgctaactagattcttctttattgaagggacatgctgcacgttctttcccgaagtaaacttcagatcgaccgtaccaacaccatgaacagccgcaagcgacccgtttcccatcaacaaggaggaacctctcccgacctgataaaaagaaaacagggaaatatcagaacacacatgaatattagca

SEQ ID NO: 16085 - DNA, 2900 bp, Oryza sativa
taatatggttcccaacattattattattattacacatgtcatccaaagaaaacagaacagacctccgctgtcataaccttttccaataaaagtttcatattaagatacgacacatttattgatttcaaacacaagtctaaaaccatctctacacaatagagagccgctaactagattcttctttattgaagggacatgctgcacgttctttcccgaagtaaacttcagatcgaccgtaccaacaccatgaacagccgcaagcgacccgtttcccatcaacaaggaggaacctctcccgacctgataaaaagaaaacagggaaatatcagaacacacatgaatattagcaccagtatcaacccaccaatcaggtgaatgaaaaacagagagaactgtaggtaaaaaattaccataccccgatgttcctccgccctcgctaataaccatgttggcagacttcttgtccttgcgatcaggacaattcttcgcccaatgcccaggcttaccgcacacaaagcagtcgcccttggcctttcccttgcctttcttcttaaaattggttgtagcctttggtttgacatcaggcttgactttcttgttgttgttgttgtgggatgcatgagggttcttcttttgcaccaaattggcactagaacctccctcgatatttttgccccggttgtcctttactctcgccttctcctcaacacccaaagagccaatgagatcagtaacgctgaactcttgcctcttgtgttttagagaagtagcaaagtccgaccaagaaggtggcaatttggcaataatgccacccgccacaaacttgtccggcaactcacagttgttgttctcaaattcctttgccagcatctaaatctcatgagcctgttccactacagaacgatcatcgaccatcttgtagtcatagaactgctccatgacatacagctcgctgacggcgtcggaaactccgaacttggcctcaagtgcatcccacatgtccttccctgaaggcatgtgcatgtacacgtccactatattgtcagtgagtacactgatcaatgctccacggaacaggcaatccgaagcctcaaacttagcctcctccttaggagagagaggcggttcacttcgtttgccctgtgaaacatagaagcattgcatcgctgtcaaccacagtagtgcacgtgctttccatcttttataattagaaccatcaaaagcatgtggtttcagtgttgcagcaaagccaactaccgaaaatgacctatcaggtttttggattgttggaaatttggtcataattcggcatattttaatccaaaataacaagataataaacatgatatttacaatgggatttgatccagtgatagtggtgaatgtaatcaacatgagcatgcttaatgtagaataagcatcaacaatcacataataacacaatgttgacattgcgatgaacattaacagtaaaacttctaattgaaataatgtaagaaggttataccccaagaatggtcatccgctggagtttgaggcagtattgcctccgttggtgttgacgggagcctccttctccttgtatccagtgttgccattgtctccagtgttcgacatattggtgaaggtgaagtagatgttgatgaacagtgagtagtcgcgccttgcgctccccaaaaacctgatcgcccgcccgtccgtgcaaacgtcgcagcagcgcgtggtttcggaggcctactctcccaacgtgtgtgcacacacttgtcgggatgggattaccgtagcagcaacagcgttagaaaatggatgaaagtgtgtctcactattctcgtgggaaatcaaatccattctcattttataagaggaatggaagatgaagagtaagagtcatggaataggaagaagaatagagcaactaattgtcatcaactagccatgaaccatcctccactacaccaccatcaaccaacaatcaattaggagtaattgatgtaagttaccaatggaataggaagaggaatagagcaactaattgtcatcaactagccatcaaccatcctccactacacaaccatcaaccaacaatcaattaggactaattgatataagttaccaattccctaatcaaatggattaattctcaaaactcttcatcccattgatatcccataaaagaatgaatacacatgaattcctagcataatgagccttggaatttatttgatttaattgatttaaatggatcaattacccaattaaatctaacactctccactattgctgctgcttccacaccttgctgtgcttgcggctcgtgtagagcgacacgacgatagcgcaacgacggccacaacgacgaagagagacgtggtctagtctcctccttctcccgccaatcgcctcctcctcccactaggctcgctggaactccacctcgtggctagcatcgggcggcagctgaatggcggcaacggctcctgacgccgcctccccctccctctcccgcgtatgcctctctccccttgtcccgttgggcgcctccccttacctcccaagcttcggaagaaaagagcagaaagaaaaggatgctgacacgcgagcctcacattttttcttctcattgacatgtgggtcccataattttttttatttttctttgctgactaggatgctatgtcagcgaaaccaaagatctatactacatccggaccttttttgcacggtttgtataggggtggagatttctggtattagagatcagagactttagatagactctataggccgagatagaactatataagatgccgcatttatgcccaccatataagttatgtattttgtggcctaaataggcccatcatagctcaaaccgtaacaaagaacaccagatcatcgat

SEQ ID NO: 16086 - DNA, 4791 bp, Oryza sativa
gaggaagaagtgaatgagagtgaggatgatatgtgggtcccacaatactttttttttgtgtgaatgacaaatggatcccacattttttttattctaatgccacgtaagcgccatgtaggacaaagacttagtcaagaccgtcacgtaggcgccgcgtcagccaaaaccaccgagggatattgtttacaccggttttaatagttgaaggagttgatatacctggttttatgtttggaggatatgaatcgtactcggacgatagttaagggagcaagtatactttttcctcgcggaaatatcggatactagccgaacgttttgcgtgccgggtgtcggagatgaaaactccgaccccaaaacgctaacgtggtctcactgttcgagcgagatcagcgccgtggatgcccgtatatgctcttcgtttttttgcgattaccccgtatgctctttcgattatcttgcatatcgtgcccttcgtacgaagagagaggccattagttcatcatcaatcatgcatcagatagagctacggtgattaagtttcttttcccttgcgaatgtagtactaccaagtcacgctctgagttttttcccctccaacggcttgatcagcctacagtgcaagtaacgaaagagcagataaaacaatcatgaactgaaatgttacagggtatacggttgtacatttaggactgtagttggtcagacaaggaagaacacagggaggagatcaggacacagggaagaaaggatcagatatttgcagcgtttgttatatagttatcgttggttaggacaactttcttcgcatagtgttttgtcattcgatgagaaattacagttttacagcgttccagataatctgccttggaacaaggttcagtatacccttcgtatatagaaatcatcaaaccaaagttcctgttgcacacggtactagcaccggcattgcacggagcagtatttttggttgcatctgctactgctagttctttcagtatccgagtagttacttctctcctctcatagtctcattagacgagggaaacgtgatttacacatactcacaaacacatgaaaaataaaaatgattgacgacgttggatctagcatcacatgaaaaataaaaaaaatattttttctttgatgggaattctatacgattagcatgcaaacagccaaacagtaacttacacattgttagggcctctttgatttgaagaaaaaacatagaatttttagaggatttgaaccatatagaaaaatttcctatgaaaccctttaaaataaaagattgaatcctatcatatcctttaaaattcctatggaatggacaatcctataggaattttgaaggaaatttagcaagagctccaacctcttgaaaacattcctttgagtctatctctctcatccgattcctgcgtttttcctgcggttcaatcaaacggtcattactgtgttttttctgcgttttgcaatcctctgttttgcatttatatttctgtcagaatcctacgtttttcctattcctccattttttcattcctaatattcaaatgacccttaattcacccggcaatcaatcggattagaaaaaaaacaagcaaaataaagagaaccgtcatagagcagtccgcaacgccgcaatgctcgcccgtacgccgctccgcctgcccatgccgctacacgccgctgcgcctgcccatgccgctccatcgccccaaccgcacgcccgccgtatgacgagtcggatccggcggtgccgagctcgtagccgctggatccggcgttttgcgagggccaaagagcagcgagagagagagttggaaggcggtggtcgtcggtgaggaagagtagcggcgaccggcgtggaaagtggaggcggcggccgacgacgagaagaggagtggaggcaatccatccctcatccccaagccctcccttcaggccggaccttcgtccccatcgtcccggtgatgtgaagggaggggaaagcagcaaccgtcgttgcgcaacggcggcgacgacggcgacgacgctcgtgaggcaccgaccgagcgagcaaatgaggagtgggaaggtgacgggatgctcgaccccctctcgtcacgctgcacccactggagggcgcgggtgcgagccaggttcggtgcaggtaacgtaacccaaacacgcccttatccgcgcgcctcatcgcctcgccaagacgccaaccaaacacacaccccttatccgcgccccgcccgcccaggaaatcccgcgcggccaatcacagcacgcccgcccgtgatcgcgagatccgacgccccacccgtgatcgcgatcccactcccctccacccgcgcgggtacccccccacgtcgcctactcgcctcgtctccccgtcatcgccaacgtgtcgcggctttccgccaccaaatcgatacggaacccggcgcgcatccggtcctctcgtcgaggcgagaggaacctatacattcgccacactcccctgcttcgcttgcttgccctcctcttgcgtagggaaaaggaagaacacaagagcaagcgagagcccagaaatcctatcctcgactggaggtttttgtgtattgtatagtggtagatttttttactgacttgggagttgtgtgatagtgtgggttgcgttctttttttagtgtgtaaacgatgtcgtctttagtgtcgacgccgttcacgacggcaaccggggtgcagaagaagctgggggcgcccgtgccgctccactcgttcttgctgagccggcggcagccagcggcgggcgcggggaggggacgcgcggcggcggcggcgatacggtgcgcggtggccgggaacgggctgttcacgcagaccaagccggaggtgcggcgcgtggtgccgcccgagggcgacgcgtcgcggcgcggggtgccgcgggtgaaggtggtgtacgtcgtgctggaggcgcagtaccagtcgtcggtgacggcggcggtgcgggagctcaacgccgacccgcgccgcgcggcggggttcgaggtggtgggctacctcgtggaggagctccgggacgaggagacgtacaagaccttctgcgccgacctcgccgacgccaatgtgttcatcggctcgctcatcttcgtggaggagctcgcgctcaaggtgaaggatgccgtcgagaaggagcgcgaccggatggacgccgtgctcgtcttcccgtcgatgccggaggtcatgcgcctcaacaagctcggctccttcagcatgtcccagctcggccagtccaagagcccattcttccagctcttcaagcgcaagaagaactccggtggcttcgccgatagcatgctcaagctggtgcgcacgctgcccaaggtgctcaagtacttgccctccgacaaggcgcaggacgcccggctgtacatcctcagcctccagttctggctcggaggctcgccggacaacctccagaatttcctcaagatgatcgccgtctcctacgtgccggcgctcaagggcgccgacatcaagtacgacgaccccgtcctcttcctcgacgctggtatctggcacccgctggcgcccaccatgtacgacgacgtcaaggagtacctcaactggtacggcacccgccgcgacaccaacgacaagctcaaggaccccaacgcgccggtgatcggcctcgttttgcagaggagccacattgtcaccggagacgacggtcactacgtcgccgtgatcatggagctggaggccaagggtgccaaggtcataccgatcttcgccggcgggctggacttctcgggacccacgcagcggtacctcgtcgacccgatcaccggaaagccgttcgtgaacgcggtggtgtcgctcaccgggttcgcgctcgtcggagggccagcgaggcaggaccatcccaaggcgatcgccgcgctgcagaagctcgacgtgccgtacatcgtggcactgccgctcgtgttccagacgacagaggagtggctgaacagcacattgggcctgcacccgattcaggtggcgctgcaggttgcgctcccggagcttgacggtggcatggagcccattgtgttcgccggccgtgaccccagaacaggcaaggacatttccagattccttttggtctcactcacctacttcgcaggtaatcctgtacttgtagctgagcctgaaactgttttttcctctgtttgatgcagggaagtcacatgcgttgcacaagagggtggagcagctctgcactagagcaatcagatgggcagagctgaagaggaaaactaaggtacgcaattccacacagttcctgtataaattgtagtacccgtatagaattgcattgtttctgcctgagagcaaaggcaaccacaaacgtcacatctggatagttctgaattcactttcatatcttcttgaggtttttgagggatttaagattgcatgctaaacaaacatattagcttaacaacttcactgtcatgctcaaaactggtattgcacatgcgccattcatcccatgaagagctcttgtacatttgatgccgcaatcctgatgtgaaaattccagtaatgcataccatcacatgatattaagttcaatgaaaagccacgtgttatgcaatcattagctgccaactgaaagttatccttcaaatgaaacaatacatcatgtgagaacaaaaggctcaatacttaaggtgcataaagtatgttcaactgagaactagaactactcgtataatcgatcaatcaactcttccatcctctgaagaactcatgtacataacggtgcca

SEQ ID NO: 16087 - DNA, 1339 bp, Oryza sativa
ggtcgtcgttgccgtagccgaaggcgaaggaagcagcaggcagcgccagcaccggtgccagccggaagcagctgctcgcccccctcagcggcatcgaaggcaagacgacggcatggccaagatggtgtcgtggaacaggcgatcctcacggcagggatgtagcagcgatgacgaggctagtggcgccttggcggcggcggcggaggagattctgtggaggaaatgtcggccgctccagttccctggccgcatcacctatggctcttatggcaaccagctgcaaggcttgccggccacctctccccctctccgcttgcccgcccgctcgaccgggctcgtcgcttgcctcttccccatctgttgccggtagctctgttccctccttttgtcacgaggcgctcagggtggcggcgacggagcctctcaaaacggcgaaggtcttgcgtgctcaccggccggctctccctcatcgccgacgccctcccaaggagggtagagtagagtagagtgagaagagaaaagaaaagaaaagaatagaagaaagaaaagaaaagagaaaatataagatagaagagatttggggtccacatttttttctttacatgtgggtttcataatttttcatatcatttttctgttgactaggagccacgctagcgaaaccagagatctatactgtctcaggatcttttgtgcacggttttgtagtttaggggtggagatttctgatattgtggactagggacctcagacagacttgacataaagtcgagggatgttaggtgaagttattccttatggagttgggcttcggccgtcccgacatctgaattcgtacaaggatcctagcagcaggagaaatctacaccaaacattgttctggcttcaacggacaagatgcatgatcctatccgtagttcctgaccataatagagcacacgtccttggaattccaatttcgagatccgagtctccgagacaagaacattgcagcagcagaacacgcgagaaaattaagcaaagcgtcgctagtggcacgtgtccgcttaccacgcattcgcacgctcccgggcgacgtacgtgtcactagccccagcctactcacccgaggcacacgtgtccacctcaccggggcacgtgtcgcgccgtcccctctcgctccgccttatatagccgcttctgccatcgccggtgccgagctcactcgtgcactgcgaagctacacttaccactgcaaccactgatcacagagctagaggttcacttaggcgaagcttaattacacagagcgcccatggcgtccgggcaggacaggagggaggcgcgggccgaggccgac

SEQ ID NO: 16088 - DNA, 6151 bp, Oryza sativa
cctcccagacggcggacgccacccgggacaagctcggcgagtacaaggactacaccgccgacaaggcccgcgagaccaacgacagcgtcgcgcggaagacgaacgagacggcggacgcctcccgtgacaagctcggcgagtacaaggactacaccgccgacaagacccgggagaccaaggacgccgtggcgcaaaaggcgagcgacgcctccgaggcgaccaagaacaagctgggcgagtacaaggacgcgctggccaggaagacgcgcgacgccaaggacaccaccgcgcagaaggcgacggagttcaaggacggcgtgaaggcgacggcgcaggagacgagggacgccaccgccgacacggcgaggaaggccaaggacgccaccaaggacaccacccagaccgccgccgacaaggccagggagacggccgccacccacgacgacgccaccgacaagtaaactcgccggaacaccatccgcaagcacgtagtgctcctagctatcgataataatgtccacattttttttgttgatgatgcagggggcaagggcagggcctgctcggggcgctggggaacgtgacgggggcgatcaaggagaagctgacggtgagcccggcggcgacgcaggagcatctgggcggcggcgaggagcgcgcggtgaaggagcgcgcggcggaaaaggcggcgtcggtgtacttcgaggagaaggaccggctgacgagggagcgcgcggcggagcgggtggacaagtgcgtggagaagtgcgtcgaggggtgccccgacgccacctgcgcccaccgccacggcaagatgtgatcccccatgagcgcggtggacgactaataaaaaaaactcccagcatgttaacctttgtgtttcaagtttcactagctgcttttattttgctttcgttaagtttccactaccgtgtatgttccttctggtaatctaagtgcagtggtgctgaaatctttataaagcccttcagtttaccgcttaccacttttgcttcaaatgtctcgtgtggtttagtgtgcatgttcgttcttttctctggttctggatttgggatattatcgtgggcacgtttccaaatctctatatatgagcctcccagaatgcttttctaaagtaaattttcgaatgctagataatcctgaaaatctcatgagaatctttttttggcgagggagtgctcgtttaagttcgccaatcgccaccgatcggcgcggctcgtagagaacggatagagaagtcgtgggctcttggacttgtggtggtgaactgtcgtctggtgatgcatcctctgccgcacaaaccaacgtgaaaataagacaatcgctgatggcctgatgcccccgagtgaaacgtgattgagctcagcatctctctcaattcgtccatccgaatcgatgctgctgctgccggcataatgcgaaggagcgagatagccagtttagccacgcaccagaataccagacggttcgaagtgagaaaatccgagcaaagtaggactcacatccgtttccgtttacgtttataatgttcccattggatattataagtcatttgatttgattttttttctcggttagtttgatcaaatttataaaacaatatacttatattttttttataaaaacaaacatattatcaaaataatatatttaatattaaatttaatgaaactatctctactattataaaaattaaaaatgtttttgccaatggctcggtaagtcttcgtgtcccgaatctgcctcgcacataatcactatcagtttaactatttatgtgtctctaatccgtatctgattttcctttttccatcgtgtggtcagtccctaacggacttagactcatacacggagccgctctcctcatccgtttccaggcataggggtgtaactacgcatccgtctggaccacctgatccaaacaccctatcacacgagcagcctacctaactaatggcacccgtaatggcacccgtaatagttatctataaactatctacaagagatctatgtcagtatattttcctacttggaagagattaaatggagagaaagagcagagctatctactaacttagagatagtctatagagaaaaacgagacaatgtattagagagctatagatacccatatagacatactattgaagtggtttactattaatctagtctattgttgagatgtacatgttttatagatagcacattactttaccattgtggatgctctaaggctgtgttcttatcttcaagttttcaacccctctctctcattttccgcactaaacggcgtgtttttttaaaaaaagtttctatatgaaagttgcttaaaaaatcaaattaatccatttttgaaaaaatagctaatacttaattaattatgtaataacgcgtgctttgttttgcgtgcccgggagaaggggttcccgaacgcagcctaagcaggcctgatgaacatacataattttaccatctcatatttttctttgcaaagcccccatttctttgtcagctagccttccttgccaactttgcacatgtatatagagtcaacattcacatatctatctctaccattacaaaaattgaaaatgcttttaccagtatttcggtacgtcatccatgtatgagttggttttttaagttcgtttgattttgaaattacacatctgtatttgagtcgggttttaaatttgtacgcttttagaaatacggaaggagctgtataagatatctctttaaaaaaactcgcatgctaacttgagatgattgaactcctgattgtagctcatgattttctagaaagaaatatatccaagcgaattccaatagtgaatttcaccttaactaaactgtataataacaataataagattaaaataattgtcacccgttgcaacacacgggtattttttaaaaaatatatataaagatgaacatgttatcaaaataatatattaaatttggtgtagaagatgttactaattttcctataagcaatgctaaaaagtaactttgattaaaaagaaagttaaacgatttataatatggaacgaagggtgtagcatttaaaaaagaaaaaaaaaacaactttgattcgggacaatgcacaaacagtagtacatactacatagtgtgatcaacttgatgcttattattgccttgaaaggcgagtcataagttacagaaaatgaacactatgtacacaggcctgaatttttctcttgaacaaggaaaagataaatatgcactcagatggtcagacaacaaaaggccccgccaacataaatcagttgcagatccggataacttttttcacttgaatgccacatacagtcccttacttatttggattatttgtccagcattgtgtaagacggcaggtcattcacctccaatacatcctctagtactagttcacgctccaactgagttcttgtagatttcaatacctcctggcaccacgaaaacgaacagataagcatgccattgattaaaacatacacacagtaactgcataatatgcacctactcgggcttacattgaactccatgtaagaagcacgtttcacaagccactgagcatcgagaagccgaaaggctatgcagtagaggtgatcaaatgcattctcatctcgtccaagcagttcaacaaaacgaactcctgactttgaagatggaacacctgcacagttcgaagagcgttaaaccaggggaatgggaaccacaccaaccattatagtgtaaagacgatttttggaaactgagatattacttgactgtagatccagcatttggatcagcataaatgaaatgttgatcccagcaaccgcaaaagggtactcccagtctgctctctgcccttgtactttgttcagaagcgcctgaaaggaaccctgtaccagaataggtgagtaattatacaaaaacaaacagcattaacaaatcttctcagaatatcatatagaaggtatttacaggatagttcctagcgaaaaatatgaggttctccaatgatatgaatcctccacccctgcgtggacaatatcagcattagatggctttgtaactgaattcgactggagcagaaaatggaataaatggaatacctgaagtcagttgatggatcagtgccttgccaacccatctccttccatagttctgatttcagtggaggaatgtcacggttggggtatgctaacctccaaagttgtctcaaagcatcctaatagcaacaatgcaaaattacttgcttgaataagagggtcacttgtggccacattatagccaggcctaagctattgaaataggtttacatacttggtgttcaacacgggagccatcgaaagggatttgcaatctagaccttaaagtattcagtctatcttcctgaaagaaaattgtatacattaaggttcagaattacatcaattcctgtgtgtctattataccttttctcaatacattacctgcaaaggactaagatacactggactgctgttctggttgtccaacgaaaagggaaacaatctaccaaatagtgatccagagccaacaataatatttgctgcacgtagaacagcaaaggggaatcagtatcttattcttgaaagcactaagggttacatctgtgaaatagttgcaacacggcacaacaataccacttgtagtgaatcagagaaaaaaaattaaggcatgggtttacagaatggaaaaaatactacttccactgctacgatttcttatgcaagtgaacattgctacatcaacaatttatttgcatgatttcaaaaaatgaaacagggtcaatgatatgacacggacatccaaattagcaaacttacttcacaacagttattctgtttagtcaagtttactaacccacaagaatgtttttgcagttcttatgaaaatgatgacatcagcaaatgaagataaggtactaaaggctccataagagaactaagacatgatgacagctgcatccattattcttgaattcgtgctaaagcagcaagccagcaattatataaagtatggcatgggcagacacaaaaacagaactatacctgtgtgcattagatcagcccgacaacctgactaccattctaccaatggttactcatcaccaatttttttttaaaaaaataatgcttgtatgagacaaaatcataaacatactgtgtatgagaaatataggcacattaacctagaatatcaactctgaaagatggtgtcaatgggtagcttactgaggttataatcagtaaggattatctgtaactcattacatgtgctccaaaattagaaaaccaggaaacagaaatgaacaatgacaggattggcagccaactagtgtcaagtgggacaaaacttattcaaagttgcaaattgcaagtgaacagtacctaaccattgtgcccattgcgcaatcaaatttgagaaaagaaatgaccagtgtagctgttccttctttctatcatcatcccataagtcttgccttctgggatcatataccttcagatggcggaaaattctgtcaataccttagaaaaggatatactacagttgtgttcgtccgaaaaggtagtagcaatggtaaataaaactatgataagaaaggcctgacctctgatccaccagtatcagagctagatttccctagtaaaggttcattaagggaatctacgctggatatgtcaacatgctcattcttccttccatcgacatctccatgatggagtcgcctccttagattggtcattgacatgaagtacttgtaatctaaacaaacaaaacggcacacaaacaaaaacgtagaagaatcgtcaatgtaataacaagtgaactattgtgtgttatctaacaaaacaaacatctcacaaatggaagacagtgttatgaatgttctactattaatcacattatatattcatgtctcatgtgtaagccaccaaccagaagcctcataggctcacagcaagtaatttagattgccaattttatcctcctgcagagaactagacaaccacagattctcttcgaggtgaacagtccatccaatttcgatctaccactctacagaacctttgcaaactccaatttttcagaagtttccatatgccccccc

SEQ ID NO: 16089 - DNA, 12551 bp, Oryza sativa
gaagtcgctggccattaaatgaaggttgaaatgggcgtccaccgggaaagcgggcgagcggggcaggaggcgtgtgctctgcttgtcagaggtcacttccggctgtagacgagccctcattgtaaaaagcatgtttcccttcttaggcagagagaggcccatgtggtgacccctgatcagataaaaaggaggaaggggggttgggactctggggaatgggttctagagcctgaactctctcccgctctccgctctctgtattccttcacgcacagatccaccagaacacaggagtagggtgttacgcttctcagcggcccgaacctgtctacgtcgcccgtgtcttgtgcatttcctctcccgctgacgttcctcagatcgagggcgaagaacctcacttagcgcccccggccgaaccggcaaaggggggcctgcgcggtctcccggtgaggagccccacgctccgtcaattatttattttatttgtgacttactttactttattatctacggtactttaagcacaactttttattttttatatttgcaaaaaaaaatgaataagacgactggtcaaacgttacaaagaaaaactaaaaatctcttatatcgtgggacagattgagtaatagattggcacgggtacaaccaatacgtcacagtaccagctaagcagtagtactagtaattttgtgctggcgcaatttctggttgagactggttgttagtacttgtttgctatcaatatcatcatcggacgcacagaatacttgattaccacagagacggtagcagtgaggatggaggttagtctccgggctgccgatattttaacctcgctttctcgcggtaatgacaaggtgacaaccacccccaaaattgaccgcaggctgggataatattttccgaggagaaagattgcaaccaccatgcctatggggtatattttttttatcttcctcaattctccgactccaaacatcgataatacacttgggtcctctcatcctatcaatgtttcgctgcacgtactggcgtactgctgcaaccccactcctgttctcttttctgagcgatgaacagtgtgctgcagctgaggctttaaaatcttttcatgtttattctgaacatacaccggctacatagtgaaagcaaagtcataacatatattcgtattggatagtactacttcatccgtttcacaatataaatataagttattctagcatttttcacattcatattgatgttaatgaatctagatagatatatatgtctaaattcattaacatcaatattaatatagaaaatactatattttttatattcatattgatcattaacatcaatatgaatatgaaaaatgctaaaatgacttatattgtgaaagggaggcagtagtacaggcagccactcgtattagattcggaactgaagacacacctaggacctgaatcttctgtggcaacccgttgtgcatcaaattcggtattctcgaaaacatataacaacgcacttataactttttcttgcgatgaaaaatactataaaattaaaggttccttttagaacagcaaaaaaagaggaattttggataattgaaatttagttggaaaaagatccctagcttcatattctctgaaacaaagaaatggctccgaatgcatatggaatacaaagaaatatctcctacaaaaacagacctcatgttttctctttattccgtctcaaattcctgcgcttttactatagtgctatcaaacaataccttttttaataaattcttataaaaccttaaaatttaactacttcatctgtctcaaaatacaataatccagaaccggatatcatattttttattactataaatatggacaaatagtatatacatattcatgctactaaagaatttagagaggtgacacattctagtactgaaaaatattacatcttatccgaatctcttgtattatacgatgtaggaagggaggaataacatagtactcgtcgtttgagtgcgtttgttatccgaattccagtactcaaaaagattcgtgagcggtaaataaaaaaaatcaccgcggtggagagagcagtgacgctgcgactgttacgtggggccttagactgatgtggcgggagtacctgaataacctgatctcttgtgtcacattggcccccgtctctcttgtgcagattctgcagctgccatctcccccgcgaataaaaccccccctctctctctccctctgcccaccaaaggcaaaggcaaagcgaaccttggtcacagagctagaaaggcagcgcctctttctttctttcttttccagcaccgcgcgcgcgcggagacgcacagcacaggcgcacgcactcgtctttcgcttctcgcctcgtcgatcgctttttggattcttcccaagcgagagagagagagagagagagagagggagagaggggcatcgcctcctgtctgcccccattggcccaagcgcaccacccccctttgtggaatcctaaattcttgcctcctccccacctccactctcctctctgcttcttcttgccatgcgccgccgccgagggacgagggtcagtgtgggctctgtttgtgtgggtggtttgtggttgttgtcgttgttgttgctgcggcgtaggtcaggtgtttgattgtttgatcgtgagggttggggggggggggtgcgtctcggggttgtgtgtgtcgcaggtggtggtgatcgcgcgcgtggggttgggggtggggtggatgggagctcaggcaatgtcgtcgcaccaagggagcgggggcgtgtcgaggcaggggtcgctgtgcggcctcgcgctgagcgaggtggaggggcagctgcacggcgtgaacctcgacgacctgctccgtacgggtggcggtggggcgggggcgggggcggcggcggcggggaggaagacggtggacgaggtgtggcgggacatacagggcgcgacgggcaacggcttcctgcggccggcgggggcagcggcaggccagatgacgctcgaggacttcctgtccagggccggcgcggactccgggagcggcggcggcggcggcgccgactgcgcgcgctgggcgcgcgcgcaccaccaccacgtcgggcgccccgtgccacggcccctcgggctgggcgccgggccggtgctggacgcgctgtaccacgacggcccggtgtcagggagtaagcgcgcccccgccgcgggtgagggcgccgccgcggagaagacggtggagcggcggaagaagcggatgatcaagaaccgcgagtcggcagcgaggtcgcgcgccaggaagcaggtgagctcctcacaccgaccatctcgatctctctcgcgcattggatcgtgctcgcgcccgctcaagcactaagctctggttggcggcgcaggcgtacacgaacgagctggagaacaagatctcgcggcttgaggaggagaacaagcggctcaggatgcacaaggtatgcttcgattcatcatatgaaaatatgaaattatcaacactccactactcaaccgcagcatgcccagaaatatccatgaacttgaactccattatctaaaaatattgcatgaactttcctgctcgtgtgccaaatcaggtgtccaagcctgtttttgttcatcactttcaggaaccttaaggatttgtcacatactagcggtattataggatggagtttctagcctttgttattttgggtgttcttttgctttctaaactcatttggatttctagtatgggacaaattaagacactgtcgcatgtagtaggtcactcaggccaattcattgctaatgtgctaagatttttggggccaccatacaatgatgtataaatggggtctaccatctatttggttggaacaaacaaccgggttgttttcagcggtggagccaggattgccactctaattccattctaagggacaaaatgcaacatatctagtatagtacgtgcttagagaattgatacttttatgattaccatattcttgtttggtttcaccttaagtctacttgagttctctttaggcaggtcttggcacaattcttttctagcatgatgatgcaagcttgagaaaaagaaattgcaacagatcgtagttgtgctagcaaatcaagcattcagaaactataactgcctgccttcaactgaaacacccccgtacgctcgctgtttggtttacagggatttattccaagcccctgtcacatcggatgtttggacactaatttagagtattaaacatccactaattacaaaactcattccataagcttggactaattctcgagacgatttttttaggtttaattgcgacataattttgacaatgtgatgctacagtaaacttttgataattatagattaattaggcttaaaaaattcgtctcacggattagctctcatttataaaattagtttttttattagtctatatttaatactcttaattagcgtccaaacatcctatgtgacatgggctaaaaagttttagtcccatctaaacaccccctagccttttgttttatttcgttgtctctgcgtgattggcctcgctctgaagtggttatgagaggacgtctggcgatgcacggacgatacagttctgtccaatcaaatggtgttccgtcttgtcctctgttgcatcttgcacaaaggaaaatttctctcttttcctctggttaataactatagggactagctatatagtagtctaacatttgattgagaattattctaaaaatctgtcaaatgtaaatacaatacaattacaatataattttaataattataatatatttgtattctaattacggtcctcatcgtttggcatattcatatgcttatcaaccaaaaattaaattttcaacgttaaatttagagctgattttagggttttttcatcgaagtttattttttagcctttgcttttagatcgctaagaacatatatatatatatatatatatatatatatatgttttattcacaaattatttttcgtttgcaaatatgtcgtttgtcttattccaccaatatgccaaacgatggcaccctacatatgtaactaacatgcagttacaataaaaataggatgtaaatttgtgtgaagtcatgggtaggcccgcggggaggggtagtcacgtgcccgcattgtcacaggatcgatcccaaattatcccacccagtaccgtgcttttttacttttttttcttagaagcacaaatcttgatgtgtatcaaacggctaacaggaatctcaaacacatccaacggtttagaaactgagatttaaccatcaattttctgtcaacaaactgttagcaattccgataactatatactcgatttttcaaaatatcatccgaaaatagttgtgctctacaatgctgcctttgcttgatgatgagttgatcactctacaattggtgcccaaccatttctttcacaatgcctatcgtgtgtttgtcggacagacactctttctgtattccacttgactaaaagttggtgttctttagtataagctctttaacataaggatggactaaactaggggtttagagaagtttattacatcgtatgtcagctcgagttcctccattggcatgcatcagcatgatactaggatgatggaacttcatgtcaataaataatattgggccatccttttcaggttagtgtgaaaattctaccactatccatgtgctaacaaagtctgcacatctatctcgaactgcacctctctcatagtttagtggttttctttcacttgtttatacgccttcctatgcccatgtcaagaaatctgaagacagtatgtaacgttgcaagtggcaacttctccgaaagacgagatttatgtcctatactttgcatctgggagactgggagtatgaaacgcttgcctcattgtcctaaattgatattgctcggatatgaaacgttcagcaacagataaacttagttaaattcgaaagggtgcgtacgtttagaaaacacaaattgaggccgtgtttagttccaaaataattcttcaaacttctaactttttcatcacattaaaacttttctacacacataaacttccaacttttccgtcgcatcgttttaattttaacaaaacttccaattttagtgtgaactaaacatagtccgaaacgatctttttgtttgtatgttttctcttttttttttccgggcgtaaagtcgtacttaaggcaatagtagcactgctttgtttacccacatgcagcgcagtctgtaaactgcatgcatgcagcatgcagcagattcagacttgcagtacgtggaaagtaacaaagctccgtttgcgagctggactagtgaactgtgttctttttgacttctcagagaacgatgaactagtaggcatttgctctttgagatctgcttcaacagtggagatttcttttcatagttcgatgcccaatagtgacactgatggtttactgtttgcaaactgacggtgtttttatgcttgctacaggcacctgaaccggtagtgcagtatgtgccgcaacaggagccaaagaatcagctccggcgggttaactcggccgacttctgaatcatgttaatagtagaagtaagctgccctggaattaaaggtggttcaagctgtaactgccatgttgaaaattacttagctagtaagaacacccttttctctgcagtctccagattgttgggtgctgttgcaagagtgttgtactcctaacttgtggtttatgcagccgcagcctagctttcctcccgctggtgcaatgctttctgtagcctgtgattgcaagagtgccccagataaactgtaatgttaccgtattcaaaatgggaaaatggcaatgctagtccaaaatcatactccaactatttttcgcacaccttgggagtgtagacaaagcagacaaaattcaggatagttttgttttgctgaagaaaaataacagaaactttattcaattcaaagctgagatatgatctatacatcattcttatcttgatttataaaggaactggattaacataagtcttcactactgatacatcaactgctgtcagcatcttcttcaggcagtatcaatctaaggtcctcattgtccctgtagacttgtaccaaagcggcagccttgtatgcaaagaaacccatcattcctggaacaagctgtataaggaggagaaacagttgctcaggacatgttagggcaatttagctaacaaagttcaggataataacccttgctacataattgtcacagttaacaagggagataaatgaaatgcgtgtaattcataagatggagttgaatctgatatatgcactgcaatagctcagagctgtgcttatacctcaaaatttaaaatgctattttgaaagtgatctgacaaggttgacaatccaaaaaatatagcgggtatcacaagccttggagacgaaagagctactgaaataccacccaacaccttctctattgtattcttcaaatcctcgcttcttatgccgattctagcattgtcacatatatagggacaattaatgacaaagtgagggcaaaagattgataataaaaaatgattaacattttcaaacctaccttttcactttcttcttcataaaaatttctggaacatctttctttgacaaattatctgtgtgccgatagagaagttgaagatacaagcaactgttcaacataatgtgactggttagattattttttatcgttgatagttgcaatagaagttaacccagtctgttgagagagtagccccagcgacattatattgaaacaaggtaccacaaacttctgagttcttaagttcaataggaagcaaattgagcttacctgaaagcaactccaaaagcataactgacagcagcctgttcaattggagcgttacagattcagtcacaatcagcaaaattatagatagagttaagccatttgagctcaggagataactttgattctgtttcatatcggttggttatgaagttagtggaacaggagatggcttaatgttgactcacactaccacaataactcgaaactacttagtcgttttaacgtcggcaaagagtaatgtctaatttgatgccaattataaatttgaaaaatctatttacctccagagaaaagactaggagacagtataaactgcacgcagctccaattcctgtggtcaggagcaatagttcatccttaagctgagagagattatgattgatgaccatcagttatgggatgcaaaagcttcactgaaaataattcatcagaaaaaagaagcacaggagagctgaaacgaaaacctactgcttcatatcttagaaggttgagttccttccttctttccctctcatcctgccgatcctgtcatcgtttgcaacagcattaacatttctctacaaattgcttccacaaaaaagatggccactagccaaaacaatgaacaattgagcagcaaacccagaacaccatgacagacacaagaccttggcagaaagcctcttgctgacaggaaggctgctctcaccggagacccaatctctcgtcgccgcaatcctcaacattccctcgcccatgacatcctgtacaaccggatgattctcagtgttgctctgcaaaaattacaccagacaaaacactttgaattggtactatacatcttacagcttcttcaggttgcggtggtgcgacatccgctgaattttcttgttccgccgccgcctctagcacgccgaggtcgccgccgttcctcctccagaccatgtcggagatcttggtgacgaagtcgccgtgcgcctgcctctccgcgaggaacatccgcaggacctcctccccgaggctgtccccagctgctagcatcagaagcagaactcatggaatcagcaccagccaaaccagaaaaaaaataaaccccgaatttgttccgagaacactggccgcgagctagaagtcgactgctactaccttggagggaggagtagcggagagcggaggcgcgcggggaggcgcgggcgcgggcggggccgagaagagggcgcgcggccgcggcgtcgaggccgcggcagcagcggaggccggggagccccatagccatggcgattccgagcaaagctgttcgctcggctgcggctggctataagccgattagccgaggcctctcctccgtttcttcctggtctcaaaaccaagcgatgtttggaggagccgtccctcgcaaaccgaaccggcaaaaatatcttccttttgggcctcgttttctgcctccatcttatggcccgtttacgaagtgcaaaatttatgtgtcgtgcggtaatctaaccgtttcacctgaaattcattctagtacacataggattttgttttccgaatttcagccgagaaatgttggtaagtgcaatatctaaagaaaagcagagggggaagaacagtcaggtgcttaactggtagactcaattcaatagaattagctacttatctgttaccaaaatatttaaccaagcgatgacacgaccaaatatgcatgtgaccgtattcttcgctcaagagtcaagacattgaattcgagataggtttatcaactccatctgaagatcatctttcactgcactgctcttgaaatacagacgcatcatgcagaacaatgcaggcaacagcaagtattcaacatggaaaaaaaaagcagtaataactagtgagaacgcaatgtatcttgtccataaatcatagcaggatggtcatgtcctgtcctggtaacatccacaaacatatagcataagttcagggcaccaattgttatgccagttacaggaattattcaacggagaggcagtgtgacatccttgccatgaaggcagttcaacagacgggcactcgttagcccggcggccagttcatctgcctgcctccgaggagatgtacatgtatgtggtaaacagattggcctgcaaataaagatatcaggtgactgaagatgaatggtctaccaaatataggttctaatgtataagaagactgaaatgagacgtacatccactggggccatcattgatgacaatacggtagccatcttcaagtccctcctgctttgcaacaactttggcaacatagaggaggtaaccgagtatttctacatgcctctcttctgcctgtgaagatgggaaacatgaaatgcatttagtttcgaagatactttattcattttacttgttactcttgttaacgtttacttgtcactcaacatgagtccatgtcagttttttacgggcttggtaatttgtggcatgtgggtgcattccgaggtaagaatgcagtgagtgacaagaaagccttactcatcattcatgcttaggcaatctcccacatgcatgcaccaactcatggcgcctgcattagtgaggccaaaggcagtccataacagtaatcacattcatctacccaacatgaccaaaatgacatttatatattctctatttgggtaaggagtcagcaggttggattacacagctaattgctcctaggcccacaagggagggcaaggacaaatgagaaatgggcaaatttgaaatcacgaaagggttagtaaatttaggtaaactataaatcgactacatatgaagagaaaggttgacataaactggaacataaattgtgataatagatgagtgttaaatgctacctttgataggccagttaatccatccttcactttgggaatgatcacaatgtgggtcggagcttgaggatttatgtctctgaaagccagaacctgggaaacaaactcacagttcatgcccaaaacaaattcacattggagaattaagaaatatgaacaaaagtgtttgatccaaaacataagagtaatgaactgttgcagttctaggatttagtcatttcaatgcaataacagtagaacgacaggcatccagtttacttgggccttaggagttggaaactggagacttgtattgcagtactttagtacctagtgagagagaactatgtattcgacatttctggcacccgtgagaatgacctaggtaaggatatagctaatctctccgtacagagtgctccgtcataccgtagtgagcatatgacagattcatgtgaagggtgtggtctcctagacattattggtttgcgtcaaggaggtgactgccatgacaaaggtgtccggcctaagcagtttctggcattatggaggacaaggcgaactggtatgttaagtagagaagggatggggaaacagatcaatctgtctcttaaccagaactagtacaaagtgcatcctttatatagatgatgacttgtcttcacgaccatagactccagtagtaacgattaaaacaattataacagaccactaagttgattatgccctcaaaagttccttatcctactcatagttgcaaatataacaatggtatcaacaatttattcaactgctcctgattccaaaacaaagcacaatcaagcaattttcagtctaactgggtatagagaaaagaaactcagtgggaaatagaagaaaggttccaaaaaaagctaagtagttggaagggcaagttcttatcagtgggaggccggctagtactcatcaactcggttttgagtagccttgcgatgtacatgctttccttctttgaggttgctaaaggcatccttaagaaactggacttttttaggtctaggtttttttggcaaagtgatgagcacaaaaagaagtacagattgaccagatggagtgtgttgtgtaaacccaaggagtgcgggggtttagggatacaaaatcttgagattcagaataaatgcttgttgagtaagtggttatacaagctgatcaatgaggagggggtctggcagaatttgttgagaagaaaatatctttctagtaaaaccattatgcaagtgcagaagcgaaggggggactctcacttctgggcaggactaatgggggttaaggatacctttcgttcttttggttcatttaaattgcatgatggctcacaagtgagattctgggaaagaccgttggctcgggaatcagtctttagataagaaatacccttctttgtataatcttgtaaggaataaaaatgaggtggtggccaaggtagttggaagggtacctttgaacgtttcctttaggagggccatagtgggagacaatctccatgcttggcatgagattgtagctaacgtggttgacttaagcttaaaggggcaaaaggatgtgtttttttgggaggctaacaaaaatggaactttcacggtcaattcgatgtacaaaaagctcatgtatggtaatgtaataccgaggaaatcttttatttggaagctaagacttcctttgaagataaaaattttcttgtggtatttgaaagagggagtcattttaaccaaggataacttagcaaagaggaggtggaaaggtagcccttaggtgttcttttgtagatctaatgagacaatacaacacctgttttttgat

SEQ ID NO: 16090 - DNA, 6679 bp, Oryza sativa
ttctttttgcaggtgattttcagggggacatattgggcaagactttggtccttgttgcttaaggaagaggatggcactttggtgaaagaatactgcaaaatgttagagatgagagttttagagttctactccaactatggctggaacttcagaaggagaattcaagattaggttggcacctcgtgtctgtttgatgtggtgtgcctggatggtggttttctgtttttgttggttgttcttgacaccttttgtggtccaagttattttgtttttgttacccatgtaatgggtggagtttcaatgctcatgtatgaacttggttggctgtgtacatcccgttggatgtagaggccgggtttttaatccattatctaaaaaatagagaaaagaaactaagcagtagtaccttctcatcgtcaaataccacagtggaaggtatttccttcttgatgatcttgtcaaatctgcagatgcaacaaatttcagaaatcaattcaattgcacacttttctgtgcagaatgtaaaacttcaccacattctaaatcaataatttgacatcttcagaaacttaatcttgattacaaggaaaaacttacacttgactaccatcaagcaaactgcaaacagcatgctcttttggcaacaaatgaaccactgatcaatgcttaacttgactattgagttccaatgcgctgtggagatgtattatagttgtttgtcagacattttaaatttaatgaaaagggtatcagacgatttgcctactgctttaatgttcaggcattcagggctcacttcataatattaatccgttaaacgagtgtttcagtgacacaagtaggattggtatttggctattagagaaatggtcaaataaattcctcaaaatgatgtcataaacctgactggggtaagcagagacagatgccacttacttagaaggaaaaaaaaaaactgggccataacttatggagtaaaaaccaaagcaggctacagtacagattggtacgcaagctagtgaaaaatttaattaacaatcatgcttgcactattgtacagctcaatagccccatttcgtatttgcgccaagctcttatttgtggtgtgcctcatttccagtagtaataattagtaaaggaccctaatcacatgaatccagcaattccatctacacgaattacttctgcaaacgctcgctcaagttcggtttaaagagacagggaggtgttcgaatcaatgatctcccagcgtactaggccatgataaactagtgatgccgcaatctgccaatccatgagatcaagaagcacacacgagtactacactgcctacaaatcagagcgggttttgcggcaggagagagagaggtgctcacatggtggggttgtcgttgggcacggcggcgagcgccgcctccttctccgacgccatggtgagggatcgatcgaacttccccgagcacaagtggtcgccgccgcgagtgttcttatgtggataaaaggcacaccagagacgcaaaccctcgttttccacgtcaatttactattctgcccttacaattttgggtcatgcggctcatgccatgcccattttggttaaatctaaaataccgattgcagggtgcaaactctactaaatcattaggccacgtggccaaaccaaaaaccaagttcacatatcatcaaaatatgccacgtgtccagaagagcacgttcattttgaacgtgtgtgaagagtctagataaaacaaaggaaaaaatccagagcattctaaactcggttgaaaaaaatcacatgataacacgaaaagaattagtgaaaaagattgcatgccgaggaaacaatggataagaaaaaaatagtatccaaaaaactgccacaagttttttaaaggaacaacttttaaatctaactataatataattccactataactataccataacaatattgtaacttgtatataagtattaaaatactatatgcaactttatatcacttatatagagattacaatatagttaaagtagttacactattgtgtacaatgtaactatagtgtagttacattgtagttatactacaactatactatagtaacatttaaaagttttttttgccaaaaaacttgtgacaactttttagcaattcccaaaaaaatataaacagcgagccgatgttagctgtcgtaaaccggcaacgaggaagacatttaccgcaatattttccggatccacggaagctgttgccaacgagcaagatccactcactcaatggagcaagcggagggcgtcgagccgtactagctgtgatagtccgcgagtgtggacgcgccaaccagccaacgagcatcgaggtcgagcacgtcctcgccatccacggtagcaatgaccacgaccccaagctcgaccacatccaggaggaagaagagagagggatgaagaagggctcaatgaggatacccagctttggacaatcaagggacgagggcgatcttgccttcgctaccatcatcttcctcctcttctccttgttctcgcaagcgttgtcttcctcaacggctgatgcctttctcccagcaccgacgcgacaatccttgttctcgcaagcgccattttccccaacggttgtcgcctttctcctagcaccgacacggaaatccttgttctcgcaagtgtcgtcttcctcaatggccatcgcctttctctcagcaccgacgcggcaatccttgttctcgcaagtgtcgtcttccccaatggccatcgcctttctcccagcactgacacggcaagtaaagctccaatgccaggatccaacgaccaattctctaagccaccagatccagcatcctttaacccatcggacccggggccacgatctctagtgacgctgagacatggcgggccgcgatggcgatgagcggtgaaggggacgaatcatcgaagattcaaggcccttccactttctattactaggtgattctccatgctttgctacgggatcgctaaacaatttttaatatatttttttcaacaagtaaactaagagtaaaaagaatagaaaataatgaaacgtgaagttttatcagaacttatcataaaataaacaaatgatacccgtaatttaatgtggagcatattgataagtatatgttaaatattataaaaatggtatgtatatttgttaaaatattgtagaaataatgtgatgacatgtatatttgttaaaatattgtagaaataatgtgaggggtgaaacactttgttttttttaaaaaaaataccaacaccaattttataatgagttaataacttaattataattttagaaaaacaaaggaagaaacaatagcatgggtggaaaaaaagagaaaatttgatgattttctcaacaatatgatctgttatgttaaactggaacacagaaaattccattcaactatgatttttgcatgagtttcaaagaaattaaattgatttctatatttttttatgaacaatgtgctaattaataacacaaaaataatatatacggactataaatcatgcgcgccaactggcgcgctgattttctagtgacatctatattcagattgcgccgaagtttaaggcttgctttacccttttggcaaaataagacaccgcaaaaacatgacacaatcgacggcgtgctcctcaaggctcgtgcctatgcagacgaaggtcggggctacacctcagatctggctaggagagagaaaggaggttatcgtcgctatcgccgaccgagcagcagctgatgcttgccaccactagatccgatgggggagccaccagatgtgggaatcctcgtactaggcctcgcaactgtcagcgccagatctggcggtgaagccatcggttctggaagtccagtcactgtcgaggaggaggaggaggcggtggtgagggagggggatgaggagacgaagcagcgggtggtagtggtggttagttggttgctcgcccctctgcagccgcactcgtgctcatacagtggttcgcataaccccaccgcccacgataggcgcttgatctccaccgctggtggtgcgacatagctgccgcctgtggggataaatggggagagaagatgggagtgaaggagtgagtggtggggagtgaactactaagaataaggtgcggagagatggttattttatagtgcaaagtatttcttttccaggtggctatgcaggagaacatttgcgaaatttattttcagaagcagttgtccaagaagaccactaatgaaattagggctatttttaccgacggttgttttaaaaacaagtgctagtgataatagattttcataagcggtcattaaccataagccttcggttattttttacaagcgtttcaaattttatccattggagaaaaaagatgtaatgccagaaaaaacctattttgtagtagtgtttattcccttccttgaaatatgaaggcaaagtagattagatatcatggttaatctttcagtgattggaacagatcgaccagaaaatttcagataaaccacgagggactcagggcccaaagaattacgtaatgtcaaaattgatgattcttccacatggataaaatatgggtcaaataaacagaaaccgccatgaagttggtcaacaaacaaacttcagttgactcggagcggaggatgggttgggatttaaggcggcacaccatataaggtgaaccattaacatatagcatgcctaattgagtaattattataaaatttaaaaataaattttattttttaaaagaaaaaactttcgtatagaaaactttcatgtaaaatataccacttagttatttggaaatcacgttgataaggaaaaaaaataaagtaggcttgtttagaatgcagcctgaagtatggatatgctaatgttattagggcatctacaatgttgaaaaaaaaggcagcattaaacatttaatgctactaagttttgtacctttgccattgtagagatgcactataagcatcaccaaactaaaatgcaccaccctaagcttaaggtatggtcacaagacaataaaactaagcttaaggtatggccacaagacaataaaatataggatttgctattcatactaataaaatacaacattgcattgaattgtttatttgtaatcatttggctgccatgcgggaccttttgccattttctttcttttggtgggacccagcggggcccactttattttcttacctaggccctgtttagattccaactttttttcttcaaacttttaactttttcttcacatcgaactttcctacacacaaatttctaacttttccgtcgcatcgttctaatttatttaaactttcaattttgacgtggaactaaacacacccctagtcataagcatgatacatatggatatagttgtggctctttctagtggaccccactcctattactcacggtggcataaacgttggtcttgcccttagaaatttagaaccaacctttctttttctcgggttatttaataacttaaactgggcccggatatggtagaagtttctcacggtactactggctgctaatggtcaagtaagccattattattaattaatactcctagttttttttctttaaatttaatcaaatttataaatggtatactaatatttttaatacaaaataatgtattattaaaatatatttaatagaaataatcttttgtcgtagatgatgataatttttttataaatttgatcaacttaaggaacttgggacctgttgatattgtagccaaaataaaccttaccaaattttggtattagcaagttaataatattgtcaaaattttggcaggattttttatatatttataaatttgataacaaactagacatagaactttttttggcaactttgacgaaaaaaaatgttatggttgaaaataatatcaatctgaacagtgtcttgaactaagaaaaaatcgtatgacttataatataaaacagaggaattatccggtacaacttgcctttcttagccaccactgacaaaagcattacgcaggtggtaggctaattagcaaagcttattaagacctctcgagcccagctagcaagctatcgtgctgcctggaaggtccgaagaagcggcggcgttgaatcgagtagccgacgtgccatacgcccacgccatttccgcgcctacaaatagcgagatttttccttgcggcttcttccaaatcttcagcggtctccgccttcagatacacctttgatccgcagcgatgaacgggggaagcccggtgatgacggagagagagcggcgcgcgtaccggtacgggcaggcgtcgtcgccgacggcgcgggcggtcgggcagctggggtgcatcaggaagtcgtggtccaacgactcgctctcgagctacggcggcggcgggagggccggcggcggcggcgcccaggcgtgcgtgtgcgcgcccaccacgcacccgggctccttccggtgcaagcaccaccgccaaaacgcctccaacctcggcgccgccgccgcggcgccggcccaggtggtcgacgttgacgcggacgccaagcaccaggaggcccaggagcaggaggagaaggcgacgtgagggcgaccatggtttgatcgatctggcaaacttgtgcgtgtttaataaa

SEQ ID NO: 16091 - DNA, 6406 bp, Oryza sativa
ccccatgttaaaatccgaatatatttttcactctcagctattaatataggatgaattacccccttacctaatctgaagcaatttttatcatacgccacacacgtaacaatccaattagcatttttcttttaaaaaatgatggggtccagctatcatagtctctcacctctctccctttccctttttcccgtttaaatgtccctaattgtggcattgacggcggtgaggcagccggcaggcctcagctgccacctcttctttctttcttccctattctcgaccttggcaggcgatgacaccagaaacctccggaggagacgcaaccgccgagcgcgatgttgtaggcagctgaggtaaggtgggctctccatgggaaggacaaggtgtacggcggcatcggtggtggcggagatgacacgatcgaagtagatttggttatggagctcgatgaggcgcgtggcggcgtcggtgcacgtcgcgacgggggaggaggcgagaaagagggttgcgttgcataggtgcgttgatccccactctctagccatcaagctcgacatcgtcgacaccatccacgtgctcctctccacactcccgtcgttgcttcgtgcactgctcccatttcttttcctcctctcgctatgccctgcatcgtgtccgtgtgtgtttttgagctttcttaacttttagcgccatgcgctttgctccgctttatagcaagaccgggaaagctgaggagagatggggaaacccaactgctgccggtcgggatggacaggaaaggggcggggataagcttgtgaagaagcaagcttattgccccaaaaaacaaaccgacccagcaagaaaacgtatgcgctttagctccaccctcaccctgcacgccgtctcggatgccctcctctgcaacgccatccccgtcacctccgctcactcctactccacacctacgtgtatcactcctcctactcttctcttcccatgctaatgagctcatgttcaacaccctcgcgctagcctcctggcctttctcacactttcgcggcactcgttgccacgcaatcctctgtcgaccgtcacgccgaggccatccaagcgttctcccgaatggatgagttcgacagttgtcccaccgccttcatctacaacactgccctcaaggttcatcgccgccgccgcccagctcttgtctagcaacttgctccccttcttcccctcgcgccacagtgccctctcgaccgccgctgcactcgacgcccctcaacgatacctgcctcgcccctagcaaacaaccgagagagagatgtgtgaggtatatgacaagtgggacatgtttttttaatctttttttttcgattggactgtcacgtaggcgtcacatgtataccacaggtcaaaaccgcttcggattgggttaagaagggtaattcatctagtattgatagttgagggtgaaatatgtctggatttcgggtttgaggggtaattcaaatcagggggctaattcagacttttttctggtttaaattgttgaatcttgaatatatatatatatatatatatatatatatatatatatatatatatatatatacttactctgctttaaaagaaacttgaattagtgaattcgacacctcaccttacaaatacccccttgaactttctaatattgatatgaatattctctatagtaaaacaaggatgggtcacatctcatgaaatatatatatatatatattcttatgaatttcagataatgttataatatatatatttttctatctgtactaaagtacgtgcattcagctagtagttgtaaattccattttgagccttaaacgattttcaaattatacttttgttacaaaagttttcacttacaacttccagaaattgaaaaacaactacattcgttttaaaatccaatatgaaaaaaaacaagcaggttttctgtaaagaaaaggaaaacaaatggaatatttttgctgcccctttcgtttattatggagtattttgtgattttgtcggtcgatctgtcccaaaatccaaacgaacgggggtgatggacttgcccgtttgaaacccccaaatcgcaggctccacagagaccaacggccatatccccaactttggattttggccaccgccggcgccgccgaccccacgatttccctccacactgccacccacatccgtcgtctccccccggccgctcccccgctccggtttgaaatcccctccgtgtccccagatatccgccgatcccctcttcgaaaatcggcgattgcgagtgggagttattgagaccccccccccccccccccaatcataggatactggttgatccgcgccgactcctctcgtctgctgctgctgctgctgctctgcgctctcttcgaggaggaagaagatcatcaggttagtcttggtttctactagccgtccgaacttggtttcttttgcaggcgatgttatgcatggtttcacttgatgagtctcgtcggtctcgaattctcgtagattcgttcgtttttttcgattttttttgtcatcttttggttgtgggaaaattatctggatttcttggtgcgtgctcagggttagtccgtcacctgttcgaccgatttcctgaccgaaatactcctttccctcgcaggagcacctgttccgccgcctctgtcctccgatctcacagtcccatccgcctcgccgctggtagcggcaagcaagccaaagacgccgcgggatcccaatatcccatctccacgggcagcagcgccaccgccacggctggagcaaccaaaccaagggacgcgggcacgttctactgggaaatcgccacgccgaattttgtgtgtgccaagcggttcgtgccgaagcatttgtggtccttttttttttgactcctccatattgtctataaaaaaagacttgtgatacatttactttctgatggatttgctacttagaaattctaatgcatattagttagcagttgcgtttagttgtacaccaactgctcagtgtctcagcctgcagcaatgcaactacttggaacagctattgatccaaagcttgcactattatttgaataatttttacttttgatctagaacagttgcacacattttagggttactttgcgcttaccctgatgttttctccgtgcagaagagtattagacgctcctgaagatgagaaggttctttccgttccgctcattcacaagtaatgctgggaatggcaaagcatcagcgggacatgataagaagaatgagaacaaactggatggagggactagctgtgcctcccattctcctgacacacgggcattcaggtcaagaagccggcatggaaaaccaagcagtgaggaatcatccactcctcagctcaggaggtgcatgtcattgacgtcgtcagcaattgatcgttccttgaatgaacggacaatgaacttttcaggcgatattccatgctctttctccaatagttctgatgtgcctcgacacattggggatgcggagtaagtggattaaagataaaatttacttgtgcttgaggttcccactgtctgtaacttatgcttcagcaacatcaataattaataataataactgaacactgtgtcatcccctatttggaaaattccaaacaatctgttttttcccaagtaagtggtagttttacattttaattggtttgacagagctaaaaccaagcacaaagtttggtggtgcattatagactcactatctgttactagattttttatttctagctcatgcccattgtgttactaacaaaccacttatgaaaacttattcaactttcagttaacaatgaactgtttttgaaaacttattcagctttcagtcagcaatgaactctttgcatattatcttgagcagatgtaacctttagccatgtttagccccatttaattatgtttctgtttgtcctaattgtttatcataactgtgatgctggagattttccttttaaacttactattatcatgcatggtattctatttagcatgatgactgaaggatggtagaaataaaaggttacaatctttctgtctgcaggtactatccctggtcacaagaaagacacaccaatatgggagaatacacgatagaggttccaaaaacacatggggtacaggaaagtgattcacctcagtcaagatgctactcatgctcagcaggacactctcctgttagttctcctgttgtgttaaaatgcaggccttctaaattgaccaatctttcaagcaagaatgaagttctagatctatatattgatggagagcaagagtcaaacagtctaaatgagaaacataagctaaaattacctgtcagatcctcatcatcttatttgggacggggacggccacctagaccccattctacagctccatcttcaccaaagtcttgcaaagaaatcgttgagagctatagctactcaaacatcgacatgattgatgcctgccaattagctcaggaggaaacaaagggcatatggaaggttgcatctgtgtgtgcagagcctggagatgatgcacaaatgcttgaagcatcttctgaaaaattttcacatatagaggagtgcaaatcacaaagtattgctacattggaagatatttatgatcgtttggaagatgcacaacctccatgcttttgtgacacttcaatggattatatttcaggcactacctcaagatgctttgatgcagatgtctgttgtcgtgatgactctcatggttttcatggtaataaccttgaacaagacactgatgagaagttgcttagaagagctaaagaacttgatgagtgcttcatggttcctcttgaagaaaataatgagcttaacatgctgagggataatagtttaagctcaactgacatgttgcagctgatacagactttgattgaagatagaaggcaattggcactccaattgtcttcacaaattaaggcacgtcttacagagagatttgcagccaaagagcaacataagcggtccaaggtagaattgaacaccagaactagaaggctggagaaggagaagagtgatgtgcaaagtaccttggaaatggagcttgatagaaggtcaaatgattggtcagtcaaactggcagaattccaatcagaagaacagcgattacgggaaagagtaagagagcttgcagagcagaatgtatcttttcaaagagaagttactttacttgaatcgaacagaattgatgtttctaataagataacaagtttagaactgcaaaacaaacagctcaatgacgagctacagaaagtaaagaaagagcatgatactcttttgaagtcatcggttgagttgaatgataatttaacgaaaactgcagaggaaaggaaccaaatcctggaatgcttaaaagagaagggaggtgacaataaagcattacacaaagtgattgcaaggttgcagaggatatctaatgaacaggagaaaacaataactggcctgagacagggattcaatgctgaactggaaaacaaatcccttggtactagtgaaagcatcagcaggatgcaaatggaacttatcagacttactggagtggaacaaaagctgagaagagaaattcagtcctgtaaccgtgaagttgagtctctaagggaagagaatatagctgttttaaatcgtctacaaagcagtgataacaaattaagtatttcttcagttcgtcttgaacaggagctcaacaccagagtggacaacttgcaactacagggcttatcgttgcttgatgatactagtcagctttgtgccaagttgttggactcaatgaaatctaagaggagtgagagtttcggaagtgttgatgcattagcatccattgaatacactttgagttaccagagcatacaagaaagaatcaagaatttaaaacaatgtcttcgggcaatcagatctatgttgactgaaaagcataatgaagaagaaaagattggagagagaactgaaagctgtatcttgaaacaggaccacttatccaaggtatgaagttcctagggcctttttacatttggaagtatcctatttatttttcagtcttatgggccggtggttgttggcttaagactttgttctgtagagcacaaaaaaacacttttttcaaacatatacagtgaaatttggtacagagacaatgttctcaaaatatatctggtagactctactagtacagagacaagtctcagaagctaaatctaaacctccgctttcctttttgcccttttctatgcaggatgacattgaatttaagttaaaagaagagtctatgctctgtagagtactaaaggagaagttattgtcaagagaacgagacattgaacaattgcagtcagatctagcatcttcagtt

SEQ ID NO: 16092 - DNA, 17546 bp, Oryza sativa
tcttcggtgcacactcaaaacagtaagtgatgaaagggatgtcttgtggcaggaaacgaagcagctgcgaaaaactatcagcgccttgcaaaatgatgttgcttcattaaagcagaagatgaaatctcttgatgaagacatactgcttaaggagggtgaaatactgcttaaagagggtgagatttcgatactacgtgacagtatcggcaggccatctgacatcatctgcagccctcggccatcgaagctgttcgaatcggagtaaatttgcatagaagtagctgtagaatcttgcatttttcaaacagctttactttccccccattttacacaggagatcatttacttgtgaatatggaataccgaatagggcgtttgctgctttctagatttcttgtataccaatgcaatatgtgttgcattatctagtaagagacacgagtactcgacggatgacatgctcagaggcacctccgatcatagctatgtcaaatctagtcctctattatgttaattgccacctttcttttttgggaatacaaacacctcgacaatgtttatgttactggtgctgcacatacaaattttgattgatcggcagatcaggtcacctgggtactttgcacgtcattttcttgagtatccagtgcaatggttcatcatatcctcgcacattttgtaagtacccagtttaatagtgcaccatatcctcgtcatccttacgaaactagtagcaggtcagtgctaacgctacggtgatatttagtaagcatgcataaaaaatttatatatgtcaacatccatgctaatttaattattattataactatcacaaacttgggcagcttttagttgtgtagttcaattctcaatcaagtgggagcaatttctttagccataaacaaacatcacttaatgtttttctattgcttcatcaataatcgtcatttgtatcagagtatatgatgaaaaaaaattgtatttaagatatttgaataaacaaattaaatcctctaatggaataacatttggctgagaagaagaaaaatatttacaggttacaccgcagcagaagaaatcattaaagttgctagaattatgtcacaatagaccaatacataactgttgtgaaatacaacacattatttgttgcaaaaatatgtattacaaaccttatatgtaatgcaaagcgggaaactatcgtaggatcaaaaatgaacatctgagatgtatccagttcatcctgagtaaaacttttaatcctaataaaacctttgctcatggttaaaactgggagcaaaagtttactcagggtgacgtgaaccaaacattcaatttttaattctacggtagttttcaggtttacattatatatagggtttgcactacaaagtttttcttatttgttaggcagcttcaattgatgccaacattggtgaccttagctgagggcattgatatttattttccaacctgtagcattccatctattttgctctgaaatctaacatgaaaagcatgtgctgcccaaaaacctaataaatggctcataggggtttcaaaaaatgcgaaatgcaaataaagcaatatttttttactaatcaagatgtaacagtggttagctgcctgctgcaaagaataaacatattcctttacactcatctattcaaatattgcaggaacatcaaaaagctactacatatttatttgtacaaaatgattattgtgcagtaagaagaatgaatgaacagtggatatagaattatatagaataggcagattgtgaataaaatttgcagaggacattggtctgctccatttatgcggtaagaaaccaaaacgtcagtttgtctaaaaggataaaccacaaattggtgagcattatatggtttctgacacttgtattgacgataaaattaccttgtaggcttgtactgggcattgatggtgctgctttactcgtgatattatccacagcggacaaagtgatagaagcaaccttgtagctgctagccaaaagtgtgaacatatgagcccaagcagcctattatatattgattaacatgaatactgctcaacattagattatgaggcgcgtttgcgcacacccaaggaatctgacttctcaaattatcaaacaaaaagagcatacagggacaattacggattaaaatattacattcaattatggtttcaaattatatgatatagtgacatcaactcatctaaaaactatctaccccaatttttaggatcagacttcacctcactaaataactttgtgccatacatatgcataaaacgataagagaatatctataagattggctggttgcaataagacaactcttgatcagccgacctctttgttgaatgactgagcaacagagagcagcctcttctttgtttagtcatgaatgcacattttgatcagttagtgtgaggttcaggcaagtcgtactgaaaatcaggcgttactataatgaacattttataagtttggacgatatcccttcgtattaatatttagtttgaactaagatgataatttatgtaaattctgctatacaattcaattctacagatgtagttcttgtttttaacacaatgtagcatgttaggattgtactatatattcttcgctttccagcctagatatctgcagaaccctgaacatctagagtggagagcttaaatagtgatgaagttttggcaaagcagcagagccatttcctgcttggacctggattcagcatgcaggatctccagtaccatcttatcggggttgatccaatacctttcctgcacgttcatctacatgaaatccagcagaggaaccaaagtttcagtgttcagagaaacagtaagtcagaaagcaacgatagatccgctacaaacctattaacctttctgaaataactgaaaaaaaggatatttccctgcatatatgagcctgtgctcttgtagagattatggtgcttggcagcagagctcctttgggaaggacatgcataatgtatcaggattacccggtcgctagccttccaaggttatccaccgcccacttcgccacagcctttctcgaccgtgagtgatcaagagggaggagataaacaggcgcagcgtcacaattaatgggcgaagagaagctgtggacggcccagccaggagggcagcagctaaacggtagggcccctctcatgccgtggccatcgctgcagagctctcatgccatggcaaagaggcaaggatcgccaaccgctagaacgggatgtggccctggcgctggcggcagagggacccggggccggggacgcatcctcggcgacagagcagccggatcctctcggtagcggtctacggacgcttcctcagcagtagaagacctcgcaggcgtgcgagaacgtcgaccgcgcacgagtgaagagatcaggtgatcgacgaggccgttggcaccaggtgcggaagccgactgctcgcgcttcaggattccgaaattcgaggaaggggatcgacagattgagatggtggcaggatttcgggagtgaggcgcgcgcgttgatgggaaagaaatcacgcgattacggcagcctcggctgtacactactgaggtggacgcgatgatcgttagatcgggcactgaggaatactgtcagctggatttgatgaatgagtaatgtaggtgtaagagtgagttgataaattatagggtagatgaattataggtgtaagagtgagttcatttatctagatttttctgtaatgtgactatctatatcagctagacagtatttagacaaaattcaatcaaatttagtacgggatgtgacccatcaatctggacaggttcactggtttgttttttatgggatggagggagtatacatttgttttactgtttttatttttttgttttttatgagatttctacgtaatatcactacagcaacaaaattagaaatcaatccaatacaaatatactcaccaatcaaaaccaagaggatgcgttgttcatttgtcagaaccaataaaaataaacatacgaggtgttttggagatcgatcaacaaaatggtagtgcgatatttttcagggaaaaaaaacacatggtggcattggaccatacatgcacgtatatcacaaaccatttctacagtctttctctctcttaatataaaaccagcagaagctggcttaggcttcaaaaaaaaaatcacaaaccaatgttgttttgaaggctacagttaaggcctacaacaattgcatatatggcttgaaacacaggcttgtaaactgtggaaatctcccagaatcatcaagcctgtaggatacctggctgcaaataataataacaatcacatgaacgcatgtggcagctattttaaaatacataaggctgtttagtaacagcaatgctcaactctaaatcatgtgatgggccttaaattaggatctccatccaatctatagatctgccttcctgagatcttcctcatcatgcttgtagagtaactaaagaaaccagtcactggggagctatacggacaggtctgtgaggctttggcgctaaaatgtgtgcaagcgacaaaatgtcaaatttcttcacaacgcagaggattaaaatgaatgattggaccaatgatccgaggccaatccactttattgatcccacaagatcagtaaatgattctcaatcttacactataatttgtggtaacaacggggtgactttaaaatgatatcatattgattgcacaagtattccaagcaaatatcttaagataccaactgttcttcacatgtaaatgcagtgtgaagaacagagtttttcctctggtccttaggagagaggagttattttaagtgctaattgggagatagaggtattctaactcttgattaacactttgggtgcatgtacttgcaaatatctcatggaccagaaaaaaagagagcatattctaccatagaacctacatgagaattctatgcagagcaataattctagacaatggagaagaagaaatacagggaaaagaacataccatttggattcccttgctcgtagaaatttctaaaaagagccactgcctcctccgccatgatcccaccagtacatttgtaaccttttggcccgggaatttcctccctagcaagagacaaacagtttgaagttggagtgccataaacaactaacagagttcagaattaatgatgtaaagaactcaataaacaactaacagagttcaggattaatgatgtaaagaactcaataactatgttgtacgtgcaagaaaatgaaaatattaagcatgtgcaagtttgcaaaaatcatgatattgaattgaaatgttagggtaatgggcaactaatgaagcactaaaagcaacatgttatcatgagtaaacagctttctgctgcttgttgcattgctccctcaccctgacagttcagcagaagaactctgatgcaatgacatgattgatccacatcctccaaatttatcgttagcacaaccaaagtacacctcccttattcctgtcaaaagaatgaacatgttaaaaagcataaatccatatgctcttacatatttttaacacaataaagataaaacatctcagaccaagtatcgacaacgccattgcgcacattatgcaaggctcacatgtgacataaaggtcgcatcttgcaaacttctccgcgacctgtggctgatcaagtcccatgccctgccactccctaagcaggatatcaattgcttccatctcagcatgccttgtagccttagaatcggtacaggcacaatcaaattacagctttaatctaagagcaaaaaaaaatcttttacatgtaaatgcagttggtatcaattacaggttttcttttacacctgtacaaaatttttactcctgctctatttaatgaaattggcatgtttaatgctggttcgttcaaaagaaataataataataataataataataataataataataataataataataataataataataataataataataataataataataataataataataataataataataataataataataataataataataataataataataataataataataataataataataataatctaagagcaaaaatattcctaaccgaagatgtaagagcatgcatacattccgggtggcatttgtcttgttgctaccggatgaaatcaccttcccatcctccacaatcacacatctaccaagacagaataacaaaaaaaagtagagccagcagcagttaggagttactagcagttagcacagcaagaaccaaggatgaactcctatgtatgaaacgaagcaggggtataccctacagggacctcaaggttgtccaacgcaaacttggcctgcaaaaacgatccagaattcagcgccagaaacaccgtagcagcgtaaaacgtgttcttcccagcaaatcaagctggagatttcagccatacctgctcgagcgcgagctccataaactccgccgccgccgccgccatcgcccggtctggtaagggaacttccggcgtgcgtggtgagtgcactggggtgcagcgagcggcggcgggttcaggcgagcggcggcgcgatcgggttcaggtcgaggtgggttaggtttcttttccttctccttttcaggccgtgggccgagagacttgtggcccatttatttacctcgcaagtttagtttcgcttcatcctgtccagtctctgacggtagccggaggaggcagcccgccgccgtgtcctcttctcctcgcggctgcggaggagatgagcggcggcgcgaggagggtgctcgaggcgtggaggctcggggtggtgaggtacggcgacgccctcgggctccaggagaggctcgtcaccgaccggagggccggccggggtccccgacctcgtgctgtcgctgcagcacccgccgacctacaccctcggcaagcggcgcaccgaccacaacctgctcctgccggaggccgacctcagggcgctcggcgccgacatccaccgcacggagcgcggcggcgacgtcaccttccacgggccgcggcaggccgtgctctacccgatcctctcgctccgggccatcggcctcggcgcgcggaggtacgtggaggggctcgagtccgccatgatcgaggtggcggcgctgtacggcgtccaggcgtgcccgggtgccgccggcgagaccggcgtgtgggtcggggacaggaagattggcgccatcggggtcaggatctcgtcagggtttacttgccatggtctggccttcaacatcgatcctgatttgggtttcttcgagcacattgtgccctgcggtatcgccgacaaggaggtcacctctctgcggcgagaggcggcggtggagctccctcccgacgaggtgatccatgatcagctcgtgcagagcttagcaagaacattctgcttcagcgatgtggaattcaaggatgaatccgagtgcgccgacatggtttgcttagctgcagataagcaatcctgattgttttactatgtatactgaacttagagttcttcagaacgtcttgccgtcaagtctggaaatgacattaggaaattttcgtctggttttgttcattgcgaatgaaggtgacctccattttggagcataaatgaagaataaatgatgctgtaagctttgtctctcatttgataccttgcccctcttttggtctgttttcgtgagatcgaaggcatttggacaaagccttatttgctttggaatacttgaaggtcaaacaaagaaaagaaccatgagcgtaagtcatgtgtacgtttacacccatttcatctataaacacagacttattggcgttcgtcaacttatctgtttccgttcaaattactcgtcgttctagcatttaaaatttgtgtcgaatacttgtcattctcacattccaaagcacttttagagatgtctttccattcttactctcataaatataaccttactagtactagtactctcataagaaattcaatgtttgctttcggaaagatgattaggatgtaattaatgaaagtagcaatgtaatttgacacgtcttctagtttaatgtgagatttgctagaaggacaagtaaattgaaacggagggagtacaatatattgtcttggaaattggagaaatgtagttttctctggcatgttgaaggcagcttgtattttgttaatgaatggagcatacatggtctcaagctaaattgggacctacacttaaaaatccaagttactccgaaaaaggcattgaatttgtcttcaaagaagctattaatattatattcttcataccataaatatcttggcaagcttatttggggccattctgcagatatctatgatggtttgagagatctgtccaatgttgtttccttcttcatcatcctagaggacatctcagtcattgcttctgaaggtacatttatgatattgtctctgtgtaaataatgagagaatttgcaggaatggactctggaatgtaaattagcactggtatttcaattcaactaagaaattcatggtgacatgcaaggaaaacctctcatactctttgagggtgtagaggaaaaaacatgtgtatcatattagctctttgaaataaaataaactgtcttccattaattcatttacaaaaaatggaagaatctgatagaaccaaatcttcctgcatctactgtctcttcaggaatcgtaccagctgaaaatgcatcctgacattcggtgctgcaagattggagctcagtgcaggacggcttttgttctacaacaccaaccccccaagaataggcttccgaatgccgtggaagaggctgattcttgttctctgaaggtgtgctacgccgtgctgcgcttgaagaaggtgagctggcattggtcattggttcttgagccccagatgattcaaagcagatggagactgccttcccagatgcagtctgcagctggaactctgaggggctaagaggaagaaaagcactattacatgtatgctcattgtagtaggtgactgagtacaatggtggatcactataatctttctgctgaatctgcttcgttgctgggcaattcatgttatctttataggtgcatctgtagtagtatctgcaatgagacaggcgagacaacagtttgagtgaaatgaacaagaaaagggttcagttttctacgactatttgttgcaacacatctctttgtggtcgatttgggtgggtagaatgagaagagcatctaagtatcatcacagaaaggtgtctaactgataaatttcttattgtttgcaggagaggacaaggttgacaagaatgaacagatgcccactctttccagaagatatacagatgcagataccagaaatgaggaaatatactgcaaatatatcatctttcatccgaacctggggaaattacagttgtttatcttcttctcgccgtacttcctccactggtggccgtcgttgtgcggcgcaaaggtatccaccttcctcatgcgcttctctttcctgcaagtttttttcagaaacatatcaacttctactccaattgaatcccccctgcactatcatcaccactctcttataaagatcaaaaaccaaaagaccagtaatagtttttagctaccttgagccatggcctagatggtgtgattgatgcggactcggcacaggagacattgtttccagagagaaagaaagagagagacacacccggagagagaaatgctagggtgagcctgaaactgaaggccaagggagccttaattcagaagcgtaccaaactagggcacccctttttagcttaaaacatcaaagagctccataattgaggcccttatcaccatataaaaaccaccaccgctctctaagctgaagaccaaaaacgatgcaaagattatcttctcctctccccgtatcgctgtcacgtgctcccgcgcaccgacggggcgacttgagaaatttctttgcagcttcttcaaaggccccggacacacataggagctacaagtggcctcaaaatgatgtgtcaccccgtttttttaaggactaagcactgtcatcgatctagcaacttggggcgattaaatggttaattaattgctttgattggaactcgggcaaattgattatataatcggccggaccagttcacaaatcttggccagaatggaagcctgccccggtgcgttggtgattgcttagataattgattaattataaactagttggacttgacctgattctttcctttgcctcacaaagccagaggcaggaatcgtctcgttgcttggggagggagattagctgatacctaacgcatatcgatggtttttttaaagacctgcacatgctgcaggacaagttgaggcagcaaggaatctcccgcttttcgcctaatttaggacccggaaaatgatctcaccagtgatgtactgtgctttgcctccaataggggtcttagttaaaaggggcgcgtggcaactgggcggatgcattgcccggccactggggatatttttgtagagattggcagtacagacgttatgtgcatcacgatgatagcggccagttgatgaatgcatcacgatgatagcagccagttgatgcatcaagtggcactgcaagcctgaagcagtaaatgtgcttttttttttggtagtaaaattgcaagtgaaaatgctgatggcaatgcaccatgaatatactatagccaggatagattgatagtagatcataaatttgatagataaatagatagatagatagatagatagatagatagatagatagatagatggatggatggatggatcataaatactagtacgtggtcaatgaattcagagagaaggaaacacgtactcacataaggatgagatagtttattgtgctgttgctgaataagacctgcttagctgagctctgacttttacccatctccaaaaattcagaactatacatctccagttctccacctttttttatatatggagtggttactccccacgtcctcctcttggaacttaactatttacaaacactatgaggaccgagagaaaaaccagtggcattttctaattgactccttctagaaacaggacaggtaacgacttgctattggtccatagcaagataggagaagggggatgcatgctattgacatccagatcttggcttattcattgacctgcatatagtatgctactagtaaattgcccgctaatttagttggttacagactaaaatatgttgtcacaatcctgatgaacagaaataaataagggtaaaagtgtggtcacaatgaactacacgattaacaagtaggagccaagtgatagaaaattgtatggttgtggctccgcgatgccatcggcaaaataaacaagagaaatgcagaagaaggcacagctgccgtgccgctggggcgtccgtgttcatatactttcaaatctcatgagatttcatagataatgatcttaaatatatccagttcaaaatatagttgggaaatgatcagttctatactatttcttttcgatgaagtactctttagggattaagaaaaggaatcattacgagtagctctcaggcaatgcattatttggcatgtgcatgagaggcactagaacctaacattgaatatttggatttttcttgaacaatcttccatccgattataatagtactagttaattagagtccttggagaaaatattgcaccgtcagccgccgcactagggccaaatgcaaaaaaactattgagtagtccatgaaatgtaggtagacaaatagcgccaagctacacattttatagctttttttctttcttatgactcgcattaagcttgtgaagaatggtttatgtgcgggtcatgaccaaatttcaataaatctgttggccaatgcaagtctttagttatgtggaggcacctttttattcattggtctttattaaaactgaccgcacttgcagtcaaaacaaggctgcattatctgcactataaaaccaagattaggtagtggaaaccggcaaggctggtcatcaccaattagaaatcaacgttaaatatacatggtcattgtcttacgttagaaatacagccgttcagtaagacaaaaccacccttagcaaacaaacacaaaatcaccctattaaacaaacacaaatttagaaagaagaacacggttaattaatgcatgtgcggcttgatctacaccaagagacgatcgggtacttgccattgcacatgaccgacgacattgccgggaccttgtgagtgcgtgcgatggtgtgagtggtgtttaaatgcgcttcaaatataaacacagcattcgttcataatccaacaatctaaaatttatcaatagttaaagtttaaacacaccgttgagttgagttgataatttctaaagagtaaaatacacaaagagtccttagatttaatacctgtatatatgtgtcatatagatttataaatttaaaaattatatgtttatacttctaaacttggtaccaacattagtccaaaatccaacgtggtgtgccacacggacgctgacatggcaccttccccaatcctacacccatagacaaagtggggctgtcctgcaaaagtttccccttttgttttctttttcacgcttgtttttttccctcttcttcctctaatatggtgccatcatcctcatgcctcgctggtctaggccaccttgagttcgatgacacaagctcaaggaaggatcagtagggcgagaaggtgcccggtggtaggctttgcttagatggatatggataaagttgacccagtggtgggtgcgaccaagctcgaggtgacaggagtggctgagtcagaactggtgaatgatcttgcttgggcagggtggccagaagtggtaacacggcataaggacaccacgtggctaaaccaaaggctaggtgagaaggattggctctagcgagtttcgggagtcaattggccgagaaggttttagaaaaatgatgtactagacacggggattccaataataccttcaatttgttgggaggtggagtgaacacgacggatttaaggacttaagcattggtagtagaactagggtttccaccctggctcatcctccgacagcaattgaggcggcaaagggtagggtggctcctgagaggttgaagaggaggtggaggtggtgctcgaagaggaggtggaggtggtgctcctatgtattggtgataactagagaggagtcacaaagagagatgaaagtggaggagcagagcggcggtagcagtggtagagctcaagcaaaggagctcgactagtgatagctagagccgaggcttagcctatgctggattgcttgcacttagggagggtgagctcacccgtagctgcagccattgagcttgacatggacgtcgttgtgtgctcaagctaccacattaagcctaaacctaaggaagcggagaaaagaagagagagagaaagagaatgaaaaagaaatttcattagtggggttcacttgtcacaatttagggatgccatgccagcatttatgtggcatgccatgtcaatttttggaccagctttaagctgtgtttagttcctgaaaaaagttggaagtttggaaaaaaaagttgaaagttttggatgtgatgtggtgtgatggaaagttggaagttgggggtgaactaaacacggccttaatacatttagtaaggtctggtttagttcccaactttttcttcaaacttctaacttttccatcagatcaaaacttttctatacacacaaacttccaacttttccatcacatcgtttcaatttcaatcaaacttccaattttggcgtgaactaaacacaccctaaaatttcaatcaaacttttaattttggcgtgaactaaacacaccctaaatgtgtatcttttaagtttatggccatacacgaaatgcgtatcttttaagttagaaatctaaatgtgtatcttttaagtttatggccatacaagttttaggaccgctactcatttaaagcagtggtatgagcttgatttcatatagtaggaaaatagaaaatcatatatgtcgcaaatgaaaaatggaaaatcatattggacaagtttgaacggttctagaagctatcctggtaagataatctgggaaatatggcctcgaggaacaccgaatacagctgtgctgtttcctgttggcgcccacagatcggtggcacaaacgcagccggaaagtgcttgttgctagctcgcgtgtcaacaactcgcaagcttttgtagctagcgggttagttgtgcgcagttatgtgtgccgtcacctcatctaaagtttactgcagttcgtctcaagcccttccagatttatcattatgaaactaaggtaacttcgtcgaaatgcttagctcgcctctgcatatgcttgaatgtaaaaaccttttggagagcagttagcaagatcaagcgatgcatcttatccttccctctatgtttgttatactgttctttagaactcagtcagttggactaatctttcttaattctggcaatatttttatgtgacaactccagttcaattcaaatgctctaactagctcttccatcccaaagtggaaacagtaaacccttttaaaaagaccacgcagtggcgtgtggagcccaaaccggtgccagagtttcatacatatggtctggccttgtttacgagagtttttaacagctacagctaatcttttgcttaattgctcgcaaaaaatgtgcagatctgacctcccgttcgtttctgctttgaattgagagtaaaagcgggcacgtaaaatgagaaagctattaatgtatgattttaattactacaaacttaaaaatgggtatatttgacattttaaagcaatttttatatataattgttttttttgcacgaaacgcgccgttaagttgtttgaaaagcatgctaacgaaaactaaggtaaaatcttaatcttaatcttaatgagaaaagaacactttgataggtgtagtgtaggatacttcctgtgtatcatattataagtcatttgactttttttaagtcaaactttgttaagtttgaccaagtttatagaaaaaaaatagcatataaaatatcaaattagttttattaaatctaatattgaatatattgtgataacatgtttgttttttttttgaaaatactactatatttttctataaagttgaccaaacttaaagaaatttaactaaaaaaagtcaaacgaataatatgaaacggagggagtaaaaaataaacttagtagccaaaaagccgtggaacccctcgaaactttttgcattgatagacggattgtacaaaataggtaacttcattttaggtctcttaattttgtcgtcgagtctaaaatttgtccctaaaccaaaaaatcagatataacgggtttctcaatttacaaaacaggatcacccgagatcctaagcagtattatacccggttttagctgacgtggcaagttggatcagcgtgggacccacaagtcagtcacttgcactttctttctcctatctctcaccccttctcccctctcttctcctttcttcccaatcccctctagggtgacggctaacggtgcgacgagcggtagggagaagggcagtcgccggtggggagaaggggcagcgcacaacggacgatgggaaaggagctggcaatggtgaggtcacaggcgctctcgtcagggttcaagtttgagccgagcgaccagatgctcatggagctcttcctcttgccgtacctacgcgacggcaagctcctggtcccagcctcgtctttgtgaaggacgaccgcctgaggggcctaccgccactgccgtggatgctcctcgaccaccatggccaggcgacgaggccaaggccaacttcatcgggccgatggatggcgaaggggcccgataggtgtgcatgcgctccgtcgccgatggcggcaagtgggtgaagcataagtcaagcgggatgaccaccttcccaaacagccactacaagtcgccgtcgacgccgcacgtggtgcctctccagctagtgtacactgcgaccttcagcctcgccctgcacgactcgaacatcgagggtttcgcggtgagccgatcgtggtcggccttggagaggtgaaatgaggtggcgagaatgcccatcaccagcaccgatgctgacggggtcgtcccctactactccgatgatggcagtagcaatggcgcatcggcggtctagtattcagccttagagaggtgaaacaaggtggcaagagtgcctgtcactggcgatgctgtcacggtcgtcccctactgcttctccgacgacgacaacagcagtggcacgtcagcgatctggtacttagccttggagaggtgaaacgcagcagcaagagcgcccaccactggcaccgatgccgccgtggtcgtcccttgttgctcctccgacaacggtagcaacagtggcacgtcagcgatttggagaagggaagggagcgagaagtgaggggagaaggggagagagagtgaggagaaagaaaagtgccagtgattgacatctggggcccatatgggtcgtacgctgactcaacttgccacgtcaaactgaaaccggttataatattgtctagggtctcaggcgatccggttttataaattgaggaacccattatatctgccatttcggttagggccaattttagactcggcgacaaattaagagacctaggttgaacttattcctccaaaatatgcccgtctagcgttagagcccatcgctcaaacgacttcgtagcccaaaactactagttgggccacgacaatggttcagccctgcggtggcccgtccttgctcgacccaacatttcgacggcgtgcggagcgcgcctctccaagtcgaagggccaagaatctcccagcaatgcacgccgccgccgcgggaagcagcctgcgggcgggcggcgctgcaccgtgtgcgcgtccgccgcgcggtggaacgagccgtggaatcccgtgctgcccgtccgtgggccggcacacatctgcgtgtcgcgtgacacaaccgatccaccaccaggaggaggccagcccgccggcagaaacacgcaacagagttcgcgcatagattttcatcaaaagttgacaaagatctgcataacgataaatctttgaattatgacataaaagatgactatttttttttcttattacatctttttatattgaatcaaaatcgaagctaatatacgtgtgtcccaaaaagtgcaggatctctactggactacttctatgctgttcaccgcggctccaaagagtccagtactctacggggagcagatacagcatatcatggaggaatgtactacgctttcattcgagtacatctcagtcaccggaatactcatccttgagcacgagaatacaatcttcactttaaacaactatcgatcggttggggggatcctctagagtcgacc

SEQ ID NO: 16093 - DNA, 3603 bp, Oryza sativa
tgggtagggattggtgtagcggaccctctggttagcaccctgttgattgcggaaattcgccaagcggcgcttgtgcgattccagctccttgtgcttagcttccaagcggatgctcttgtcgaccagtcgttgaaaatccggatagtccccagagactagacggacggacagctcggggtccattcctgccaagaacttctcttgcttctcctcatcttcccgcacatcctccggagcgtaccgggccagattgttgaactcgtgcaaatactccatcacggagcggttgccttgcttcaactctcggaattccctcttcttgagagccacgactccggcgggcacatgggttctccggaaagcggcggtgaagcgagcccaagtaatcggctgtccctcgggctgcgtagcctggaagtggtcccaccagagagatgcgggcccctgcagctgatgggcggcgaagacgactttctcctcatcgctgcactgcaccgtgtctagctttttccccacggcatgcaaccaatccaacgcatccacggggttgttggagctagaaaaggtaggtgggcggatgcggaggaattcggcgagtttggagtgttggggagggggtggtggagcattctgttgtggcggattttggaggtggtggaggaaagcagtcatcatgttggcttgctgggcgaggatctgggtgagaatggcgttggtgtctggtggtggtggtggaggtgggttgccttgggggttggggtagctgccctcgggttggttgccttcaccggtgttaacatttctcctggtcgtcaccatctgaaaaccccacacggaaccagcaaacagagagagctaacgattaaaactaaccacccacgactaccattattcttaaattattactgctattaaattggttcattaatgttcaagttgcttaggcaaacaaaataaggcaggctccgacatagttatgccacacaccggcataaccatgccccacacgactccaaaaagacaaacgagaaaaaaaaaaaaaaaaaaaacacacgcgcaagcctactaactgctcgtctaccgctgcgacgggccaggacggaaggtgagcaacagcgcaccctccgagctaccaacgccggaggcttccccctcctggggaaccacgggcgcaggctcggcacgaggggtctcgacgaagcaagtccacgccagggactgacgaataagctcgggcctggaggtgctcttgcgggcggtgatcttctggctgcggcagacgcggcgacgcttgggacggctgtcctctccctgggcgatcttgagctgatgcagctgcgcctccaacgcgtcgaggtccttcttgagctgcaggttctcctgacgcagctccaggatcttcatgttgttctccaccatgccgcgacgcaccatctgatggaagtcaatacgagctgcgtcgtatgcctccaccatgcgtgccagatgcacgacggtagcgtcatcctccgagctggcgtctcggaaggtggcgtggtcgctggctcctccgcgacgagggtggtagcggtagggcgaggctgcaactcgtccgggtagcgctggtgaagggtgccgatggcgaggagagcggcgttctggcaagcggcggggaaggaatctccgcccgcggtgactgccagcgaagtccgctcgggagagccggagaggatcactgcagtgacctcccaaccggcgtgaggctctgcatcctcaccctcctgctccggccctcccgaggacggcgtcgccggatccgccgccgcaggctatcgccgtgcccgccgtccgccgtcgagcgccgaactcctccctagggcgacgaatccagccctcccgaggacagcgctgccggatccgctgccctcgccgcccgccgacgccatcgccatgcacccattcccgctgtcagcgagaagagaggagagaacaaagagagagaagaggagaggagataaagagagagagagaaataaatggggtggttgttgatggtccttaaatcataatatttgaccgtcaatacctgcatataatgaaataaaacattgtatccaacttagtggtagggattattctaatcaattccactagtgttggtgaaatatgtgtatgcaggtattttaaggataaaacacacccatcatgcgaggaaacacacttccggtcaatcagacgcaagtacacggattgaagggcccacaagtcaggtgaaacccccttggaacgggtcataactgccataaccgtcactagggctcaccagtcagtgaccctgccaaaggagaagccaggagatggggcccagggttcggctgaaccaccacaagctcctctcatcctggccttccacgtgtacgctgctgatgcattcccaatgacggttaagggcgttttggtcgtttcccatacctgtaatcgtcatatggaggctataaatagagctcctctccctcccttcactcacacacaactttgagctgaattacaagaggctctattttatcttttgtacattagaattaggtagagagtgaggggaagctttggaggagtgcccgaaagtttgccgctcatccaacttctacctcgatgagtgtagcttcctaggaggaattctggagttgtaccggagctgtcggtacactctgctctgggtttggagaaacttcttctataaagtaagcattcgtgttcctttcttatgttatttaattactttgtctaagtaagatagattttcatctttacgggttcattgtttagtattcgtattaagtgctctagtactaggactccagatagagaaggaagtcatgtacaagtattagagtagtaattaataacttagacatggtgtctagattagagattacctttctttgttgtgtatcccacggatttgtcagaggtaggcggtaggtggtgacagccctgaatcccgtccgtgtaatcctccacgtacggatacatcacagagctatagctggaaccacgctggcagaccagcaggggtcggtgcccaaagcaacagatagaaaattaccttagcttagataattaatacacataggaagtcctctttatcctagtctacctatcattagttgtccttggatagtcttagccttaggtagattacacacgttccctgagttcgatatccttttaggatcacccgaaggtgaagtgctacaacggtattccgtgcgcttgcggatttatctgtggtcgtaagaaataccaacagtggttgaaaaattttgaaatgatgaggagggaaactgagagaggaggactaaaaaatacgggcatttttacatgcggaccacttaaccgtccgcatgcaaaaatatatttttgcatgcggctctttaagaggaccgcatgcgaaaataattattaaaaatattaatttgatactaaataaagttcgagtcgaattttaagttgctaaataaactcatgtgaaaaggttgtcaaaagcaaagttgtacaactcattgagacctaccatttttcttttggtcattttgccatccgagtttgatttaactatataaa

SEQ ID NO: 16094 - DNA, 1081 bp, Oryza sativa
aggaggtagagctcgattttagaagaatttatgaagaagaatgggtcaaatcggagttcaaacggaaaagttatagcctccggaagtttgaattcaggaaaaatccgaggataaaagaaaaaggaatattccgagaatattctctggatatttaatttcggaaattgaattatttttagataaggaaaatatatgtgggcccactgtcagtggcatagagtgtatgggtgaactcggtgtatgtagactcgatgacgtggaacgacacgtggcgacataaggcgatgaggtggcactgacatggatggatctaggctgaggtggcataagttagggattatgtagatccaacggttgggatttgatctaaggatttggacgactgtgattatttggagtttctagatggcaagtcccacacgtcagtgtcacaaggaagaggacaaggagcagctgctccaccacaggcctgggcgtgcccggccattgcggcatggcgactccggcacagcgacgtcggcggcgttctccggcgacggcgcgcagctgcagtgacgagcagcggcgtcggcaagaggaggcggaggcgaatccggtggcgcagcaccgagctccgggacgaattggagatgacccatcaatgacgagcggcggacaccggagttgaggagagaggaaaacggcgcggaaggaaaagaggctcggcctcagggctttaccagcggctgcggtgcggtaggaagacggtgacgataacggcgcggctcccggcggcggctgctcacggtggagatggcggcggctttggaaaaaaagggggaaaagggggcgggggccgacggtatttatagaggagggagtagctagggttagggcgcactgcgcaagctttggaaaggcggcggctccgaatttggcggcgcggcttgcgggatttggcggcggccgtgtgggcttgcgggcggctggcgcgggctcggtcggcggtggcttgggctggcgacacagagaggaggaggaggccaggccgaggcggcacgtgggcttggggcttggcttccccaggcttgcagctcaagaa

SEQ ID NO: 16095 - DNA, 1238 bp, Oryza sativa
ccctatctttttgttgcattgaggagctgatgagctgagctaatcagggcagaacaaaggcaggaggatatagttttccaaggtttgtgctcttcctttgttctgttttagccctatgcatgaagaggaaggtatatagtcaagattgcatgcacttctctgattcaaaggttgcttttcaagctagtaactcaagtagatgatcttctggtgtttctctcccaaatctaaacaatgtctgaatctcatcagatcctagggccggcctgcatcaaaaagaaggatgcatccgagcggcggcgcgctgtcggtgccaccggggtttcggttccacccgacggacgaggagctcctctactactacctgaggaagaaggtggcctacgaggccatagatctcgacgtcataagggagatcgacctcaacaagctcgagccctgggatctcaaaggtaaaattgaaattgagcaatcaatcagtcagctcatctagctagccggccggagctagcaagcatgcaacagtgagatttagctgaagtttaaacatggtgattaatatttcatgtggtatatatacagatcggtgcaggatagggacggggcctcagaacgagtggtacttcttcagccacaaggacaagaagtacccgacggggacgaggacgaaccgggcgacgacggcggggttctggaaggcgacggggagggacaaggccatcttcctcgccaacgcctgccgcatcggcatgaggaagaccctcgtcttctacgtcggcagggcgccccacggcaagaagaccgactggatcatgcacgagtaccgcctcgaccaagacaacgtcgatgtccaggtatatatatatatatatatatatatatatttgacatcagcaaaaaccatatgcaacattaagttcacgatatacatacttagcatccatgaaatgccaaagtcatgcatgatatcacgactcatgagtactggtactccctccgtccaaatatataagtatttctagctatgaacttgaacaactgcgtgtttagattcatagctaaaagttactatattttgggacgaattgcagttatgctagttttgctatttatcagtcatctagaactttgttattttgtcagttacctacatgaatttgtgtgtactatgtatatgcaattggggggtgatccaaagagaataaagtttcaggctgagaattagtaaaaagggatat

SEQ ID NO: 16096 - DNA, 1295 bp, Oryza sativa
cctctggacgagcacggttatgaacatacttcttcaaaacgcccatgtacctctcgaaaggaaacatgttgtttaggtacacaggcccgagaataccgatctctttgacaaggtgacaaagcagatgcgtcattatattgaaaaatgacggtggaaatatcaactcaaaactgacaagacattgcaccacatcattctgaagggcttctaatctatccggatcgatgaccttctgcgaaattgcgttcatgaaagcacatagctttgttattgttgcccggacattatctggaaggataccccttattacaactggtagcagttgtgtcatcaacacgtgacagtcatgagactttaggtttgtgagctttgttattgttgcccggacattatctggaaggataccccttattacaactggtagcagttgtgtcatcaacacgtgagagtcatgagactttaggtttgtgaacttcttctccttcgtgctttttattcgctttatattcgtggagtatccagacggtacctttatgctctccaagcattcaaacatactttccttctctgccttgctaagagtgtagctggctggactcaagtaatggcttcctttctcctttggttccgggtgaaggtcgctgcgttgttccatatgcttcagatcattacgtgcttccagtgtatctttcgacattccatatacacctatgaagccaagaaggtttacgcaaaggttcttagtgatgtcgattgcgtggcggacgtccaagaattctcaatagggtaactcccaaaatatagatttctttttccacatctccgcgtgaccatcttcgctctctataggctggcttctaggcccctttccgaacactactttaagatctttaaccatagcaaacactgttttcccgctgcgatatttaggcttcgtacggtggtctgccttatgttcaaagtgcttgcctttcttccgtatcgggtggtttgcagcaaggaatcgacgatgacccatgtacacaaccttcctacagtgattaagatacgtactttctgtttcatccatacagtgagtgcaagccttgtaccccttgttggactgaccggaaaggttgctaagtgcaggccaatcgttgatggttaccaacagcagcgctcgtaggttaaactcctcctgtttgtcctcgtcccacatggggacacctttctttttccacccaagtttaagatcttcgaccagtggtcttaggtacacattgatgtcgttaccaggttgcttggggccttgaata

SEQ ID NO: 16097 - DNA, 1549 bp, Oryza sativa
tagtttcttccccatggattataaggatggattgtattgtgggaatgatattgttattagtttaacttataattgcctgtcatggatgtccatatttacaagggagattctgccgaaatttctaataattttgggagtgttgatgaaaaacacgaggcctgggagatctgcttaactccagtgcaggtccaaaactcgctttcgggtatgcaagcgtgctagttgatttgatcctgcaatcaacaagaaataaagacaaagaaaccgcggttaaacctataaacgatagccgatcggctaagtgccgatgacatatcatttatctttgagccgatgtcatgtatgtatcgatcggcagttataaatagataataaagaactaaacctacccgatcggctatagatattaacaatatataatccttatatcgatatatacttaaatcaagtgattgggatagatcggtcgccatgccgagacagtataaatcacttagattgaggctatatatgttcatagcatagctgatcagatagatttagcatgtattggctaatactccgataccactctatgttaagatattaaagcaagcagaatatatcaaacaaaagcctaatatacttaaatgcaataagatcttagcataaagggcagatttaacacatcaataaaacatatagagtaaatatagttaaattagataagatcggctgaaaccccgatactaccctaatcggcaaccaagaagcaggctagagattgagaattcctaatcatgactcataagatcaaacttaactaatgcagctatatgtataaaaagaaagacaatatctagacaatcaagccgttggaagtttcatagagtggtggataccttatataatctaagtcgataacgatatctaacctaatcggctgccctctaccgatagatgttagccgattgtagattagatagcgatattaccagagattatgtaagatatatgataactcgacgaattacataaacaagatcagagtatcataaagatggaagcactaatcccgagaacgcaagccgccataacaagttttacctcttgttgaagatcgaaatcgatgcagctcaacccgaaagcaagaactcgtcgaaacaaaactaaagcaaaaagggtggcgatgcgccgagattgtattgaatgtgtgttatttgattacatggggttgggggtctatttatacctgaaaattacaaactatgtccatatcggacacgactcttatctctaacaaactctaagataccataagtctttacggcagacttttgcccaaacatatatctaagaaaattacataaaatatcctaattaatagatacaattgccttcccaggactctatccatgcgtggcaatcaccttgaagcatatcaactcaacccgatgtcgtataccaagtcgtattgtcggaatcggctgtatcacctgacctagtctaactcggacttagccgatccaatcgtagccgatccggactccagccgattcttactctgttt

SEQ ID NO: 16098 - DNA, 660 bp, Oryza sativa
ttgttcgtccgcagcgtcagttcttcaacaacaatgctggcaacaacatccgtaatcaagctccacgccctgttgtagctccaacacagcaacaacctgccaagagggagcaaggcagcaagcccgtggtgtgtttaactgtggagacccaggacattacgctgacaagtgtccgaagccccgacgtgtgaaggttgtccctgcccagagcaactttaccgcaccagcgccaaaggcccgtgtcaatcatgttgctgctgcagaagctcaagatgctccagatgtgattttgggtacatttcttgttaacttagttcctgcaacagtgcttttcgattctggtgctacacattcattcttatctatgagttttgcgggaaatcatgggatggaagtagaagatcttagacgtcctttgatggttagtaccccaagtaatcaagcactctctttgcaacatagcccctctgtcagaatagaaattcaaggagtaccatttctggccaatcttatcttgttagaatccaaagaccttgatgtcatcctagggatggactggttagccagacataaaggtgtgatagactgtgccaatagaaaagtaactctcaccagcaatgatggtcgagttgtaactgttcatgcattgtcttctgagtt

SEQ ID NO: 16099 - DNA, 1196 bp, Oryza sativa
taaagtatatctttactcagccggatctgaacatgagacaaaggagatggctggaattaattaaggattatgacatgggaattcattatcaccccgggaaaggctaatgttgtagcagacgctcttagcaggaaaggctattgcaatgctacggaaggacgacagttgccattggaattatgtaaggaatttgaaagattaaatttgggaattgtcagtagaggtttcgttgcagcctagaagcgaagcccactctaattgatcaagttagagaagcccaaattaatgatcctgatattcaagaaatcaagaagaatatgagaagaggaaaagctatcggtttcttggaggatgagcacggaactgtttggttgggtgagagaatctgtgtccccgacaacaaagatttaaaggatgcaattctgaaagaagctcatgatactttatactccattcaccctggtagtacaaaaatgtaccaggatctcaaggaaagattttggtgggcaagtatgaagcgtgaaatcgcagaatacgtagcagtatgtgatgtttgtcagcgagtcaaggcagaatatcagaaacccgccagtttgctgcagcctttgaagattcctgaatggaaatgggaagaaatcggtatggattttatcactggtttacccagaacgtcaccaggccacgactctatttgggtgatagtcgacagacttaccaaagtggctcatttcatcccggtaaagacaacttattccggaagtcggttggcggaattgtatatggcaaggatcgtgtgtttgcatggcgtccctaagaaaatagtgtctgatcgaggcagtcagtttacttcaaatttttggaagaagcttcaggaagagatgggttctaagctaaactttagtactgcttatcatccgcagacagacggacagacctaaagggtgaatcagattttggaagacatgttgagagcttgtgctttagacttcggtggaagttgggataagaatctaccttatgcagaattttcgtacaacaacagttatcaagctagtcttcagatggctccgtacgaagcgctgtatggtcggaagtgtcgcactccgcttttgtcggatcaaacgggagaacgtcaggttttcgggacggatatcctgagggaagcaaaagaaaaggtgaaaatcattcaagaaaga

SEQ ID NO: 16100 - DNA, 1977 bp, Oryza sativa
attcgagttcgaatcggatcggcttttctctctccgagctcgagctttccatctcgtcgccggccgccgtgggccttcgccgttgcctcctagcccctttaaaaggacccccgagctctcctctacccgccgccaccctcgccttcgcctctcgtcgtctgtagagctctagcgccgtgagacctagcgccgccgtcgctccagccgtgcgccgccgccgttccagacgtcgccgtcgctcgggaagaccgtcgtcgtggtcgccaagtcgtcgccgtcctcgtccgcctcttcgtcgccgccgaagaccgccggagcaccgtcgccgccgtcaacccgaagagcgccgccgcttcttcctcgtcgccgtcgccgtccgttcctcttccgccgtcgctttggtcgccggtgagttcgccgtgccgtccgctacccgttggtgccttccgttcgcgccgccgtgccgtcgttcgccggcgagcatgtgcgcccgagccgccgagccgccgccgccggtggtgacgtcatcgccgacgtcatcgtcccctctcccgtgagccggtcgtggatcgatcgatctcggccgtccgttttggatcaagtcgatctcagccgtccgttcgcgtgaactgccgccgtgcgcccggtccaccgaaaccctagcccactgacgcaataaatccctttttccttttcaaaaataattcattattgcgtcataattcaattaaaatcaatttaagtgttttaatccgatttaatcttcaaaaattcataactaattcatcttagctcggatttagttggttcaagtctctaaatttttctaaaattgagatctacatgttaaaaatatccacatgtactgttcatgcttgtttatgtgctgtttcggtgattttgctcttttctgcttagattccgtcgtttccggagagtccgttttcgccggagaagagtttgaagagttccaaggccagcaaggcaagtcacacagatcccaaacaaccctttgagcatgttgatcctatttaaagctattgtttctattcaactattgcatttattttcgaatgtcattgggtggaattaacctattgtttgttatagcccttttgttcttgattactttattccttgataccttgggttattataacttgactagttgagctctatatattgattcagctagatattaggtgtgattgcttagccatgcttagaaacattagcacactattgggataacttatgattcactattaattatttaatgatggcttaatgatagttcacgatggtcaatcgtgattggttaattaattaatgggacggctaatgccttatcatggtgggttgtgagctcatggttttgagagtcgtgctcatgacaattaaggaccggttcacgagtttcggttgtgaaacattaaccgtgccaaccacaagccagcgtgggcaatggctttatcttttgtatagcatggttcattgcggggcaccagactgagaagtggcggagataagcccacgggggtcgctggggagtccatgccttgtttataagggggtgattatgatccaggaaggtgcgctgcagtggattgtgttatgcaaggggtattgtcacaactcctttccgaggtaccgtggtggtattgaggcacatggtgacatgatgtggggttgtgtcttgtgggtacagtggtacacctctgatcagagtaaaactattcgaatagccgtgcccgcggttatgggcgggtctaacaatgtctttcgtgattagtctcacacctctcatcttagtaaaagatgctataactggtaataatttgtttagctcctggtttgaaatgctatattcctggtttgagatagatctgtacagccgggtgtggttgttcagaatggttgggcctatacaacagggtatgttgtatagcgttggtttaatattgtttaattattact

SEQ ID NO: 16101 - DNA, 1875 bp, Oryza sativa
tctccacaatcgtcacccggcctaaagttaaaatcatgactgaacttttgctctcgatcgagtgcccccactaattcgtaactgttgtgtccagcttaattgttttgctcaaaacctgataaaattatatataatgcgacgagtacactttgaaaatatccctttttcttttctttttttttgcatgagatgcgtacaccaaattaagagtgtgtttagttcctgaaaaaagttgaaagtttggggaaagttgggagtttggaaaaaaggttaaaagtttatgtgtgtaggaaagttttggatgtgatgtgatgtgatgggaagttgaaagtttagggtagttgggggtaaactaaacacgccctaaattattaatgtgtgcaatctctacaggactagttcgctcggtcgcgccggccggaccacgtgatctcacaaaatctatgcacgaccccatcatgattatgagcttattagctagctaataaagcttggaggatgatgcaaaaagccgatctatcgggtctttacctagctaaggtagtgactcacgatcgagagctcatggctgcacatgggtcgtcacacagctctccattcatcgatcaccatccttcaattcattcctttctccgaaagcaacccatccatcgattttcccaaaagtccaatccggccgtttccatgatgcattaacttaaatgcaagcatcctgcgagatgagcgttgcttaattatttggatttcttgtggtcgaaacttttttagctgcagtggcggaactgagggggctggcaggggccatggcccctcccaataaaaacaaaattttttattatccccatatatcataggagattcagtgaacaaacaacagagcttttcactttgtgtatatctttgatccaagtgattcattcagttcattcaacattgataaagtgtgctctctagcttcaaagttctatcctgctgattttttagaacaagaggaagccaatttgagatgtcaattacgtcactatgaacttgatgtacccaccaatcctaaattttaaaatctgacatctgttgctgatctttgtcgtcgagtttgcaaactattggcttttatgtattgccaatgcatgaaaaaaaaagagaaaatgctaattttttgaactgtcaaaagccggctggcccccctttgattttctgtccagctctgtcactgtttagctgaattcaagttttaaacgcaacatgggtgatctcgtattttacggctaattattttatcagtggtaggtttactcgttgacagagatatttatggtgacttaattaatctcaaaatatatcaagatgtgccggtccaatctctcgaagattttcataggggtaggggtgtatgttgtgtatttatagggataggtatgcatgtatgtgtgtgtatttatagggataagtatccacacatatatgttaataaatatgtttgtactattttgcaaggtgtatatgtgtgtatccctagggataagtgtgcatgcgtatatatgagcaaatacagttgtactatgtttcttaaaagatgcaaacatccttataaactactaactccatctgagaataatctgtacaggagcaggatgtatcatatccagtactaaattaacttattctaagacggagggagtaataatttgtaaataagggtataattaagtgcgctgacacatctaagtatgtattgtctaaacctcttattacgcttccagttttttaggggaaatttgtaaaaacctgctgcaaatatcaccctttgagattccatcctaaaaagatgatttgttgcaaattaatatccccttttcctaagcaaggcaaaaaata

SEQ ID NO: 16102 - DNA, 1670 bp, Oryza sativa
tcaaggcttccacatgtcttgcaaggaggctaggacgagcaggagaagggtgtccactgtacaggttgatcgatcgatcgatcagagatcaacatgttgatcgatcaccctgccctcgcgggagcccgggtcatagcggttccagaggcgcttggttcacgcacagctcgctggtttgttttaatctcaaccaaatcaacggcttggaatataggactcaccgagttaaaggaaaattaagggatagattttattaacgccacgtgtcagcttaagagcgttttgaggattgccacatggcagcgttggagtgttttaaggaagtttaatggacttttagtatataatagatagatagatagatagatagaagatagatagatagataatagaagataatagatgcctgcgggcttatgatgtaataattagcactagactctcgtgtatgtgcatttggtatttcaggtatgaactcgtgtataccagactacttgatcttgggaaatggtattgtttacacgaatgattcctgttatcaaaacgggggtccatatattggaagagcgtgtgtagctaaataatcatccatagctatctttattaaaaattgaaaattactctactagtgaatagttgcatttatcttatccaatgataaccattttccattttttttttctggcggcttccaccagggttgtgtgggggagagggcggcaacgtgtgcggtgaagcggagcgaggctatagagatgatgtggtggcgtgcaggcgtggagacgacgtgacacgcagctgtggatgagccgaccaacatggccggcggtggcaggacgacggcgcggtgacagccgggcggcaataggacgacaatgggcacacaacaagaagaaggccggcagcgtgggaggtcggtgtgggcaacagcagggaggcacgagacattatgaaatcaccttcgatccaatacccttcaatgtgaatattatgaaattctactccacgaaaactccccaaaaaaaattggcactcaaatacagctccaagagtcaagaatccaaactgaaatatcatccatttaattcctcactttttataccaaaaaacacattttttttcctttattgcttcatgttttttgagttaaagataagcaacctgagcagaggagaggagctttgatcgaaatgcatctttacaggggtagcccggcccgataaggctttgttgggccgggccagtaaggagattactctcaccggcccagcaagcgaaatgcttccggtccaagtccaacacgcacccacctcaccctttgctgcggtctctctctctctctctcggcttcttcctccttgcgcgcagcctcgattctcgacttttcttgctgtggggagaagaatcgcgattgcgcgaggggatttcttgctgctcggagatgccgcggattccgctgatcaagttccccaagaggaatctcaagatcccatccccacccccaccaggtgctgctctctttcttcttccccccaattccaatcctttctttcttgtttttttttttttctgttctaggtttatagtgggggcatgatgtgtcgttcgggatctaaatccctttgattttcttcttcctgcagcggcgcaacctgcagatcagcacgcgt

SEQ ID NO: 16103 - DNA, 1628 bp, Oryza sativa
gactgcagtaggggatgctccggccccctttgccccccctgctgcgtccgtccctttgctcgtgtagatgtggtttcacgatagatctgagcttagtccggagtaatgttttgtggcttatggttcaaacggaagatattcttgtgttgattcttgtttgccatctagaacatacattatatgggattcggaaacactggacagagatgaatttccaataatttaatgaagaaggtttttttaatcttttgtcatgactatccagttatgccattcagatgcaacacggctgctggttaatttgatctgttcagctaattgtttactagtgacattttttctgcggacagttgttttattgacctatttactacatttgttaacattacattgatttctgcatttcttttattggaccaaatttctcaaaactacaattactttggcaaaactaatacaaaagtacaggtttaaactgctgtgtgcctgtatcgcagaactaaatattcccaattgaatttatcaaaaaaccaggtttaagacaatattaaaaaattacagtttaagtcacaatatatcaaaacattaggtttagcactgactctttccaaaaactatatattataaaagttccacaaggataatgtttttagagcagaatctctaaaatctgtatttttgtgataaatctgtgctaattaagtcttgtggtaacttcgatgttagatgtgtagttttatgttactatggcttaaatatgtagttttgtgatattttgtcatagcatttacagatatatgacatttacttttatgttcgtagacctggatgtgctgaggtagaataattagaaacctccaccacctacatatgcaccccaccaccaccaccttcttcaattctctatggcacgctttctcgtttggagaccatgccttgctggctgatttggctactcttttcttttccagagcctgtcaaccacaccaatttttatttttctcattttcgcaggatagaatattatgcttcttctatactgtgatagtgtgatgtttcctcagtgtatgattgccaaatgtcatttggatagctgtgctgttgtcccatggacaatacaggtgctggtgcattgggatcgacgaatttctgtccacaagctattcattttagttcaactttacctttttctatgtttgttattttgcttggatatgaacaacatatattgatttactgaatggaaatattctactgatcggtcgtttcataattctgatggaaaaatgtgttcataacattttcaggagttaaatcagaggcaccatcttcttccggggagattaaaaattaccgctttagatcagatgtgccttccccaccttcttatacggctgttggagggccagcttcactccttcctaaacgcaagccactgtcagaggaagaaattgaggctatcatggtatgtacttgttcttaagtatgtcatttgcaaatgcttgcaaacaaactttataacttggacaacttatttgtgcaaacatcaaaattttctcatgtgaaagtgacatcagtagatttctcatgaaaagtgctttcatgcactatatttatgatttttccat

SEQ ID NO: 16104 - DNA, 2374 bp, Oryza sativa
gtttaatctgcacccatgtgtgagtttaagttattgaagtgcatccattatccactggggaactcttggacaatttacaaacatagatcttatcttcaaactaaaccccgtcactgtcagtaatcctccgctcatatcatttatagattggatttgatgtgttttgcacttgttgacaggagtcagaggcttagtgtactcaccaatgtatcccaaaatatttctcatatttgtttcatcaatgcattgttctccatgatggcattcaaagttttctcatcaactgtatattcacataagcctcctctaacaggagtttcaatctaaggctttggttcttttctgcagcatctcatgcatcatcctcttgcacaaatgctacatcatgcgttcatcatcactttgagtattatcacctcaaatgctctctaccttcctttgacacacctctgtaatacatgcataatatttcacactattatgctgtatatgtagttatatatatatatttttctgtagctttgatgcatgtaattttgaatagcgttgttaaggatccatcattcaactcttcaatattgttatcctgtacaattattttgtattttggttctgctgcttgttctacagctttacgaactatgttctattctaacaggacaattttgttatttgtatttttttttttgcagcaaggtggtatctactgatattgcatccgatgaataagataccaaaccttttaaatggggtcactagagccatgtcgatatggaccttttcgttgtactccctttttggtgtcaggaagcagctgccctgatactcctttttttgagtattgccaaaatgaccaattcgtgaaaactgaacatgcaatgcatcggttgtttgccaaaatacattgatcatggagttatgccatgcaactcaactaattgtcttattccattgctccaaatgttctgagacatttgtgctcatccatgctgcttcagcaattaatgctttcatcaaaatatcgtgtatctgccagttggacgaaatgatgctcctatattaacgatagataatttataagcacacaaaatctcattgattagacaggctttgatgtgcttctctttttcgctggtgggggccttcgctgtcccagtgccgtgtaagtaagtaatcccatgtgatggacatatgaatagctctcattaatagttctgataattctttgtttgcacgtttttccttctttttttccccctgttggtatggtgtaatggtctccacatggtcacatgctctgttggaacttggaaggatttaggtgactatcggttttctatttgtttccgtagattctaactcgaaggtccatttgaaacaagaaaaacacatgatttgtggtatgcatgatgcgtgcatgaaattcaatgttacaggaattgttcacttgggttgctcgtgtgcataatagggaggtacatggatttggagagttgcatgaaggatttccatgagattgtgctttgcccccatgttaatgccagttataagagtggggatagttgtatggcagtaattctggattagttgggaatgagcatttgaacaattacatatgttacacttggacgaagagattagcactcttaggggcttatgtcttccccaagttattttttccaattacaaggaagatgcacacacactatatggattgggtagtggcagctccaggaattttcgttgcgtggttctatctcatactttgaaattgcgtaatatcaaaattgcatctattttatcaaaaatcttcggaggatttgaaagatgggatactcctatgccaaaatggatgatgatcaaaggaccatcctaaaaatacctctagaataggcactgggattgagactgataaaagttactcccaccgtttccaaatgtttgacgccgttgactttttatcacatatttgaccgttcgtcttattcaaaaaatttaagtaattattaattcttttcctatcatttgatttattgttaaatatatttttatataggcatataattttacatatctcacaaaagtttttgaataagacgaacggtcaaacatgtgctaaaaagtcaacagtgtcaaacatttcgaaatggagagagtattatgtaagagaatccccctccacactatacatatgtttgcgaatagatctttgaccttactagaactttttggtggggttccaaccaggcataataacttgtaattgatgtaatttgattccataaatctttttcgaacaaaaatatgcttggtttccaaggagacattctccacttccaatcgtcgttgttaaaaagaggggagggggtgcagg

SEQ ID NO: 16105 - DNA, 1276 bp, Oryza sativa
atcacgccatgaagggagactacggggaaagagaactctcggaaggaaagcaataatgacggtagacaacaatttattccgtaaagcccatttcacggttctgcaacaatcttcattggtagctccgtacatcgaggagcacttggctctagttcgcgctagaaacatcggtaagtccgatgcatggattacacggcatcacattgatactttccccgcgtggctacgacaacatctcatgggtaacgagacgatcaaccaacaactggccttcctagcgaggggaccatctggctcgatcgtgatattccaaggatatgagatcaatgggtacacattctacacgagagcccaagacatgaagagcacgaaccaaaacaatgctgttcgtaatgatgccatgggacacgatgaaaaaactggcacgtattacggtgccatcgatgacatatgggaacttgactatggtcctctcaaggtccctctgtttcggtgccaatgggttggcttgactggtggaggcgtaacgattgatgacaatgggataacaacagttgaccttaacaaggttggatactcggacgaaccttttgtccttgccaatgatgtaacgcaagtcttttacgtgaaggacatgtctagcaaaggaaagaagggcagagggcctgatgagccgaagcgtcacgtggttctcccaggcaaaagaaaaatcgtcggagttgaggacaagactgacgaggcagttggatgggcaaccccctttcacggtgacgattgaccctagcatcctcctttcaaatgaagacaccccttactcacgtagcgatcacaaggagggaacaatagtgagaagaaagtacgtgcggtcaaccgtcaccgccgatgtattgccgtaattattgtgtacacgatgtaaactattttggatgaattgattatccaaataaatcaattgttgtatggcatatgttaattacgtacgattattagaattcttaacaattttaaatcatgcatatgctagttatatgcgataaatagaatttttaaaagttttaaatcatgcatgtggcatttacatatgttaattagaatttttaacaatttaatatcatgcatatgctaattatatatgattattagaatttttattaattttacatcatgcatgtggtatgtacatatgtaaagtttaatttttaacaatttaatatcatgcatatgctaattatatatgattattagaatttttattaattttaaatcatgcatgtgt

SEQ ID NO: 16106 - DNA, 4495 bp, Oryza sativa
aatggcagaacagtttcagagcttcaagggagatctgtacgagaaatacaccctgaaggggcagacactgaacatcgacacattcccgaagctaagggatcattgggacgagttcgttgcatataagacaggtcaacaaggcagacgatgatggaaagaaacaaagaaaatgccgccaagaagaagtaccatcaccacttggggtcaggcagctatagcatcgcgatgcctgttgattcaaagatcgaacacgccggcctgggagatctgcttagcttctgtgcaggtccaaagattgatgagatgcaggcatgccagtcagtttgatcttacaactgacaagatatgcaaatagtagatcaaaacagccgatcggctgacaagccgatggagtagttccagccgatagccgataatagccgatgccgataccagccgatagtgatagggtttaagcaatcggctatatgtccaatgtaaataatgatatgaaggcaatcggctgatgatgatgtaataaaataacaatataatcaagtagaaaccaatcagctagaaacaaaatataataagcactgatctgaggtttaaagcatacatcggctgcaggtccgatgtcatgaaatccacaagattagattaaacagtgaaacatttgttgtcatcggctaaatccaacttatatgtatgtgcaatccttatgagccaatgcaatgtctagataactcaaaagctgaaaccccgatgaaacccttattggcaatcaagaagcaggctagagattatggttctaagcacaacttagtagatcaaacttaactaatgcagcactaagtataaaaagaaacataatatctagacaatcaagccgttgtctgagttttcagggtggtagatgtctaagctaatctaatctagcaacgcgatttagccgataccggcagaaaccctaaaacgagaagcagccgatagagctaaatcgatatgctaagactagattaacagagacatatgataaataggtaggcaaatatatcatccaaaccagagcaatccaagaggtcgattgtactgatgcagccttgaacgacgccaatgtaaatgggaaaattgctggccgatggaacattggacttaccccttcgccggagatcgaaaatcgatgcagccccgcgtcaggtgccaagtcccgccggacgataaaataaagtagaaaaggtaaaaggtggcgatgcgtcgaattgtattgatcgtgaggatagattacatagaccccgggtgtacatatttatacccatgggttgatacaagtccttgttggacaagaaagaaactaacctaaagataaaaggaaaaatataaagtccttatcggacactaaacacactttcctaaaaataaaaggaaactaacaaactattcctaattaatagataaaatgccatgccgcatcctctttaaactcggtcacttagggataagcttcctttaatagattgatttccttaactgaatatagcaggaatccgactattggcgacttgataactcccatcggctgattccgagatactgcagccgataatgattctaagccgacgacgtctttgccgattaccaaatttcactgttaacaatgccgaagtgggaggagatggaggcaagcttgcttgagaggggtatcgaaccggccaccgctaaatggccggatcaatcggagttctggtactatgctcatggtggaacgctcaacccagttgatggctcccaggtcttcagcgatcagatatgcgaggctgcgcgtcgactaacggacgcagtggaagcctcttctcagggcacgttccgacccgacagagagaaggacgagctgtcactcgcgctgcagactcccgagcatccaggacgaacacgagggaaatgggtgattccttggaagattggattcaaggaggacatccacacgtacaggagtcggatgaggagcaagagagataccgaggcgaagattacagatcttgagtacagggtatcgagctacgagctcagcatgcaagaggaggtggcaaggaaggttgatgaacgcatggccgcacatcggtcccatgatccccagccgtacattcctccgcaatggtgagcccttcaggcaatggtagcagctgctcctcaacggggcaggtaggatcacagagcatggacgccatgcaaacctaggacgaaaccacctgccccgttgatgacatcgctcagcggacaccatgtgagctgcatattccattaagaacttatcaataaaggtaagctcgtagtttatagattttagacttgtccattcctcaagttgctgcttatatatgttgattactaataaataacctctcaccacgtgaaggtggcgtcgggcatggccatccgaacggacccttcagggacttaccactacaggccgattccagcaggatactccaaggtcaaagttgagttggtggaaggcgcgtacgaggacgtcgagttggactaccctggaggagacggtgagacgcatctacgagacacaagccacaccattatactatggcgcaagcggtacatcatcctccctaggcgacaagcggcgtctcgtgcaccatctcctccggttccgccatctcctcctcaggctcttgcaccgtctcctcctcgtgctccagcaccgtctccacctcaggctcctgcaccgactcctcctcaggctcctacaccgactcctccgcaagctcttcgtccggcaccttccaagtcaagggccccccaagctccaccgcctgcccccacaagggcaccgaagaaggcgaaagttgacgctgcaaaaaacaaggacccggggtatgattgcacgcaagaggagcttgacgcttatgtggcatcagaagtcaggagacaattgaagcctcgaagtccagaaaagaagattcttatagacccgagtgttagtaacttcttcaggggtatgtctgcacctcccaaggaggccataaagctatcggactatgagcgaacacttaagaaagcatcttctggaaagtccaaaccagtccctcagcttggagagcaaccaaaccaggagatcgagccgttggtgaccggtgaagattttggaatacaagaatttattaatgacaccgggctaactacggatcaattgctacgaggtgcaccaatcgaaaaggcggaagtgaaatacatgtacgaactcggtaaaccgcttgttaagcctgagcagctgcagtccctacccacacaaatgtacaaattccatcaactgtacatggagatgagcgccaccggtagagagatgatcggagcgtggatcagggacacggacttcttgtaaggagatgatattctctggatcaatttcaagggtatctacgaactataccagctggacgccctcgacgtctctattatgagttgctggattttgtaagtatcgttcagttagatttcttattacgtttcctttaattaattaggtccttgtatataagtagactatatataatatatacttccttttatcgttgtagaatggagattcaaagggcccgacggtggggggttttcgatactggattcatcgaccctcggaaagtaaacgtcgcaatgctcgaccaatatccgcaagccacagaggacaatctcgtccatctcctgaaggcgcagcattacaagacgttcatactattgccgtacaacacagagttagtttttactatcttcctatgacggagcgcggggctcctcaccgggagaccgcacgggcccccctttgccggttcggccgggggctcagggtgagatcccaagctctctgtgtatgtggaaagatcgcgacctatcgaaagagcatgaagcacaagcgacgtatacaggttcgggccgctgagaagcgtaacaccctactcctgtgttttggtggatctgtgtatcaaggagctacaaagtgtgagccaacctctcccttttcttctagctactgaatttggaaaaagtcatcctctttctctatgggcaaggtcctccttttatacttcaaggggataccacatgcacccctctctttccaaactggacttttcttctcttcataaatggacggagatttgcatcgttgctgtccgagtcgccttctgatgggacggcccacaactacctccacttccgccgggagcagacgcgtcgtggaattgtggccgcctgccgacgacatgaccggagtcagaccagtcacgtcggtcattcttgttcaccacgtgtcagcttagcaatctgcacgttggccctccttcacacaacattttgcctgtaatggttaggatgaagcctggcatatatctgatcaggactaacgtgccatctctgggaggtaacacgctagctccagctggggacgagcgcctagaagccctcgtcctgacgggacggggcgaggcgtgcgtcagaccgcctg

SEQ ID NO: 16107 - DNA, 2491 bp, Oryza sativa
atcttcttcgtcaggggccacatctccagggcgctctccatccgagaggccacgcggggcgcactcggcttctgtgccgacgacctcggggtcagagggcgacatgcgcggccttcccgcagtggcctcggggccatcctgggggtcgggggcgccaggcaccgtcggacaagcaggcggagggccagctccggccgtcgggggccttgggccgtcgttcggctcgggggcctctcctccctgctctctctctcttcgggcagaatcccgacggtcgcaaatcgcgcgcatcagcaagggaaaaccgaccgacaataatgagcggcccctcggctcgcgtttgccttcaactccgaggaggagtgcggtgacgacggtgcgtacgacagcgacggcgaggccggctacccgggcgcgtcggagtgagcccccaagcctccgccaatcttaatagcttttccttcttcttccgaggccttcaggcccccttcttgttataggctgatttaatctgcaatcaaataaagaggaaatttttgtgtcaatttcatttgttctgtgtatgagacgaggatggtctgtgccacagtccttctgtgtcttggcttgaacaagggctcgtgcccaggtcccagcctcaaacggcgcgggtcaaggctagtgcctggggagatccacatgtcgagactggccaggccgggaacgtggtgaccgagggttatgggtgacccgattgtgggtttttgccgattcccccccggagttcaccacgccccagggcacggctcggttctgggccccgtttggcgaatttagccgacccgagcccccgagggcaggattgagcacgagtgacctatttcaagccaagattcttcaaaaggaaataacagcacagatacagcctttaagaaatcgaaaatgcttttattgaaatacggaagagaaaaaagataaacccccggccaaccctgcacgcccgggggggtgcggggttggcccgagcccaagacctgacacccgacccccactaggggtagaagcgatgaaggtgttcgatgttccacgggttaggcagctctgtgccgtcgcccgtggccagccgaacggagcccggccgggggacgccgatcactcgatacggaccctcccacattggtgagagcttgctcaatccagcacgcgtttggacgcggcgtaggacgaggtcgtcgacgcagagtgatcgggcccggacgtggcgctgatggtagcgccgcaggctctgctggtagcgcgcggctcggaggccgcgcgccgccttcgctcttccaagtagtcgaggtcagggagcgtcggcttccttctttttgtcgctcgcaggcctcccctttcgggtggccagcgaaacgccttcgacggcgaggacatgaccctcgtcgtcggaatgggccaacctcttcttcctcctcctgtcccgccgccctgaccgagcggcggacccgggggcggccgaagctgccataccggaaccgggggggttccaagtccaggcctcctccttgcgagccactcggtccgcgagctgaaaaagctccgcggtagtctggggctctttggaggcgatcttttcgagcatgcggttgtgccgcacacccctcctgaacgcgtagatcaccgcgtgtgcagggatgcatggtatggtgttgcggacttgacagaaccgctgaatatatgagcgaagtgacttatcatcccttcgctgtattgcgtgtaagtccgcttcttcacctgggcgcggatatgtgccctgaaagttcatggtgaactgttggcacaaatcctcccaggagtggactgacgcgggtggcaagttcattagccaaccccgcgcctgccccttcagggccatgggaaagaaattcgccatgaccctgtcgtcacccccggcggcctcaatcccggtcgtgtagacctggagaaactcggcggggttgacgctgccatcatatttttcggcgatggtgggccggaaccttgggggccaacggacattccgaagactcgccacaaaggctctacagccgacaccaccaaccgggggcacggagggctggtccctgcgtccgtgtcgaggtgacactctggacgaggaagcaccctccgttgcgtgggcagcacgtcggtcattacgccggcgctcgatgctggcgcgggcgtccggccccctacgcagatcttcccgggtcgaaggagtcgacgaaggagtggcggccgaatggcgaacagcggctgccactcgtcgtgcccttcgtcttgacgacgcggagccggtggtagcagcaccagaggccttggtggcggaagaccgcccaccagcatctaggcgctgccgtgcagtcatgaccaatttggccacatcgtccagccagcgttgggctggagactccgggtcatgggcgacgggcgggtgacgtaggagcgcgcccgcagcttggagcgcgcctggggc

SEQ ID NO: 16108 - DNA, 723 bp, Oryza sativa
cacgtgggcgatcgtgtctgcctcaaacctctagtcatgatactcccggtcccatgtcaccgacatcctataccaaatttctttcccgtacgaacatgctaagtgtttcatatgtaatgcatccgacgcacattgcagattccactgggtccttttactcttcgacttggaggcctgccccgtcaacgtatatgactcaatggataaaaaagagtctacgtttgacaagattttcgaactgatagacaggtactgtcataagttcctatgctaattaagaatcttgttataattaattgctactatgaatcatagctttaaactgcatgtagggcttggtatcggttccgtcatttggtccgcggcaagtggagagaaagacttaggcggaagtttaattttcctgtgagtacacatgttctacatttatattgaatctccaactcaaatacatacaagtgtatattaattaattagatctctcgccgtttgtcatttatttatagtgcgcaaaacaagcccagggaactaacttgtgtggctactacatgtgtgaatattgccactgccttgcagaccaaatcatcaccacaagagagctcgatgtacgtacaaataaattcaaaatttcattgcatacgtatcgatttgttgtttactaattaatttcatacattcatatagtttattcacatgagggataacctcacgggctgcaggaat

SEQ ID NO: 16109 - DNA, 1756 bp, Oryza sativa
tgtcgaaactagatttcggcaataataaaagggggtggctatcaagctggataagtgtatgggtttggagacaaaggatttatacaggttcaggccttcttataaaagaagtaataccctactcctgtccggggatgaatccgccgagtgtattattgattgtatgattcaagaaaaatcagcatatgcccctaggggcgcccggaccccccttatatatgggaaggagtccgggttacaaaagataatctatatccctaacggaatatgaaaatataggtaagatacagtcgtaaccgactaagtttcagggtgtttccttgatacacaagttaagaaacaaacccaagatacaaataagatattctatctacattaggtatcctgtacccagttcgaataccatcgccgtgtagatatgggatacccatgatctccacagtagcccccgagtcctttgcagtcgaccatcgtagccttctcaaagataataatccgagtacttcaagctcttcaagccaaaatctgccgagtggactgtaaagggcgaaaagataaagaatatggtgcatcgaatagatgcacctaattaggtgtagcccccaactatgtgattagttaacaaactaaacatatagttgaatgacaaaataataacgcaattgtgcattatatgacaaaagcatatgcggcgcctaaataggcatgctagccgactgatttatagccacaataaaagaaatccgagtggtttacactctaaaaggttcacgaatgaacacacttgacaggcatccgaataaaaactctaaagattacccatcaagtattatgaagattatggtaataaataagtcgaatagcctaggccatgactatttaccatgaaaacaggcatataacacgccaaggaaatgactatagtaaaaacaagtcattcctagttaacccaaacagcttttgtagcctaaaaaagcctgcaaaaacagcataacgcctttctgtcgggcacctttttaatttgcattgcaataattccaaagaattatatgaccgcataaaaaggatttgatcagcattgggcaacactgttgtgcgcataatatcgccaaagcaaaatatgcctaagtccctaaggaacacaatgggccacgctgttaaaattattgggctgaagtactgttcaggcctaggcccattagcacctccgatacccttaactgaaaaaatccgatatccaagcgacgcttcgtcttccccgccggaactctcgccattttccccactccctgctacagtgcaaagctgcgccggcgaactagggttcacaactccggccaaatccacctccgaaaagtgcatcaaaatccttcccgtgatccaccgcctcaatccctcacctctcccaagccatccctcaaatcaaatcaacacatttgagtgaaaccaatggcggaagagagagaaagcttcgaaggccaatgggcgtcatccgacgtaacagaagagaatcttaaggagatggtggcgcacggcgttctccctgccaaggagatcatcgggtggcgaccagcgcacggtgaggctttcccgtctccggatactcatgagattgtggtcttctcgcatttcttctacggcggttttgctcttccgacctcaaaatttttccgcgggatcttgaatttctatggaatcagcttgcatcacctaaacccgaattccatagtgcatatcgccaatttcgtccatgctt

SEQ ID NO: 16110 - DNA, 1042 bp, Oryza sativa
ccctggatttcaaaatcatgaaggagaggatgtataaatcttctcaaatgcaattgtagtcagctactctcatcagctgccagtagtgccatataatgcgttcaatccgcctccgcaggtatgcatctgaaatcctcaatctatggccaaaacataattttatcttcatgctgagttgactaactatggaagcatcttgtgcaggaatatgcattgatgaagtcagatccaccagtctctcagcgccggtctcctcgccaacacaccgctcagggaggtggaggaccaacgatcagaccagatccgcaacctcagacctccaaattggctggtcaaacaggtcctcgcaaaagaaagctgatacttgatgatgatgaaggcgatgatgataaatctggggataagggctcgcctaataaacccccaaagcgtaccatgcccaggaaaaaactggctggccgtgcaatgccaaagatcagaacatcttccaggtattatacctctcgatatgattccgcttcggcatgtcatgctcatgaaaatgatgctgaatactgaaagaacactttgcaggaaaccatctgatatagatccatctggaaaagaccccgatcctgccatgacagaacaagatatatccaaggaccccgagccgactgctgaaaaccagccgactgctgaaagccagccgactggcgcccatgcttcgggcgatagggccaacccaagtgacctgccgccgactggaaaccagtcggcaacaactgaaacggcaacaactcaagagcccccgactggaaaccagtcggacgcaggccctgatcaagagatccccgaagcagaagcgcagacgacgacttcgcaaggaccagaggctggtaacgactcgatagctgggtcttcaggtaaagaacaaagatccctcacgccagctaggtacatcttcaggttagttgtcttctcaaacaatggcgatttaaataacctcagtgtatccgtctaatgtcttggaaacacatcaggaccatcaggtgatgacgaa

SEQ ID NO: 16111 - DNA, 6270 bp, Oryza sativa
ctcgcaaaataattgcaatctgtgcaattagttatttattagccaatatttaatacttcatgtaggtgttcaaacattcaatgtgacaaggtgtaaaatttagggtgggatctaaaagggcccttaattaagcacgcgaaggagatgtagattaaataaatcatcgccaaatgttacatcaagctgatcgtttcttcctctgattttctgtttggtgcctactcctacctgcgtgcttttcccgaatttatagcttgacaaaacatcggaaacgcttgctatcggccatccgatgaaaaccaaaatatcggacacctaaacaatcaacgaatcagatgagctctctccctatacacactcgtaggcacatgcgggcttcctacacacactcacacacacacgcacacctctctcattctctcccctacatgcacaatcatgcattctctctctaatttatgtatgaggctatacttggaaacttcaaaaattttgttctcctaaatcatttacccaatttataatctaattataccgttgtaatcgttccaattaaatctttacaacaagaccacacatgattattttcatattaaatatatatgtgtttgatgtttcatgtgtgagaaacatgtgtttcacggagaattcgacattgttgcatattttatattgttatgttgcaatttttttttaaaaaatgcaaacggtgttgtttggatgtctcaataagtttttttaatgtttcactagtttatgtgtaaatgttgcacgtggtattatttgaacgtttcagtaagtattgtgtgatgttacactagttcattcacaaatgttgcacttgatgttatttgaatgtctcagtaagtatttcgtgatgtctcaatagttataacttgatgttccatgtattatatgagaatatttagttagaaatataattatatattttttattagaaacataagaatgtgagatcttgttttaaagatttaattgtaacaaatatagaggtacaatcaaatctcataaaaagataattagtttatgaagaaaaatagtttaaagttcattaaaaggttgtgtgtgcagctgcttgcgacagtgcatgcggcaggggagtagtgcatggcccataacaacatgcatgtggtagttgtgacttgtgagtgatgttagtaagcagggatgcgggcatccgatgttttgtgtattatcggacgtccgatccgtaggcgtctccacaaaacatcccgcgaattcccgacaacaagatgaatagctataacttccagatggtgtaccatccatctactgtaccgtctagtggcaaaacccctagctagttagcttcaccttaacaaagtttgattttttttatctttggaattcaattttcaaatagttttggggatctactcccatcaccttatgtgaagctctcatttcatgatcactaagaaatgtggaaaatctaattgttatattctgatgaattacatcgaccctctcatgggtgtgtgtgtgtaaataagactacataagagatagaggcttcgagtgcaatataagtaggagtagatttatctctaggattgtatctttatctctaactaactaacatcccccctcagtcgtaacgggagcaaagcgaacgattgcaactggatttgaaatcttctatttcttcattttcttcgactcaccatcatcagttgcatctctgatggacggtcctccacctggtgcatgcgtccccttcggtgtcgtcccttgactctcctctattccctcccgcagtcatagcgggagtgtcatagacgatagcgatgacacggatgctttgactagaatttccgtcaatgatttttgttatagacattcctcgatgtagccgatcatgaagtagccgtggttgtaggtatagccgcaaatagccgaaggcgaaaaaaatatttacgccatggtgtgaagacgagactgcaattgttaacatcttgcaacttgtagatgtcagagaatgccattggagacgtcttgtgaatgtcataggatgtcgttggcaatgaggccaccactttggttggtccttctgcatcgtgtagcggtcatcacaatagcgctgccgagttgacactactacagaaacctttttgcaaacgggccagagcgattctcgcatgcgccaaatcgtctgcgaaaatgtaaatctttgcatgtggccagggcacccgcatgcgaaaatccaattttcacatgcaggcgtttaagccgaccgtatgcaaagagaaaaaatcgcaataaacaataaattccaaaaataaaaaaacgaaaaaaaacctagtgccgccccccgcccgagctcgtctcagccgccgcttccgctcccatcgtcaccgtcgccgccgctatcgcccgagaccgccgctgccaccgccgcccccagatccgccgccgagcgccgagcgccgagctccaccgtagggcggcagatccggccctctcgaggatggcgctgcccgatccaccgccacgtcgccgtgcccgccgccgagcgcagagctccaccgtagggcggcagatccggccctctcgaggacaccgccgcctgatccgctgccgcaaggcgttgccgtgcccgccgcccgccgcctagcaccgagctcctccctagggcggcggatccggccctcccgaggacggcgtcgccggatccgccgccgcaggctatcgccgtgcccgccgtccgccgtcgagcgccgaactcctccctagggcgacgaatccagccctcccgaggacagcgctgccggatccgctgccctcgccgcccgccgacgccatcgccatgcacccattcccgctgtcagcgagaagagaggagagaacaaagagagagaagaggagaggagataaagagagagagagaaataaatggggtggttgttgatggtccttaaatcataatatttgaccgtcaatacctgcatataatgaaataaaacatggtatccaacttagtggtagggattattactaatcaattccactagtgttggtgaaatatgtgtatgcaggtattttaaggataaaacacacctatcatgcgaggaaacacacttccggtcaatcagacgcaagtacacggattgaagggcccacaagtcaggtgaaaccaccatggaacgggtcataactgccataaccgtcaccatggctcaccagtcagtgaccctgccaaaggagaagccaggagatggggcccagggttcggtcgaccaggacaccacaagctcctctcatgtcacgaccggaaatcacccaacaggcgttcctgacgtgcgtgtattattccttgtcccaggaggcaaggtacaccaaaagttgatacaatacagagtttaacaagcggaagcgtatataaaattattacacgggcaacgaaggcccagcacactcaaagacaacgaaaaacagcggaagactagggcgacgaccacaggcgcttgacggcaggcacgagctagacaccaaagccttcatcttccaggaactcctcatctgggcttgggaaaattaagcaagactgagtacaaccaccgtactcaacaagacacacccacaaatgcagaataaatgcacgggagtacaagggaattataatataaagggttagggttgcagtaaacagcatttaaagacatttagttgctcaaagctattttgtaaacacgatcctagaactaaacaatgttattaatcaaggccgtgaacccgcacggacctgccttaacccaaggcctacgatgattcagaccgaactggcaacccgaccctgggtcccagctcgtcctaagccaacccaggccaaccattccatatttagttgttgagcaaattttaagaattaaaacactgacttgggtacattgctaggcttgcccatatccgagggctcggctattcgaatagattatactctgatcagaggtgtacatctttacccacaagacacatcttcctcacgtgttgccacgtgccacataccaccacggtatacggacggaagacgtgacatagtttccaacccatcctagccttagacaagagtaccgacccaatcccgcctacggccggaacccccgggacaggcaggcaggactgagcccctagcagcagggcaccaaccctctgccgtatgacatctcgactaccgggccgcagctcgtgtagccttcatttgccctggagaatgtccatcgacccccgacttcatccatctccaatccgtgtacttttgtttatgactagcctgagccacaaactaagccttacccactagacatgtggaagtacggtagtgctttgcaacagaggcccgagcttaatccttatagtggccggggtgctacttcccacaactggcatgcacccaaaccccaccgaaaacaggttttaggggttttgaaagaggaagagaggtgtgtgtccaattccaacataaaccaacaattccatagtgtccaaatgatatgagaatatcccaaagtctagagttgtaaaaccacctaaggttacctaattaaagcgaagcatctacctaaaattatactagggataccatgagtagagtgtccactagttgaggttttgtttgctctagggtgaacaagggaataataataacaataacaataataatatggtcataacaaaggtaaataggcatggctaaataaaacagtgataacgcgggaatttaaataaagcgataatgcaataatttaaatcaacataattttataaactgggattcaatatgatcaagatgatgtgtcttgccttgctcgttttcccaatcgacggcttcgacttccacgaagagcggatcttccgaagctgcagcgtctacacgaccaacggaaaagaaaaaggctttaacactaaataactccacataacagcagaaacaaagcacaaaaatgggttctttacatcttaaggaaaaattagagacttgaacggtccaattccgagttcaaatggccaagatatggccatttgaagtttatatgctctttaaatggatatttgcgaatttcttcatttaattttcaattaaaaatcatgtttattgcgtcagccgagggagcggacgcgcggaccgggtccacgggaagtggggcccacgcgtcagccgctcggtccacggtggaccgggcgcacgcggctggcggcggtcggcgccgtgggtcccgcgcgtcagccgcacccgcgggcgcgggcggctgacggccgggcccacttggcagccgcgagggcgcacccgagggcggcctcgccggcgcggccgacgggagtggcgcgcacccgcgccccgatggtcgccgccggcgaccaacggcgcggcggagtggcacccgagagagaggaggaaagggggaaggcgaacggcggtcttcggctcaccccaagacggcgaaggcggtggaaacggcggacggagcggaggaagacggcggcgcggctcgggatgacgatggcgacggcgctccggcagtcgacgggcgaagcggagcggcggacggggtcgacggcaacacggcgaagcggacggaggtgtcgccgagtcgggaggaagtccggagcggcggcggcggcggaacggagctcggcggcgacggcggagagagaggagtacggcgcgagcacgaaatcgacggcgagagcgagcggcgagcggcggaaacggaggagcggagctcgggcaacgattttatagcgtcgggaggagagagggcggccgaggaggaaggaaaccggccgcggggatttcggccgccattgattgcgccggcgacgattacgggcttgactcgaacgaatccgagggagagaaagaaggagaagagggggcaacgggagacgggattgcggggcataattcccctctctgtaaggcgcgcggggaaggcgggatccggcgcgatccgcggcggcggcggcgatagggcccgggcgcggcggcgggcgcggcgggagtagggagatgacaggtgggtcccatccgtcagcgagagcggcgggcgggcccgcctgtcagcggcgcgcgcgcgcgcggggagccgatggccggggggagatagagagagagagggagggaatgggccgagccggcccaagaaggaaggggggggagaaaaagaacttcttttagggttttctttttataaaacctttttaactttgtttatttcttttcacttatta

SEQ ID NO: 16112 - DNA, 770 bp, Oryza sativa
actatctgcgagacgacatgctgttgaaagtcacagactttgacccgtggtatgcagccatcgtcaactttatccttgtgaggcatgtaccaccgggagaaaataagaagaggttgatctacgagagccgcaggcacttgtgggatgcaccttacttgtacagagtttgttcagatggtctactacggagatgcgttccggtagatgaaggcatgaagatcattgagaagtgtcatgctgccccatatggaggtcactatggagcatttaggacatacgcaaagatctggtagagtggattcttttggccatcaatctatgatgacacaaaggaattcgttcggagatgcacaaggtgacagaagcatggagggatcactgatcgggatgcgatgccactgacacacaaccttcaagtcgagctttttgatgtatggagcatcgacttcatgggacctttcccaaagtcctatgactgcgagtatattctggtggccgttgactatgtgtccaagtgggtagaggcaatgccatgcagggccgcagacgccaagcacgcccgtcagatgttccatgagattatcttccctcgttttggaactctggggatggtgataagtgacggagggtcccatttcatcaataagacctccgaaactttttgcaaaaacttggggctcaacacaatattgccactctatatcatccccagacaagtagacaggtagaaacgagcaacagacaaatcaagaatattctgcagaagactg

SEQ ID NO: 16113 - DNA, 1968 bp, Oryza sativa
aagtcgaaggtaacgccagctaacaatctgagcttctctccttataatgcaacagatgctcatcatgaatgtgttttgcagatcgcaagatcaaatctcaagctcagtttgacgtcctggttggtaagatcaagaggcttgaaggagcaagggataacgtcgccaacgccgctgcaccaattatccaagccatgttcctcaataatggtggtccgagtgcactcgacgcaaccgaaatatttgacaagctgagtgttgctccggaagtatatttcaaaaatatcaagaaagctggaagtatgggagctggcatggccttggcgatgacaaaatccttgtacccgagaattgaagtcgacaccattgatggatttgcagacgggacaagtgaagaagctgcccttgatcttatcagtaatgctcagagtgcggctgacaagatcgcaagtgatgttgtagaacaattccgtaacagcgaccttcagccgagcgataataactctgatgatgaaagaactgattctgactgagtgtaaatgtaatacatggaggctcaatttgtcaatactggtgtatttatgctgtgcttgatgattcttgcgaagtttttgatttcttaaaagtttttgctaagctttgttgagcctaaaacccaaagaagctattaaaaactttcagtcctcgcaaactaagtagaaaaaccaaacaaggcaatgataaaccaagtaagcaaactgaattgataaaaaatcacactccttattatgatgatagcccccgactgacaacttcaaggagaaaacttgatgtttgacagtcaaaatagggaaatacaatgataaagttaagcgtagaaacgacgaagatgttcaatgttccaagaattgtcgacgagagtgccgtcttcgcgcttgagtcgatatgaacccggccgggtaacttcagagataataaatgggccttcccatagaggagataacttgtgccgatctcgtgtggtttgaattttccgtaaaaccaggtcgccgactagaaaggcacgagatcgaacattgcgattgtgataacgtcgcaacccttgtaagtaccgagctgactgaatcaaagctgcttcgcggacctcttccagtcggtgcaagtcgtccactcggtcttcttcgtagcgttcttctcggaaattacggaagcgcaaagactcaaattcgacttcactcggcaacattgcctctgccccatagacaaggaaaaaaggtgactggcctgtggcccgactgggagtagttcgcaaggaccaaagtaccgatggcagttgttgcacccatttgccggcatagggttttagccggtcaaagacacgcgctttaatcccttgaagtatcatgccattagctcgctccacctgtccattgctcatggggtgtgctactgaggcgtagcaaatcttaattccaaagtcttcacaaaagtccttgaaaactccgccggtgaattgtgtgccattatcagtgatgatccgattgggtactccgaatctgtgcacaatgttgatgaagaaatcgcgagcgttatctgctgtaatcgtgataacaggcttagcttcgatccacttggaaaatttatcaatggccacaaagagatgcgtgtaaccgccgattgcctttttaaacgggccaaccatgtcgagcccccaaaccgcaaacggccaagacagcgggatagtttgcaactcttgagctggtagatgaatttgtctggcaaaaaattggcaaccttcacatgtgcgcacaattttgtcggcgtcggacactgcagtaggccagaaaaaaccctgccggtaagctttgccaacaatggtgcgtgctgcagcatggtttccgcatatcccagaatgtatgtctttcagcaattgtctcccttcctctaaagatacgcagcgttgcagaattcctgaagggcttttcttgtata

SEQ ID NO: 16114 - DNA, 1811 bp, Oryza sativa
ttcatactcggcgacgttgtgagacgccgaaaaatgtatcaaagcacataacttagtctttctccagtcggggaaattaaaaccactccagctccagtgcccgaaagtctttttgacccgtcaaaatgcatggtccagtgctctattttctccacgggggtatcctcttggcactcggtccactcggcgacaaaatcagctaacgcttgagacttgattgaagtgcggggcttgaatgatatgtccaaagacatcaactccaaggcccacttagcaatccgcccatttgcttcgcggttgtgcagtacatcgccaagtggaaatgatgtgaccaccgttaccgagtgaccttgaaagtagtgagacagcttcctgatagtaattaaaataccatataacagcttctgaacctgagggtacctcgttttggagtcggccaggacctcgctgacgaagtagattggtcgctgaactttctggacatggccttcttcctcacgctcgaccaccaagactgtgctcacgacctgggaggtggctgatacatacagcaacaacggctcctgcggatgtggtgaggctaagaccggtggcttggtgaggagttgtttgaaatcttcgaaggccttctgtgcttcgggtccccattggaaattatctgttttcttcagtagcttgaagaagggcatcccccgctcgccaagtcttgaaacgaatcggctgagcgccgccatgcatccagtcagcttctgacatctttctgggtacttggcggtttcatgttgaggatagcagtaactttctccgggttggcttggatgcccctatgagacaccataaaaccaagcagcttccctgacggtactccgaaggtgcatttttcagggtttaacttcatcctgaaggcgcggatgctcgcgaaggtctcttctagatccaagatcagatcatccttttgcttggtcttgacgactacgtcatccacataggcttcaacgttgcggccgatctgtgttgaaaagcatctctggatcatgcgttgataggttgctcctgcgttttttaatccaaacggcatggtgacgtagcagtatgccccaaaaggcgtgatgaatgaagtcttcaagcagtcggattccttcagtcggatctgatgataccccgagtagcaatccagaaaactgagaagctcgcagccggcggttgagtcaactacctggtcaatgcgaggcaacccgaaagggtctttgggacaagacttgttgaggtcggtataatcaacacacatgcgccattgccctgttttcttccgaactagaaccgggtttgccagccagtcgggatgaaggacttctttgatgaagcctgctgctaacagcttggttaactcctccttgatcgcgtccttcctgtcttgtgcaaatcggcggagtcgttgtttaataggcttggcgtcttctttgacatgtaaggagtgctcaatcacctctctgggaataccgggcatatccgaaggtttccacgcaaagatatctttattattttgaagaaaggtgatgagcgcgctttcctatttacaatctaactcggcgcctattacagcagttttggtaggatcagaaggatctaagggaatctttttagtctcggcttcggtttctccactttttgaaatcttggcagtgggcacttctccttcgctcactgtggttgcagccagtcggatttcctctcgggcagacgccatctcgcgggtttgggccatgtcgcaactctccttgtcgcatgtgacggcttgcttgatgtcgctc

SEQ ID NO: 16115 - DNA, 1109 bp, Oryza sativa
atcatccagggtcttggcgaagaggatattgagtgcactgccaccatcaatgagggttctgcgaagcttgacattacggaccactgggtctagtaccagggggtaccgccccgggtggaccactcggtcaggatgatccgagcggtcaaacttgattgcaatctctgaccatcgaagatactggggcgtgtcgggctgaacagcattgatctcccgttcagtcaacttctgcttccgtttagactcataagccagggggccgccgaagatatggttgagctccttgcggtggtcttgaaatccagccggggtgtcgccgtcgtccttcttccttgacgtgctttgttcctcgtcggagttcttccgagtagacttggtgtattgctccgcgaactgcttgtagatgaagcactctttggccacgtggttggagtttggatgatgcgggcattgggagttcatgatcttgtcgaaggtgttgacgcgcgaacgctgtcgagaagagtgagcggcggttgcaacaagttcctcaggcttacgcttgcggtccttatgattgttacttccacctcctcccgtagccggcgtatttttcggcttccaactgggacccgactgcttcgatgcggtgacggcgtcttcggctttggcgtactcgttggctttttcaaacatgagcttgactgttctgggaggtttgcgcccaaatttgccgaccaattcttcgtggcgaatccctttggtgaatgcggcgatgatgacgtcgtcggtgatgtcggagatcttgttacgttgttcagaaaatcgtcggatatactctcgaagggattctccggacttctggataacgttgtaaagatcgtattgtgtgccaggacgctcgaaggtgccttggaagttggcgatgaagtggtcgcgtaattcagcccaagatccgatcgtaccacggggcaatccatggagccaagatcgggcggaatctgctaaagccaccggtagatagttcgccatggccttgttgtctcctcctgctgcgcggattgcgagaccgtagacggtaagccacgattcagggttagtggtgccgtcatacttctctattccagtcg

SEQ ID NO: 16116 - DNA, 4213 bp, Oryza sativa
tgtgtaagttgcattccaaataaactggcctgagccctgagattgagaatgggccacacctgctagcaggctatcagcaggagaaatctcactctcaaaaccgagacaaagagagagaaaaaaaaaagaaaacataggcaactcaaaacttctgaaccaattgcgttccatgtaaaatatcaacataccatgacttttgactactttttattgaaacaacaaagtgtaaaagatgtgtgtgtagcatcctgatgtttgaatcacacggaaactctgaaactgaacagcccactctataataatctgtatccttcggcatatcacccacacaacctgatcttcagcaacaacgcatcatctcgggcaatctctgctgcgatcatttcagcccccatcaatggcaatactggcggtaccagcagcacctggagaacccgacgacgccatcatcggcggtgccgcggctgtgcagccaccagagaaggttggtcagggagttgccatcgtcgtgccccgtcagcgccctcgtcttctgcaatgccgattccttattgtagatcccctccagggcgtacacgaagcccttccacccttctccgaccccttcccttgacaatgccggcattgtccagtccaccagctccttgacgaagctgatgtccgggaacagcgcctcgctgatcggcaggacaggcagcagctggatccccagcctgcattccttccactccggtggagcgaaccagaggccactgtccctcttgttcgcccacaggacgccgacgacacggttgttgccggtgaaatcgtcttcgtagatggtgtcaccttcacggacatgccaccatgtctgtgctgcaagcatctccaatgcggtcaatgtcgcgccgatggagacaaggtgagtatccccatagctcaatccgagaagcgcagcggagtagtacgcattcacggcctcgctagtgctctcctggttgcgcccatccgcaaattctgtcaaacctccggcccaggaatggagcttccagagatcaaacatcctcaatcttgtgtagcttgcgccgtgtttccgcgacaatgtcatgaaatctgcaaccatggagtaggcctggggcatgtacttcctcccccaggagggatcaatcttggcaagcacagcaatggcgtacaagaagtaccccaaatggtagtggtgatcattgtaaatgccgaagccgaaatcggcgccggtgtccttggatccctgcaatgtgacaaggccaccccatttgggttcatagaggaatccattgccctggaagctgccatccagccatggcgtgacggtggccttcaagaatcgctgcaccgccgggatgacgtcagggcagccgacctcctcggcgattacggcgaacctcgccgccctggcgatcgccttgccgtagaagtaggaggaggtggtcgtgatggagctggaagcaagggcatccacatccttgcgcagcgcggcggcgacctcgcccaccccgtcgtcgctgatgccccgcatcgagtgccatgtgggggacaccggatcggtccggagaacccaagaatcgccgacgacgccgaccatgtcgccgtcgatactccggtacctgaaatcgtcgagcacccggacgcagcaatcctcggagaggaggcggaggtggaggggatgggcgagcatgaggaggtctccccacccttgcttgcgccaggtgtactcgacgcagaaggggcggttcagcgaggcctcgccggcggtggggaagcaccggctgtactgatcaagaaccgcctccatggacgggtccggcaggtaggcgacccggatgacgccggagaagccgggggccgacagctgcgtgacgctggactgcgcgaggcggatcggcgcggacgcgtagaggaggaaggtctggccgctgttcatccggagccgccacttggtgagcgcgtcgtcgcaggaggccacctcgatgaaggcgtggacggacgcgacggagatgtcgacggggcccgcggcgtcggcggtggcgacggtgacaaaggggcagcccctgacgaggaacgccctgagcgacggcgagacgtcgagggtgactgagaggtcgtcgaacgcggcgacccggtgcctctgccccgccgcggccgccgcggcgtcggacgccgcggagacggtcaggtcctcgacgaacgtctggatgacgaacgacggggagtggttccgcgccgggtagcacagggtgagcgcggcggcggcggagcggaccgagtacgggtggatgtactccggctggtcgccgttcttgagcacgaagttctggaagaaggagttggtggggagcggcgacgagagcagcgccggcgcgaagaacctggccgggtccgggaccaccgtcgacgccgcctgcgggaacgcgtcccgccctcccgggaacggcggcggcgggcgtccgtgcggcatgccgggcagcgccggtggaggaggctggatccccggcggcggcgggggcggcggcggcgaggggttggtgggcttgggcttgaaagggggcttggagaggaagcgggtgagagtgcggcccagcttcctcttccacctcctcatcgcctcgctatatatacaaatcttggctagattttgattcaaatttgatttgatttgattttgaactgttcttttttttccctttacagtaactcaatttccctgcatttccggaatttcctgtgctgggtttgacttggtttccttcgcccttaattttctgcctctgttttttttttggaattttgtgccaaaatttctaaggagtatttatttttaatttgggatgggcgtgcacgcgtgccacgtgagcgactatttcatcaaactttaatcaattttccgcctatctggggtcgcaataaatgacaccgtgtcaactctccgcgtctcgcctctcgcgtgctagcgcgtcggcgtcgctgcttctttccttcctcctgacctgagagcgatgattagtcgctaagtaaacgaaacaatttgatgcaaaaaaaaaaagaagaagaagaaaatggatggccatgagcgcatgatggaggagaaagtgtaagcaaagacaagattattttgtagtactccactttgcagtaaaaaaaaaactagaactccagcaataattgaatgtactaagactgaaagctcaacaacaactggctgtactataaaatgctaataataatctaacaatcttaagagctaagatcatggaggaaaaaagcaatatttatgctaataatgcatcgatttaattaattaccctggcctaacctgacgcaagtctcgaagtagagttagtttgatggagtggttgttggttggttggttgcgactgcgtgaagctggaagcgacgaagcgagcgaggcaggtgatctgatcgctactgcatcatggatgggttcagatatgggagaggcaggaaggatgcaagcaagggcaaggcgtagcttgtatagtttgtgtgttgccccgtgccgtaaggctggcaccggcgagatggggagacgacacaagcaaaggatggccttgccttgccggcggtcgcatgctttgcttgctacgcgaggcttgagaacaacacggttattgggcttcgtttcgttggacgccgccgcaaggaagggagacggggaaattgtggatgggattagcggttcctggagtgaataaattttagcgcaccatcatagttttttagccggtgtttactgtttactgttcagggggtgtttaggtggtgtttggatccagagactaaactttactccctgtcacatcgaatgtttgaacattaatttggagtattaaacatagactacttgcaaaatatcgacgtttgatgtcgcgattccggtatttgtgtagtatggggatcgttggtactatgatatatgcgagattgtaataaaagagatggagacaaggatttttatacaggttcgggcccctgaattgtcaggtaataaccctactcctgttggccgaagccgatcgttgctcttattcaccataatcacaccagtataatatttagggtagcctatctaactgttattgacttggcggtctgaagtgttgactcatagtcgacaacagggtagtcttcctcctcgagttcatgctcggcgagatcagagacagcgctagatccctat

SEQ ID NO: 16117 - DNA, 8885 bp, Oryza sativa
tgtccccactccactatggggccttgtatttatactcataggtatccccttgtccaagtagaactagggaaaccaatatcgataaaatccgagtagtccttgtcgtttctatgtagaactctagtcatccttccttatgcggaactccttctatattcgaaagtcgtttccgtataagacatggtatgtggtgggttctgccgagatttagtcaactactcttaggtatgtggtatccataactctgacagtagtccccgacttcaatgcaaatgaacaaattcatattctcaaccgctgaccttggagtaactgttatcgagctcacgtaaccgttctcggtgagttcaaagataacgttagacttcccttatcagcctcgtgcgggcacctatagggtttgtctgagtcaatctccgatgccaaccaagaaagtacatagcatacgactaagtctcccgtctcgctgtaatcgagaatttagattgaagacaagaaattttatctcggcaggtacaccatctcttcattccgtattccttgtagagatccaccaaccgttctcgaatgatcgagaaggcgcagagcctacgacgaagccttgtcaacatttgtcgtactcgccttagtcgatcttggtgtagaaccatagagacatggagtcttcaacgatgtcgaatagaattttcctgaaagcaatactcagaaaagaatattagataaaaatatcccccgagcagacgctcaaagggtgacatattataatatgtatggaaaaattgaaaatgaattaaatttacaaaccaatgttttgtgtacgagcgtcttctcttttaccgacttcgatcagtcattttgttaagtcatacactctccctagcccccagccttatcgtcggagaatcattctcggaggataaagctcttggacccttgacctgccttggttgaaaaagtgctgatcctagcccctagccatgaagttggaaaactcaatttccgattacacggcttggttaatacacacggcgagaactcttacatgaccaggtcttatatggtcgtttgtctctacatgatccgataaggccttatccgctttgggcgtccccagccgaagttcccttaagttcctcagaggccttgtcaggacggcgtaaagggacatgaggataggtttcagctctaggtgtcgttgtggtaagggatctctgggaaaaacacttggtgatattatgtacctgatatcaactttggagtagaggtaatgggaggatcgttgtaccgctggtcaaaaaccagttgtagccccaacccgaccacttgaagtaaaggtagtgggagaatcgctacaccactggtcgagaaccaggtagtagtcgtaactcgaccacttgaagtggaaaatagcgggagaattgctatatctctgatcaaggaccaggtagtagccttaactcgaccactagaagtaaatgtacgagagatcgctacaattgactggttgagaaccagtgagtaggtgtctctcgaccattaggagttggtacgaggaccgccacgctgccggtcaaagaccagtcgtagctgtccctcaatcatctgaagtcatctagagtcgtggtgcgaggaccgctacgctattgccgtagtcgtaccttgaccatcagaagttaaggcacgagagatcgctacgatttactggttcgagaactagtgagtagaattatctctcgaacaccaattgaagtgcggtgcatgagattgcgtaccttctactacgttcgagcagccatcggagtatacattatgctctcgcaacacctaatggcaagcttgctggctgcgatgagcatactgctaccttcttacgtggtctcgtagagctcagtcgcagtatgaacttattctgctcgatacatccatatggcaagcttgtcggtgccgaggagacattctacgcttttactggcttcgagcagctcagcgagtagcaattatactctctgaacaccaatggtaagttgcggtgcgagtagactgctacccttttacgtggttcgaagagccatcggagtagcaattatactctcgaactaccaattggaagttgcggtgcgtatgagactgctaccttttactggttcgagaaccatcgagtagaattatctctcgaacaccaatggaagtgccaaagttggtttattacatgtgcatctcatatggccagcatgactcacatacccaacttgtagcatatccggatgtccgtccgcaatcatatcgggtgatcaagccgacatcattagcgagcaattatccgttaacaaccattttctcaaacagcccagccatagccggtgctatgagataggtcgccggtcttggttggtaggttgggcgcgacgactctgcatttgtcgagatcgttctcgataatggggtgtactcgaccacaacttactcgagtgctcaattgttcctgaaaaatatttttctagaaggcaaagcatatagcagagaatatcgagtatgtactcaaaagactgcatggatcttctagtattatcagggtataacgagcggatgtaaatatcaggcattacgtaaaccgtaagaaagcatgattcatacagaagagaacagagcgagcccccagcgttagaccgtagttggcctaacatcggaagcactcgcacaatagatattatataaaaaacatgctctaggtaaacataataaatcattaatctgacaatgctatatgatctgaattggtacgataaattgcatataaaatattgcgtacctttgtagatacatgccagatgtatctacgaaattagtagatcaatttaaaaaatcaatctaccaattaccttgttgcgtactcgttcgatatcatgtgatctgacatcttttggtacaccgcggagcttgaggctcgaatgatctcgatagatcaagttgttgacgacgatggttccgatcttgtcggaggatatattccggtcgggtttgatctccccacagccgaagtcgtcgagtagcttgttgttggagaatccatctcttaaacccatctcgtcaaaatcctgaagcaccaaaagtcccctacctggcgcgccactgtcgatgtttgattttgcgattccggtatttgcatagtatggggatcgttggtactaggatatatgcgagattgtaataaaagagatggagacaaggatttttatacaggttcgggcccctgaattgtcaggtaataaccctactcctgttggccgaagccggtcgttgctcttattcaccataatcacaccagaacaatatttgaggtagcctatctaactgttgttgacttgatggtctaaagtgttgactcatagtcgacaacagggtagtcttcctcctcgagttcgtgcccggcgagatcagagacagcactagatccctatagccggcctccgtaggtaccggatagggtcggtctaggcatatctctgatgtcgatatccagcgtcttgtcttggcgtatgttggcttgtattggcttgtagttttgtggcgtctattgttccatgtcccctctcctcctaaggggccttgtatttatacccataggtgtccccatgtccaagtagaactagggaaaccaatatggataaaatccgagtagtccttgtcgtttccatgtagaactctagtcatccttccttatgcggaactccttctatatccgaagtttgtttccgtataagacatggtatgtggtgggtcctgccgagatttagtcaactactcttaggtatgtggtatccataaccctgacacaaaactaattacataaatgagagctaattcatgagacaaattttttaagcctaattaatctataattagcacgtgttactgtagcatcatgtaggctaatcatggattaattatgctcaatagatttgtctcgtaaattagtccagggttatggaataggttttgtcattagtttacgtttaatacttctaattagtaccccaacatacaatgtgatagggacctaaaactaattacaaaatccattagtaaaccgcgagacgaatttattaagcctaattaatccgtcattggcaaatgtttactgtagcaccacattgtcaaatcatggagcaattaggcttaaaagattcgtctcacaaattagtcgtaatatgtgtaattagttatatttaatacttcatgcaggtgttcaaacattcgatgtgatatgatgaaaatttttggggtgagatctaaatagggccataggttgtgtttcgttactttaggatcaactccctctcctcgttttccacgtgcatgcttctcaaaatgttaaaggtgtgcttttagaaaaaaactacacgaaagttgttttaaaaatcatattaatctattctttttaaaaaaatagctaatacttagttaattatgcgctaatgagtcactccattttacgtgcactgcacattagttcctaactaggaacaacgaacgcaacctttaaattagttcactatcgtaaattaaggtttcaacatttttacttgccctcttataaacacatcccgtcgctaacgttgcaaaatgtgacgagcggaggcgacgcggtaaacgggtgaggaggcgatgcggcgtacgtccgacctaagtgggacgagggtagcgttgtgcgagcggtggcacggagcgagcaggccatagagacgggtgcggcggtggagagaggcgacgtagcgtgtggccagcgttgtggaggccgacgcagcgtgaccggcggcagcaggtagacgacgtggcgacgatgaccggttggtggtttttccccgacaaggtgctgccgcacgagagatccagcgatggtaggcagcatcggggcaagtcatcggatgcagacatgtggcttgaggtggaaacgatgtgagcagtccggtcgaggtgacggcaatggtggtgccgtgaagtggatgttgtaggcctgtgacatcctcttttctggacgctagtccttttgtagtagatccttgccaccacaagatggttatgttggagataggggatccactcttctctctcaacctctccctctccaacccaattgtgtggatggagattgagtgcgccggatgtcgcacttttacttgatggctagctagcaacgaggcgttgacgcgatggttgcacattgaaggtgctcgattggtggtagtgctgagttaggtaggtgcatttcggtatgggagacgggaagattagaggcgaaagtctagcctgtttgggtcgacaatggcaacacctatgggtgtcgcttcctctagggcattgttgcggaaggattttctctctctaacggttttcttcaagtgaaagacacgtcaactctaggggtgggaaaaaagctcggattcgtgagcttagctcggctggtaagccaaactagccaagccggctcacgagccgctggtttggctcgtaagcctaggccatcaagcgtttatatagattatttatttttttatggagttattatttatcaacttaaaatttatcatgaagattttgaagaattgaaatataaacttatttaaattttacatgttgataatttgttcttactttttttaatgattataatatatatatatatatatatatatatatatatatatatatatatatatatatatatatatatatatatatatatatatatatatatatatatatatgaagaggtgtttcaacaagaaggcttgcaagtcagctcgagtcgggaaacgagccaagctcaagttttagcttgtttccctaaccgagccgagccaagccaagccaagcctagtttgttgcaagccactgcaagccgagccgagccaggcctggcctggctcatttccacccctagtcaactctcaggacaggcagcagcaatgctctcggcaccatgtcctcccttgaggcatcattttaagatccagttattaaggggtgtcgtgttcctgttttgctcttcagcaatggggttttgaatataggcgtatggtgtggggtttttttttcatgtttttctggctatagcctcctaatgctataaaattataaatttccttgtgtaacgagtactaaattataaatttattgtaagagttgacaaaagcaatgtgggtggaagtgaacaaaaattactcctcaggagtaagggcgtgaagttctagaagatctagcatgtgcagaaagcaaagcggcatttatttttttaagcataaaagttggaatgattatgagatgcaaccaactactcccgcccaaccaattgatgggacttagagcaggtataatagtagtctataagccagctgcaaatatattttaaggagataaataaggagagagaagagcagcgggctacagatttatagtcagctgtagaacggatttcaagacgcagtgtgtgtatgacatgtgagactaggtattaatagtgtagtatgtaactattgtatggatgagctattagattagatatagatgaattaaagctagtagttggctatactattaaacttgctcttaaaatctctcacacgaagtttaaaaaaaataaataaattccacacataacatttgtgctaatgtcaatatgataagtttaaactgagcgtcagaacttgaacagaagttctactatctttttgaaccttcaacctgtttagttcctccataataacaaaaaatttgctgttttagagcactttttaccaaaatagatctaaacactagtagcaaaagttgataatttagaatttgtcatttggagtagcaaattttatcaaaaagtacgttgggagccgtgctctctctctactgtaaaatggtaaaactttaccatgcaactaaataccaactagcaaaacttcaataccaaatcttttgccatcaaaacttttactaaaaatatttgacaaagtaaattgatctaaacaggcccatagccattagcaaagagcgagacacaaataaactctcaaaagaacaagaaaagactgatacagtatcgaagacataccattcagagtcgaaaagtgccttgaacgtgaagcggctaaaaatttttttagtccgtattacatcttatgtcaaacgtaaagtaatgataaacccattccataactttagactaattcatgagacaaatctattaagcctaattaatccataatcagcctatatgatgctacagtaaacattttctaattatagattaattaggcttaaaaaatttgtctcgcggattagctcttatttatgcaattagttttgtaagtagtccatgtttaatgctccaaattagtgtcaaaatatccgatgtgacatggactaaagtttaattcgtggatccaaacaccctctaaattcgctggtctctttagggaacgaatagacagttttggtcttttggagatagcagcatatcagatgtgaagggttcacaattccgacgaaaaccggtcgaattccgcgaaatttcgatgtttcgacacggcttagaattaaatttcgattggagtttcgaatattaaacaatagatttggtcgaaattcagttaaaatttatcgaaaaccatgatatcgatggggctcgaaatttagtggtaaccggtaatgtaaattctggatgtgatatttcacttcaaaagacgggctcgttctagtcccacatgtcatctctctcatgtgtcttcggtattataaacttttcccatctcttacaaatattttacctggtcttatgagactaactcaatgtctcaatccatctagttcaatctccaattctaaaatgcgtcccccctaacgtgaatgattaatgacaacgcaattaagtgactaacgtgaatgattaatgacaacacaattaagtgggtaggtaaaatggccatgatataatccttttttctatcgttaataaagctctctttttacttaaaaaaataattaagctaaagtgcatgtgttagtaccaaaaacgaatttcataaggcatggagatcgctacaaattaaaacaaagcggcaaaaagactctatggcttttaaatcttttgaatttgagccatacgaaaagccgggttagtgataaggctgtatttgtgtccccatgaagtccctttaggatccgttaaggaggatgagttgtgaacttctcctccccgcaaagaaaacgagataactcattagcacatactccctccatttcatattataacactttctagtattgcctatattcatatagatgttaatgaatctatacacatatatgtatgacaatactaaaaagtcttataatatgaaacggatgaagtaattaattaagtattagctaaaaaccttaaaaatagattaatatgatcttttaaagctgctttcttataattttttttaaaaaaaacgcaccgtatagcacttcggaaacattaaacatatagtaggagaccctgcgtgtcggcgagagcctccgtgcgcgccgcgccgcctcgcccctgcgcgccggcaagagcccccacgcgcgccacgcctcgcccccgctcctgccaccgccacccgtgtctctgttagtaaccctaggaaggaacgaaggacagagaagagataagaacgaaggtgaaaaaagaggtgaagcgcttttggtcttaccacgcatgagtcgcgagtcacgggtgcggaggtggtgggatcatttcgtcgcctcttttttccggatggggttgtcccgaatattgaaggaatattcccttctagaaccatcctatccttccttttccctcaaccaaacagatatactccatc

SEQ ID NO: 16118 - DNA, 1515 bp, Oryza sativa
aaaaagtcaacggtgtcaaatattttaaaacggagggagtataaaaataggatgttcccatcccatcccatgatatctcccaaccaaacccaccctagcagtcccgatgcacttttgcgctggaacttgcagaggttcaaggctcctactgtacgaagtcgaacactagtgcggttgatgggctgaaagcccaccgaaagatcacaaaaacacattcaaggccacagagatcggttaaaagcccatacgtatccaactacaactaggcccaagtacaaaaaatatttatcgatctttacaagttggttaaggcagcacatggcttttagaggcgcggatgttggatgcgcgtgccgtaaatttttcatacggacgaaaatcgattgacaaatagtataattttaatcgagtgttgtttatacacttttttcccgataagaaccagatctcctggttacgagaatagttgtatatgtggcgtgtagagaagagaaaaaataaataaatgaggaatgttagctactccattatgtaatagctagctctacacatgttctaatagaaagaaagaaaaaattgtaaatgcaaccttatagctaatctttatatatattagtgagagcgtattctatacacacaagatttcacgtgttaactttcaataattcagtgaagaaattgaaaacgtcaagggcttgtttggcagagttttaactctagctcagtttcagctctatccaaaataaaagtaagctaattgaaatactcttacaaaataaattagagagatgaaattagatttaaactgccgtacaactttattttatatagatctagtttttacttaaatttaagagtttgaactgttaccaaacaagtcctaaaataatttaattaatggggtacgtggcaaacgtaacctcaattcctcaaataacacgagaggctgcggcaaaaagccgacgacggagcaaaacgataaagcgagagagacctgccgagaccaaactcactgccgtgcgccaaacgtgcgctgcatataaaattcgccggaattccatctacccgcacaaaatattcgcgagatatttttgtttatcccatccgaactgctcattgatccgaccaaggcgacaagcacgacgtcgccatcgtcatcgccatcgccatcgccatcgccaattcgccatctcatcctctttctctctctctcgcccagtttggtgcacctgtccgcgacgcatctgccgcagcttcgcagcagcagcagcatcatgggccacgccgccgcagccgccgcggcggcgcacgtgccgctgggcgcgatcaccgtcgacgacctcctcgccgcgggggtggcgggtggtgcggcggcggagctgcacgaggcggtccggcgcgcggtgggcgcgcgcggcggggacggggatgcggcggcggtgtggggggagctctgcagggccgcgctccgcccgggcgtgccgttcgcggtgcaccggatgctctactacggat

SEQ ID NO: 16119 - DNA, 20269 bp, Oryza sativa
ggaggaggccgtattgaccaatgtcggccgcgtcctcgaggcgcgagggagggagttcctcggcgacaagtacaaggatccaatcgctagcttcaccgacttccacaagttctccattgagaatccagaggttgtggaagatgcaaaaatcttgccctcattgatccattgtttgcgattattgctgttttactgttgttagaggtgagcttacagtgtcagtttggccactgtttttcaagggcaggcgtactggaagatggtgtttgaggagatggggattactttcagtgtggagccatcttgcatcctgagggagaacgatgcttaccccggcggcgagtggttgcccggcgccgtgctgaatgctgctgcgaattgcctgaccgcgaagcccggaaggagttccgacgacgttgctatcgtgtggagggatgaggggaaggattctgagcccctcaactttgttactcttgaggaactgaggaaaaaagtttggtaatgactaatggcatttatatctctagagagggcaagtcgggtgtatataaatatgttttgtggcaatctgattccggaatcgattcttcttgttttgtttggagcagcctggtggcaaatgcgcttgatgcactcaacctggctaagggatccgcgattgccattgacatgcccatgaatgtgaatgctgttgtgatctacctggcaattgtgttggcaggctatgtggttgtctcaatcgcggacagctttgctgctcccgcaatatcaatgaggctaaagatatcagaagcaaaagcaattttcacccaggtatttgcttaattcacatttctcctgaaaccattgatgaacatgttgctcctttgctcaatagtttcagcttctatagggcaaagttttggtcatgcggactgacagctttaatttttcatgctaggattacatccttcgagatgacaaggaattgcctttgtacaggtgccttaacctttaaatgcacaggcttatagatcagtgttcgtattattagaatttgtctctaacatcatagctttcattctacagtagagttgtggaagctaaggcccctatgacaattgtgatccctgtaaggggatcaacaccaataaaaggactgcgtgctgatgatctgtcctgggaagattttcttgcaaaagttaaccatgccaagtaagtttgctacattctgatcatggtttcctttttttggtaaaatggccggtggctgcacgtggaatgactggtgtatctgcaaatttttgtcacattggatatgccgttactgcctaaattgtggagcagtcgccaaaattttccagtgcagcacgttcataatgtgtggtgtgcaaactccagaaaatttctgggtagttagcttggaaataatttacactacctctcagaaatacatgtttcttgaattaagtatgtattactatattatgcaataatgtgacaaaattgcagggctgataattataccgctgttgagcaacctgcctatgccttcaccaatatcttgttttcgtcagggactacaggtgagcactagtctagataacatgtctgttttgtgacttttgtgtgctctaccttaaccattcacaaatatttgttgtaatattgtgcatcacaatcatgtcatagtagatcctccttatgattatgagttccaatattgttcaaaatctgatagttgtcatattcaggggagccaaaagcaattccatggacacacttaacacctctgaagtcagctgctgatggatggtgtcacatggatattcgcagaggtgatgttgttgcatggcctactaacctcggttggatgatgggcccatggcttgtttatgcctctttactgaatggagcttccatggctctttataatggctccctgaatagttcaggctttgcaaagtttgtacaggtatggatgcttcatggtagaatgttcaacctcatgaaaatcagtatcagaaactgtgcactatcttttgattttgttcaaatacataataagaattctcctaagtatcagtgtcaaaatgtttccaaaataatttagaatgtgtgaatagctcctgtgtaggcctatgcttttccagttaagttcttttggtagtaataatacagatggatgatgttccttaactttgttagtaggaacaatgaacagcgtagccatgaaatttctgatactctctttttctgtatatattctacaatttttcagtttgaattacaatattttcttatactattttctcattactgaataacttccaggatgcaaaggtgactatgcttgggttggtacccagcattgctcgttcatggaaaagtacagattgtacagctgggtttgattggtcaaccattaggtaatttcttgagtggtttggactttacctcttttgttttagcttgtgtaagggaaatattgtgtatctctttggatgatatggtttgtgactgattatattgttccttatatatagatgttttagctcatccggggaggcatccagtgtggatgattatttatggttgatgggaagagtttgctacaaaccagttatagagtactgtggaggcacagaaattggtggtggatttgttgctggatcattgctgcaacctcaagcattatctgcattcagtacacctgcaatgggttgtaacctgtttattcttgacaacaatggaaatccattagtaagtattctggaatagaaaattagaaaaatttcttgcatgagtaacatagaattagtttctattgtgtgtatctccgcttaagcttgcaaactatgcagccacaagattctgttggtactggagaacttgcgcttgatccaccttcctgggagcttcaacaacattgctgaatgctgatcatcatgaggtgtacttcagtggaatgccagaatggaacgggaaagtacgtgtttcatccctggtctccctaatcatcgttaagttgagacttgagaccactaatccatgtaactgggtgtgcaggtccttcggaggcatggggatgaatttgagcgtactccagatgggtattatagggctcatgggcgcgcagatgacacaatgaaccttggtggaattaaggtaccaaatgccacaaatgcacaacttatttagcaaatttagatttcggcaatccagacattaatgtgtctcgaccaatctcaggtgagttccatcgagatagagcggatctgcaacagggtaaacgacgccatccttgaaacagcagctattggggttccacctctagggggtggccctgaacagctgaccatagccgtcgtcttcaaagaccaaagctcacaaacagaggatttgaatcagctgaaactggcattcaacactgctctgaagaaacttaaccctcttttcaaggttcttataccatccctgtgaatcatctcattgataactactgtaccctacatcttttacatggcacactgcgataacatcactaagcacctgtttcctcccatcatctctgcaggtttcttcagttgtggtagtcccttcgctccctagaacagcctcaaacaaggtcatgaggagagtcctccgcaaggagttcacccagcagccaaagcactccaaaatctaggtagttacaaaaaagcaaaattggttctattgcatcatacgtacacccaaaaggaaaaaacttcggcacagcaaactgtgaatacacatgtctggttaaaaatcactaaatcagttgtatagcaaggcttttgttctctccggtgtgaaatgagatgatagatcaggtcatgatgaggtactgaaagtgttattgctacattttcctgtcatatgtttttcgctatgtgaataaagtctttgtgggacttcagtgaaattcaggtggcctatagtgtattccagtgaaattcctaagctctattccctccgtcccataaaagatcaacctagtactaaatatttttgagagggaaacactgtaggggaagccccacggttaatatattaaacaaaacaaaaggttcaaattacaacaagttaatccacaattttagagagtctctcaaataaattaagcctataaactaagagggagatatcagtcttaagagctctccaagaggcaactgaaggggctagattattaaagattaaaccattcccattcctttgcttctaaatattccaagcagtatagagcaccttctcaacatagtgtgaagacatataagaattcttggcagcaaacaactaagggaaagatcccaaaccacaccaaattgagcccaacattcagagctaaataggcactgaaagaaaatatgcagggttgtttctcactcctgtagcacacaaaacacatcaaggaagcattttgaggagaacagtgccttctgtccagcatatcatgagtgtttaagcgatctattaaaagaagccaaccaaaaactttgaccttggaaacacacttgctctttcagattcaattgatataagctggcacctgaatctacgaaaaatttgtagcttacttctgagaagagaaaattccattaccccaagcatataagtccagctatccttctcatcattaagttgatctataggatcagaagttgacattatcatatattcctgagaggcttgctcagacaaaggcaagacaaaaagttctgaaagatcctttaaggagaacatatgaactgaaatcttgacattcctggaaaaagagtgaatcctaggaaatacagatgatctgagcttattattccacagatccttccaaaacaaacatgatttaccattccccaatattacagtttaaaatttccctaaaaatatccacaaattgcagaacatctctccacaaaaaggatcctttaggggcgacaacatgtggcacttttgagatgtacttttgagatgtagtaagtattccagatcagattaacccagggaattggtaacctattataaaatttgtgcaaatttttcaggagaagggcattattttggagtctgagatcaattacacctaaaccacctttgtactttggctgacacactctgtcccacatcaccaaagactttttgtttgaatttatatctgaaccccttcataaacaatgtctccttgccctatctatactctcaattacagattttggaagagacagaaaacacatataatacgttggcaaagaggagagtactgcatttacaattgtcaatctatcaccataagaaaggagtgctattgttgttgaaagacgtctctccactctatccaccaaaggggcaaaatcaattactttaggcctaattgataattccttcatttcacaatgtaagtcattctaacatttccttacatttatagtctagattcgttaacatcaatatgaaaaaatgctagaataacttatattgtgaaacaaaagaagtactaaatatgatactctctccgtttcataatataagactttttagaattgtctatatttatatagatgtttataaatctagacacgtatagaattatcgtactatgaatctggatcatcttactatgaatctagacgattaagagttcgctatcctggacgttgaagtcgttatccagattccttttttttgccggagggtttagacgagaatcaatgaaaggattcactaggtggggcccttctcacactgggtcaggcgtggcactgacacgtatgtcccaccccagggaactcggggtggggacactttgtcagtcgtccagtgactcgttgaggggattccacgtgtcccggttgccacggtggatcatgccgttagccgattcgaaagtaacgctacattcctgctcataagcatgcatgaccaactcaacatttgaccgtcgtcgtcagctcagcacatccaccggcctcggcttcgcctacctgtggaatgtggatacttaaaaggctcgatcgatcagtaaatccatcttataaaaatcttcccaaaaagaatctgagaagagacggcgatggggaagctggcgaagctcgtcggcggcatcaaggcgaggctgcgaagaaggaagatgctgacggcggcggcggcggagtcgtcgtcgtcgtcgtcgtgctacgacaagatggagaagacaaacagcatgaaggtggagatcactagccgccgcgcgcagaagctcatcgccaagaacctcgccatcgtcgacgccatggtcgccggcagcaacagcaacaacagcagcaaggccaagaaacgcgccttcttcccgtgacgctctctgattaatcccctccctttgctgtcgtggacatagataataatccaatgaccggtaatttgattgagcagtaggaattgcagaatgttttataggtttgtagaggatttatattagggtaaagtttatctttggatctcagacttccgtcgaagtccatagttttagctgcactagaaattatcttgctgtttttatgtcccgttcggtgattgttaacaagttattgtcccacatattgtatacatttttttactcttctttttccttgcatctctgtaatcactactttgtgtgaggaaataagggggaaaatgtgtgacatgtggaaccaatcccatattagcacctaaaacaacataaaacaatgttggtgcttgttactgttgttgtgtgacaaaaaaccaccatctaaaatcagcatcagggtgaaacttgtccgatttcaaaaatttaggataaaaacaaacgatttttatagttcacggtgaaaattggacttcaatgcaagtttgaaggctaaaaatagactttactctacatttgtctttctgcaaaaaagagtcgtcctccatccctgctactcccaccgcgcgtttcgtttgtacgctcctcttgcataatcatggtaagagttcttctcaatcaccggatctaatttttaccaatcacaatcctaacttctctagttacatactctctgggaatgaacctggacacgcatttgtccctccgtcccataaaaaaccaacttctgaggatgaatttgaacaacatttgtccagattcattagtagaagttttttttttaacagagcgtgtaggtacatgacatgttactactactctctccgtcccgaaataagtgcagttttgcactattcacgttcaacgtttgaccgtttgtcttatttaaaaaatttttatgattggtatttttattgctattagataataaaatatgaatagtattttatgtgtgactaaatattttcaattttttcacaaaattttcaaataagacggacggtcaaacgttgggcacggatatccacagctgcacttattttgggacgggggtagtagtaaaaaaagaaaagaaatactccctctgtccctaaatatttgagccgttgacttttttaaacatatttgatcgttcgtcttattcaaaaaatttaagtaactattaattctttttctatcatttgattcattgttaaataaatttttatgtatatatatggttttacatattttacaaaagttttttaataagataaacggtcaaatatgtttaaaaaggtcaacggcgtaatatttagggacggagggagttaattctttttctatcatttgattcattgttaaatatacttttatgtatatatatatagttttacatatattacaaaagttttttaataagacgaacgtttaaaaagatcaacggcgtaatatttaggaacggaggagtatgaaccatcaaatcccaaatgtgcccggcccatacagacccatcaaaagcccaacaccttcccacccaaagtccatccaggcccacaaaagacccaccacctccctctccctctcccgagtcgtccccttcctcgtctccggctcctccccctatccaatccccccctctcgccatccacgccgccctcctcctcctcccgccgccgccggagatgcaggcgacggccgcgctcttcctcgtccgcccgctcccgcgtccccactaccggtgagcgcgcccacgtgcccctcgaaacccttttccgcccctcctcccccggctcgcgtctctcctcctccgcgactgacgacgagctccccctgccggcccctctgtgggggttctccggtgcgcgcgttttccccattgtgtgcaggtgcttgcatgggttgcggggaggcgtctcgctggccccgccgcggcggcggctggtggcgcggggcccgcggtgctccatgagcctctccatcggcggcggcgcgggcgcgggcgccggcggggaccgcgggttcagctacggtaaggaagggggagggagatgcccgaaccctagcgatgctctctcgatgtctcagctgatttgtgttgttctgcgtggtctctgggttgcagagtgataatgcctgtttagctgctgcgatgaactgatcgtattggctgtgtggtgatcccatttattggattaccgatttcataatttgtgccatgaacacaatggagatgcttggtagcacaggctgagcatgcctggttcatgcctagtggagaaatatacaggattagctagggaattaacgtgtctattaccatactttatgcttagaaatttctagtgaaatgatttcaggaaggagagatgcatatgccttatggtgatatagcggcatttctagaattatgatggcgcagatgctggcatggtgatttggtactaatgctaaatcttgtttgttgggttctctaagctgaaagagggaatgctcttctatgggtttggttagacaagatatcaagtggtgccaattagttttcttgtgtaaatctgaagttctgaaccgatgatatccattgtattgatgtttatcaacagtgtctcataaattacgatattatttttatgattatttaatcaatgtcaaacttgttctgtgcatgagtttcttgtccttgcactaggaataaaaggtaatagaaagataactttcgttcatttatcttgataacccatataggtttgcatctaggtttcccacttcccacagattatttgcttgctacttggggttgttattttttgtgattactaagaatactgacatagaacccaactttccattcttttgattgtttttggaaacaacgtgcagttgtagagcttatcttatgtgatcttaaccctagtttctgtgtctccacagagcacgttccagtgtttccaagataccggattcgtgatccctacaagcttcttggtgttgatcgtgatgcagctgaagaagagatcaggagtgctagaaatttccttattcaacagtatgctgggcatgaaccaagtgaagaagctattgaaggtgcatacgagaagataataatgaagagctaccagcagcggaaaaagactaagattaatctgaaaactaagctaaaaaagcgagttgaggaatccccgtcatgggtaaaggcactgcttggatattttgaggtgccacaaatggatatcatttcaagaagattgttctttttcgctttcattgctggttggagcatagcgacttctgctgagaatggacctgcattccaggtatctgtgctttggtttttgctggcctttcaagttgtttttttcttgtttgatgacatatttcaattcatagcagtccaagaaggcaatctagtttgcacgtaaaatgcatatgcttgttcattcatctgaaaatttaaattatccaatgtaaccaacatctcttgttgagggtataaagacaatgcaaggcctaataactcctaaattttaaatatttatgcaatactagcttaatacacttcccatcttgagcacaacttctctagttgactagtttttttttttccttttgcagcttgcaatatctctcttctcgtgcatatatttccttaatgataagatgaagaacctcatgagggcatcaacaactgggttagtgggaattttttcacttgatatccatcggaccgtagcttgcctactttgatatcaatatcatgcttactcttttgttcttccaggtttggagtgcttgttggtggctggataattggctctctattggtcccacttatcccaacattcatcatcccaccctcttggtcccttgagctacttacatcattagttgcatatgtcttcctgttcctgggttgcactttcctcaaatgaaaaccttgtaaatcttgtaaccgtaaattgtagaattgcttgcagaaattttgcaactactgacatctccactatgggtctcggaaaagttttgtagaatgacatcactttgaggttctcctcttcttccatatggtcaagcctcagaattttctgttcagcacttctctgaaacaagaaaatcaatctgtccacaacttcaggtcattttactctatcgtttagccttttttctttttggaacacattaatctaatataacccgattgattattgtggagattgaattgtttcatatgaaaatctttcatgactttcgatcttgtggagattgaattagtttatatgaaaaatctttcatgactttcgaaggcagctgcatatgccatgaccttgtggcagacagtactgcctccagatttgttgttttcccaataaaagaaatggacctttgattctttgccattgacaagatggttccatgtattattggtatgaggtggcaacataataatgaaataacattctccttatataatggttataacatggttttattctttctccggtctttcggggtattttgttcatcaagaccgagatgtgctccaagattagtcctcgcggctatatgcttgctggtacagagacaaacggccaccccgccatcgtctgcgacaactgtacttgcaaaaaaaaaagtgaaatatcaaataaatataaggggtaaaactttgaacctaaaccagctaactcaccaccttataaagttagccataagaccctgaacgttctctcaactgtacttgctagtgtggcatgaatgaactgtgttaaattgacaattgttccgtgcatcttgatcgagattatgcagaagattacacaagaaaagaaaccctctagtatcctgatcagggttaaatttcgaggactgaactaactagtggaaatgagtcgataggagtctggtcttgactaattcattcatgttatgatagctcaagctatgcagacatgcagtatgcagtggtcttctccaccatctcgacgatgatcatgtaaggccgatcgagccgtatgcaccacaatccaactatcaccctcttcatcaccagccccgtcgcctcaccgataaggatgccgggtttccttgtgattttcattttcttatttttcaggtgccatcttcttatgctaatccaccagtatgacataattccgtattggggggggggggggggggggacttttctttttttttccccttttgaaaaggcctgtccttctctcatggcatccattgtcgcctcctcatcaaatgattccgtcctattgagtattgacaaaaactattgagcattgacaaaaagtttaggaggtaggagtactacatgtcatactttgtattatataatctgccactatgttcacctttataacaattaaaaattatgaggccgtttattttaagctaccgcaacaattgactccatatctaatatacatgcattgtttagttgcccgcacaacgatatcatatcccttaaagtttgaacatgaataatatcaagggctgtatacggtcgggcgtccgatagatttagagaaaaatcgggtgctgatgtaatgctggcgtcagcgtccgatttacgtgcaaaactcatttaaactgatttttcttttaaattacttatccaaatcatgatctgattgtactattaaattcgttgcaattaaatcttcaaaacaagaccacacatgcatatattccggcgaaattatttttagcttattattgaattatttttaaatattgcacgatgtaccactaggtatatcggaattgtttcactaagtagatcgaacatgtttcactcgattaaatcgggtgttgtttcaccttatatgaaaacaatgtttcagcaaatagcgaaagaatgtttcagttcactgcaatatttgatccatacatagtgaaacattgtaagtacactaggtgaaacatttttcggtggaacgaaaaataaaccgaattaccttaataggaggtttgcaaaatatgtgggttttttttgttgcaatggagtatttcagttcactgcaacattagatttatatatagtgaaacattatgagtacactaggtgaaacatttttggtggaacaaaaaataaaccaaattcctttaatagagggtttccaaaatatgtgggtgatttgttgcaactacgcgttccataatatcaaaatccactgcaacatttgatctgtacatagtgaaacatcatgagtacattacctgaaacatcgtaaaactactggttgaaacctcaaaaggaccatatgcaacattctaaaaaaatcaataaaaagttaaaatatttttttgtcgaaatataatcatgtgtggtcttgttgtaaagatttaattgtaacgaaattactatttagtggtgcaatcagatcatagattagataaatagtttacgagaaaaaaaaatcttttgaagaaataagagatgctagtatttgctttggctaacaacaatgtcacagcctgatagatagccgtccgatccgcgcggctcgatcacacggcgtgggcggcgatcgatttttcagtgcacgatcggacgtgcggtgctgagcattttcgataatatccgctaccaagtatattaggaacggacactaatgttgtgaagtgagtgtaactcaactgttaggttttttgtggtggaaccagttcacccggatttaaattttaaatttaatacgagtgtttgcatttatgggtactcctattatggctaattatttttttagggatagacgatgtacccatcaatagtaagtcacccacatttgtactttgttaaaaaaaaagaatagacactatcactctactttgtctgtgtcatattataagctgcttgatcaaatatgactaaattagtagttaagtagtatgggagaagggttctaatcaccaaaacttgtttactacatgttaattaaataaatataaaattaataatataaattaatatgtagtatatcacttcataagtttaaattcgactttataagatataagatttttttacgacctttaaaagtcgagtttgaactcatatgcttataaaatgatattatatactctatatcatcattcttctaaaagaataattataactttcgatccctatgtcccataaaaaatttttttaatgttaactatgaatctagatatatatatatatatatttaggtttaggtttgtagctaggattagtatttttttagtggagtagtagttgatgtgcaataattaacgagagaagagttttcccatagtaggattaaccaatgtactagccagccactggctaaacgcctagttgtgaagagagaacgaggctgatccaagatccatggacgcttctgcgatgctggtagctctactaaccatcctcgccaccgccgccgccgccgccgccgccgccgccgtggcgtcgtcgtcgctgcgccgccgcaagaatcagcctccgggctccctgggcctccccgtcgtcggccacaccctcgccctgctccgcgccctccgctccaacgccgccgaggactggctccgccgccgtgccgccgcctacggccccgtctccacgatctccctcttcggccgccccacggcgttcctcgccggcgcctcctgcaacaagctcctcttctccagcgacaagctcgccgccatgagcagcgcctccttcctccgcatggtcggccgccgcaacatccgcgaggtggccggcgacgaccaccgccgcgtcagggccatgatggcccgcttcctcaggctcgacgccgtcaagaactacgtctcggccatggacgacgaggtccgccgccacctccgcgccgagtggggcggccgcgccgccgtcgcggtgatgccgtcgatgaagtcgctgacgttcgacgtcatgtgcaccgtgctgttcgggctggagaggcggggcgaccacgccgccgtgaggcgtgagctctcgtcggagttccagcagctggtccgggggatctgggccgtcccggtgaacctccccttcaccaccttcggcaagtgcctcgccgcgagccggcgcgggcggcgcgccgtggcgtggatcgtggaggagaggcggcgagcgatgccgcgtggcggcggcggcggcggcagcgcgggcgacctggtgacgcacatgctggccgaggggatggacgaggaggagatcatcgacaacgtcgtgttcctgatggtggcggcgcacgacaccaccgccgtgctcctcaccttcctcctccgccacctcgacggcaaccgggcggcctacgagcgggtcgcggcggagcaggaggcgatcgcggcgcagcggcggcgcaggggaggctccggctccgccctgacgtgggacgacctcgccgggatgaggtacacgtgggcggcggccatggagacgctgcggatggtgccgccgacgttcgcgaacatgaggaaggcggtggccgacgtcgaggtcggcggctacgtgatacccaagtggtggcaggtgataaccgcggcgacgatgacgcacctggacccgaccatcttcccggaccccggcaggttcgagccggcgaggttcgaggcggcggcggcgaagtcggcgcccccgccgttcagctacgtgccgttcggcggcggcgcgcgcgcgtgccccgggaacgagttcgcgagggcggagacgctggtggccatgcactacatcgtcaccgggttcaggtggaggctcgccgccggctgcgacggcggcttctccaggcacccgctgccgtgtccaaaccagggcctcctcctcgacatcgagcccaaagaatacaatgaattgtgctgaattgtaataattgtataatgcattttaatcaaagattgtgatgaaaattacattgtatacttattagaaaacccattctactataatctaggcgtcatttcgattcacatgaaaaaaatattccccaaatccgtcggcggtggatcggcgaggaggaggaacagcgtgggcatacacgcagcctgcgtcgacgctggtgacgcagggcgggggacgctgccactctgcctgagagctgaggggagcggccggccggcgcggtcgccaccaccgccgcaagaatcgcagagcgctcgagagaaaggggagagagagatccatggcttcctccgtcgctctcaagggctgcccgctcgccaccctcctcaggcagctcctcgccgatgcgccgtccacccccacagggaggcccgtcaccggtcccgctgccttcagaaggactgctcccgccccgccgcctccgggaggcccacccccacccccgccgcccgagggcgcgtcgctccgccgctacgacgtcgtcgacgagtctggcccgacagcggcgaggagtacgacgacggcgagtgcgacccatagaaccaatggttaaagctcgtcacctctcaagcataagggcaattaattaagttatttggctacacagttacccacattaggacaaaaacgaatggaatggtgtgaaaggcgcgataaagttcaacaacgtgagaaaaagaggcttaaactttttagtagcttaagatgcggagaaaaacctcaatgaatggtgcccttattcgtttgttttccatagtacctacattttttcaaggcataaaccctcaaaatttcctcctagagtggttagttgcctgcgtctttacagtggaaacaatttcaaacgaatgacaggtgggtcccacttggcaggtcggttacactccaaaatcccaccatatatctccgaacccaccacactgacatccggtccccaccgcacggacggaccccacgagacagtgtctgaaccggtgagctattgggccgatgcgttttaattgcaaaagataatactccccctcctcgatttagaaacagaaaaccggattgctttgcgtctctctctctctctctctctccgcctttcccccttccttcgccgtctctccctctttccctctctcgattcccaaccgcaacgccgagcggcgtcgccatggacgacgaagccggggagtgagctcgccggcggcggagcatgatgggtttgggccgtgcgtggtctggccaacctacacgcgtgatccatggtcgctctgcccggatctgtaccggtggcgaggagagtttgcttcaaagtcctgtgtaatattttttcttccctactatgtccccttcggcgctgctgcctccacaggtctgcgcgtgttcagtaaattcagtttaggcgacgattctacggtggatctgattcttggcgccagagatgcagatcaggccgagtctgatggcttccttcgtcggctggatgatgataggtgatacggtggatctgattcttcttgcaccggagatggctccagatctcgttcatcggctggcatctggtggtttcgttcatcggctggaggaggaaaggtgagatctttatggcttagtcggctggagatggaaagatcccatcttgttggcttcccttcgtgcctgtcctgttatttccccctctcccttctggtttttcatcaataagactgcacacattgtcaggcatgagcggccaaatatatgatcagtataaagacttctttgtcaggcatgataagcatataagccttcacacattgtcaggcatgaacaggcaaatattagattagtaaatagggcttcacacattgtctggcacgaacagatcagtatatgaatgcaagattagtaccattgttacataacttggagaaatgaatttcttctgttctacatctcctactcctgaatttccagctgcaagtttttacatgttataagtctgcaagtgccataattccaaactttctaaaatccaaatgttccagtctgctttagttacttttatcatgttctatatctgcttcagtaatttcatttgtaactatgcatgtacaagtgcaaccatgtgcagatgcactattcatactgggctaaatgtgttcagacaacagcatctgctagattggaaaagactgttgagagctgcttaggcatgttttttttttcactttatggttttgatgaggttcgacccagaaaaaaaatgtggtagctgatttgtcaaatatttatttttgtttagtttatctcagatgtttcagttgtctcagatttgtgaaatatatattttttgttttagttttcactttgtctcagattcttgaaaagtcattcaaatcagatttttgaacaataaatacaagccttggatcctactacctccgtttcacaatgcaagactttctagcattgcccgcatacatatagatgttaatgaatctaaacacatacatatgtctagattcattaacatctaaatgaatgtgagcaatgctagaaagtcttacattgtgaaacggaggaagtatttttgaaccctgaagcacaaggttttggatatttctgccttagttttgcatgaagtattagctagctgtaacaagctaaaacaaataccatagctggtgtcctggtggtagcaagctggtatatttgaaagaactaatgaagcccttttttacccgagtttttttaacttgatttccactttatattatatttacatactactccgtgacttttttataacgtttgaccattcctcttattgagaaaaaaatataaatattatttattttattgtgacttgctctatcatctaataatatataatcttaacttatacttttacatattatatactatgtttctgaataagacgaatggtcaaacgttgttcacaaagtcaacggcgtcgtacatattgaaaagagggtagtacttctgtaaattcgtagcaaaacaactgcaatttctgtactgtatcaattttcgacttcttttgaccaaacaaaatttaaagggcaaccaaagcagcactaaggttgtgttcttttggaggggttgggaacccctcccctacgcatggaaaacggagcaatagattatcatatgattgattaggtattagctataaaaaacatgaaaaatgaattaatatgatttttaaggtaactttcctacataaactttttaccaaacgcgtactgtttagcagtttgaaaagcgtgcacgcggaaaacgatggagagtagttggaaacatatgggaaaggacacagccttataattaccttgtccacttcaccacggctttcaggtgttgggttgtcatttacctccatgtgatcgctccagctcacaagtgtcgacatctgcattcaataagtttttaaagtcttgatcaggtccctctaatttcagtttttcataaccgagaactttaatttgatgaaactgctatatatggtggacaaaatgctatatatatggtgaaaaatcttactatactttgttttgttcatatgtaatgctatttttgtatgtaaacaagttcaaaagatgtgtcagaagtctcatgtccagaagtctgtttttacaggaatttcaacataattttacatattacatatgttaaaattgcacttcattttcttctgcaatttttatttaaatgctgagctaaatcagtgggtgttttttcaatcgaggttagcatgcatatatatatagatcaaaccatacgctattatctgttctatttcaaattcagaaacacaagaattataggtgtagaatgcaccaatcctattattaagtccttacaaatgcatgcagcaaattgaaccatgtattcttgatattgagctgtgattttaatcaagaagtatggaaacatcaagattaccagaaaaaaattgtttctttcttccagagctaactagagaaacatcaagattcatggcaaagattgatcccggttaggtgcaaatatcatttgtttgtttgtttgaagttcagtgtaattaccgcatttactttatcgctgtttgcatatgttggagcgtcatctgcccctatccggctcaggttcacaagggaagacatctgcaataaaaaaggtaagttgtgtgttgtgattttataaaaccatactgacttgttcagtatcgtattgtttaagttgcatgttgtattatttctatgctgaattttcctactttgtgtagcatatgtgtgttctcttctgacatgtgacctcaatgtaagaaaaaatgacaccaccatgaacatctaagtgctctttctggcctgtgaccataatcttaaaaaaaaaaaccaaaaagacctttctggcctgtgaccttaatctatagaaaacatgactccttttatatgtacttatctgattttttttatgatgtttgatgtccgtgtggttgctggggatgtctgagttgtgtttcagagataggcactgagggttattttactagttttggaaggacaaaaggctttagtttattgctagagctctagctatcccctaattagcatgtttttcatccttgtctatggttagttttcagaactcgaactcaatgcctgagaattgaactttcagaacatttgtcatagatgatttggagttcattttttaactaggtagaaaagtgctacctgtattatgacaggatcattagcatataggtccattagccttacatccacttagcggcgagcccggcgagtcacggcggcggcgcgcctcccagctcgtggcggcgggcgaacgaaggcagcgaagcgcgcgggatggatggattggggcgccgtctcccgccgtggtggatggattggggattttcttgatctgcaagcgggcccaatcaagacagtcgttggatggggattggatggctgagatccaccgaatgtcacattgtgacatgcttacacaatgtcaccgaatctgagtccgtcatactagggtcagattctgccgaaattcag

SEQ ID NO: 16120 - DNA, 6092 bp, Oryza sativa
ggacggagggagtatcatcatagctgatattaaatttgatcctactgcaacatatcatcaaaatagtcttttaaaggttattttgttcactaattagcagatgatttaatgtatctttttcaatggaatagatgagtaattatatcataataacatctctggttacttgccacttagttatcagcatattcactgtgtggtagctacactctaaaaatgggaacatctctgtttgtcatcagatgaatccacaggatattatttacgtttactggtttaggtatggcttaatgtagacaatgtctcatatttagcatgatttcataaaatattgttgcatcacatgaaaattcaggatgaaatgactaggaactactttacagaaaggatcgaggattggactaaggtgatggttggtgatgaacctgtgttacaccagcaaaaagcacaagaagtttctttttgatcagcatacaagtgtatattttcatgagcctctgaagcatctccagctaaacttttccagttacaggcagtcataaatacattgtttaaacaatgatctggtttgtattcgtcaggtccatgcaggcctaaggaagagggctcgctattaatgtcagtgctgagattgctgaatccatacagatcatatggaggcataatacagatcaaaacccttatttaggtgaaaaccatcaggttttctagatgtatgatttttttgcatgttcttcatacaggtactgtaactggtgtgaactgcaagtggctagcaccacaacctggtgtcgatggttttcttgtcagcggtacttcattgaaagtaaacattatataaacacagtagaatgattttgtaggcacagttacatgcctaattcactaaatacagtctcctttcttggctgtgtggcctgaatttaccagcatcattaattctgccactgcgaagtctgcctaagatcttcaccctgttcacttcggcatgaagatgtgttcaaagaggaacatacctttctctgtttggctctaaaagatgttattcggctattaaagcttttgtttattttacaaggaaaacaagaatatatttgacatgccacatttggccagcaaacttttcagatgaaatatgcaggaatcatgaatcaataatggcatgattagcaagcatcatgatgatcattttatttcaatttccacattgacatacctatgcccttggatgcgaaacacattttattttagttctgattagggtaattgattatttatggctagctaattatagtattgaaatatcaatatcctatatactttgtcgcagattctgattcggatgtaggagtattgattttgtgatagctgccttacctcacaagacctgggtcatccttgaattgaaccaccaggggtatctaggttattgtgaattcgtcatggcaatgcaggttttcctactctattaaatgcctatactgaattagtgatgggtttgctacgattgttagcttgtctgtttggctcgagtggaggatgggatcgctgaagcgtgatggttgttgctagccaccaatttagcttctttgatgagttcctaatttcctatttacttctactaattagtttacactggtttctgacatacttgggcaggctgaatcctctagctgtggatggttttggatgctctatttttagtaagtttactatacctcaatagaatagaatatattaagctctgctgcacaacacaaccttgcaacaatgtgatgaattattgctttacagagaccaaagcatcatgctaagagagtgatccagatattgatggtaaggaatgcatccttccatacgtactcatggtgggaattagttacgagcctatgacaacaatttatacttgtgcaatcctgcaggattttctcaggctcaatctccagtaactgagtcaatggttcagctgaaagtcgtcaaataaggtagtgtccatgtacgatttatttttttctctttcttttcgtgctctgaacaatagtacactcgtatgaaccttgaagctcttgcaaaattttagtgagttcgatttgcattacattcagttttgctatttcaaaagggaaagtaagacaattaaggagtttgccgctgagttatatgagtggtgaagacattgatttaaactttgctatgcaatttgttgaactagaaagaaacagtacaaaaccccttgattcaatgtcttgtgatgaagtaaccccgtaaggctatggtactcaataggaaggtatgatatatcaacacttcttcatttaatttatttgatgatacgatgaacatttgtttgccagaccaatgaagctactccaaggaagatttatagaacatgattttcagctcaaaccatgatcaatttttagcttatgcatatttattttaggagtagctcatgttttcctcttgttttcagcaagctaacttaggcgtttgtggagacaaagaggggactgataatttggagaactggatgtacaaaagagggttccctgcaacaagtatacatggagatcgaacatagtaggtacatcaaatctctgaatcatccgcgtatcatgcttacacatgcgtatcacaaatggattttgggggaaatcaattgtacccaatttatacttgatatgtaaaatagcaaattatttaacaactattgaatcttgaaatcactggaatacctgccaattaccggaacagtcattaattttattattggccatgagcataaaattttatagaacaacccttatttaatttgaaaacagaacccctatactacctttttgggtttactttagcaacataactgactttagttctcttttacaagaggcaactattaaaaaattaacctgataaatataaaattctttggtagaagatatgttaatgtttttatccagccttatgtatagatttggttgatcaagtagcagtagcttatatctatgctttttaaattgcctggtttacaaagatgcatagaaatttgtcattgtttcccatccgactaataccggttcatcaaagatctcattggcaggagagagggagaggtgaacaagggcttggcgccttgtcctccctcatgctttgagattgttttttattaatgatttaaaaatattgatgttatatactgtggtttaagcgtttctaaattaactcaacactagcaaaccttcttaacaaattcagaaagcatatgcaattgtaaaaaagaccttttcaactgaaatgacatagaataaaccctgttgatattaaaacccaacaaaaattataggagtatggtgtttatgtctcatcattcatcaaatgcacactggcactcaaggcggtaccaacaggttttcagttgcatgccgccatcagccactgagctcaaggaaagccaacagttaaaccaattagccacccaataattcaaagtttgatgctgcatttctgaatcaaaattgagatttgaatgttcactactgaatttaagttaagtactatttttccctcgtaaaaggatttcagaattttgctatcgatatgaatttttaacatatattgttgagacaaaagttcagtgctagattttttaaattttaccattattctgaatttctgaatctgtaccgttgggacttgaaagtcactaaagaagtagacaaagcactaaatttctaaattttagcaattgttcctgaatttctgaatatgtacaattggacttgaaagtcactaaggaagtagacaaagcagcaggtaacttagatgaccacccaatgattcaaatttcagtgctgaatttctgaataaagttgtgattttgaaggtcagtactagctttttttcgttataaactgaaattttactttcattatgaatttctaaacatgtgcagttcagaattgatcaggtaatggtaatgccaactgaaacgtacacataactgaattcattaactatttataaatgaggtaaagtaaagtagtacggagtacttggtactaattgatactggaacaaaacataattaacctaatcttaatcatgcagtattattagtagttggaacaagccagaacggcttgtgcacacaagaggcgtgctcgaacggcggcggcgccacggtctcgacgccgccatcgccgacgctgagcacatgcaggttgtagtcatccggactgaaggagttgaaccagtagaggcagttcgcccgcaccccgcacccgctcgccgagcacgacgcgccgaagttgccgccgccgccgccgccgaggacgaacgcccggtcgccgccgatgtccgccgtcctgcgccacgccggccccgccgccgagaagtccatccggtagacgctgaacttgtgcggcggcccttcggctcggaagccgaggaagacgacggcggcgaggtacaggtcgccgcgcgactcgacgaggtacgtggccgcgatgccgctcgagtcgggggacgggaaaatgtcgtcgatgccggggacgctcacggcgaccagcgccacctcgccgtcgccggtgaagtcgagcgtgccgaggctgaagtccttgtcctcgcagaagtagaacctcccgccgacgccggcgacgtcgaacaggtgccgcttcttgggggcgcggtactccacggggaggctgaagtagcccatgtcgtaggtgtgcgtcgaccaccgctcgccgccgacgcggcagaaccacacggccgggccctgcaggctgaggacgacgacgccggcgccggcgtccggggcgttgtcggacagcacgcacttgcgcgccgtcgggagctcgctctcgtcgagaggcggcaggccgaccttcctcccgtcacgggggtcgaggaggaacgtcgacatctccggcgccgacgaggagctcaggacgaggacccagccctgcggcgtctggaggtaggtgctggagtgcatctcgggaaggctgacgtcgtcgtgtgtcttcccgtcagacaggctaaaggccatcgccggcgagccggcattgcttcgctgcaccagcaaagggtaaccggcggcggccgacgggctcgatccatccgccatggtttgtttgctcaactatcgacgacgagacgattccggagtcgcaaactaaaatctcgggttatctctacggggaaaaagctcgttaagattcggttgagtgtatcacgttacgataggagcccttaaataggggatacgtataccggcaaaactctgtttaactcggtatcggcttcgcgtttcgcttttctgttccggaacggacaacaactgcattgacacggtgcagttttggggtacacgtgttccacgtgtactcggagagagtttctcgtaactctaaaatttgatttcccaataatcggatttataaaaagactaaaaaatgcccgttgcaactgaagtattttctcgtaactctaaaatttgatttcccaataatcgggtttataaaaagactaaaaaatgcccgttgcaactgaaggtattggtttagttaaggtgaaattttggatattttcttttaaaaaaatcatgagctgtagttatcgtctcaagttagcacgtgagtttttttaaagaaaatttcttatataactccttatgtattttcaaaagcgaatgagcttaaaaaccaactaaatgcatatatgtatttataaatgcaaacgaatttaaaaacatactcatacaagaatgacgtatcgaagtatcgataaaaacatctttaatttttataatagtagggatagggatagggatagagatagagaattgagtccaaagtttactccatcctttatatttaggacttgtttacttaattaccccaaaaaaattcctgccagataatacaaaataaatttttggtaagataggatatggatggctgatgtttagtttaataacttaccatatttttttggaagtattgagagtaggaagtttcagaattactaaaatttgatacacttgtgttgataataatacgataatgctgttggccggtcgcccggtgcgg

SEQ ID NO: 16121 - DNA, 18282 bp, Oryza sativa
agcgcccgattttatctcctcccgatcgggtgccggaccagagtcatctccataataatatgtctagaggatatgggatatgaccgatgtacaaagatctctcacctaaattttgttttgagattttgtaatgaggatttaagcattaaaaatatatttaaatccaatagctaacctaaattttttaatatattttttcgaacgcagcaagtgaggctaatctagctccctatatcagctatcatagtggggaaatcagagtctaagttaggcataaaagaagaggttgacattatttgttatcattggatcgatcatattcccctacagaaattgccaagagttaaaataaaaaagaaaacaaaatgcctaactttaaatactaaaattagtagaaacttgaataaggcaattcgtaatgctctctcatttctagacccccttttaggagcacgtgtgatttgaagattaatcattcccggggttcatacagaagctgctaagtagaagaaatatatgggttcaatagagaagaaggaaccaaacgcaacatgtctagttctaattttaggaaaattgttttcatccctcgagaagacatactccgtttcttccatgtcacctaaataattataaaaaataggtaagatagatattaacataagatatatcacttcataaacatgcaatgtcaaaatcaacttcagttgtaaaaaaatatcaaatactagctgcttcctttcccgcgcattgttgtggggatatgtataaaattacataagcaaatttgatgtgacaaaaatttgtggcattggatatatataagaatggtactcccaccatcccaaattataggtatcacttttttaggaaaatcaaactcactagtttttgattaataataatactaacaacatatatgctaagtattatgtatgttatacactagatttatattttgaaaatattttcatgtgatgtttatattcattgggaacatacaatgaaataaattactggtcaaaatatatcatcgaaaatcatgtaaaaaaatataaactggtataagaaggagtactatactaagcagtaatgcataactttgatttctatttagaaaattttacatatataaactaacaaaggagaaagtgatgataatatgttgataaattttgtccatctatcaacctcaaatgtatatcctttagagagaatatgtaagttaatcggccatcgggcacatcatagtgtcagtgacatcataaagagaaaagaaaaaccatgcaaacatatactccctccattaaaaaataaaatcaacctatgtccacatacatcaatctaggagagttacatctcctcgtagattaattttttttagacggagggagtatattatctaatgggagtagaaaatagggaaaattagctgtaattagagtaagatacgtaagaagataataaaataaaaaaacaaaatgatgaaatacgaacggactaacctattcttgattaacacatattcttggttgatgccataaacggtacgttcagcattgagcattgagcagggaatacaggaattgtgggtaaacgaatatatggttatcctgtaggttaattagatacatgccattataaatttaatggatttgaaatatgccattacaattcttgtatttgtaccaatgccattataattttaatatagtttaaaacatgccactggtatacatattttatccatattggacaaaaaaaaaaaacccgtcttcaacctctcgtcgttcatcgtcgtcgtcaccttgcctcgtcaccggagccatcctccgcatccccatcctcatcgccgattcccctcctccggaccatcgccggtttccccacctccgccgctgcggcctaggacttcgccaacaacccgtccgacgtggcgttgttcctacacacctccggcactgtcgacgggggatacccgtagatcggatatagatggtactggggtacgctggtacgaggatctacgtaatatgatatcaagcagacagaaaacaaagattatactggttcaggccccttgataggtaatagccctaatccagttgatatgggattatatgatggaaaccacagattacagagggaaaagcagaactcgatgataccgacgaggtcgtaatcgaacaggttcgaccagatctcccggcgacttggcttctgtagggtttaactccgtaggctgtggtggatgtgttggctatgagattcgatcacttagatcctcccggggggtcccttttataatcgcaggtcagctggtctccaagtaggactcggagacatcggacccagcatgatacaatgacgacccagtcccgtctgagtagtactccttccatctgtgaactccatggcgaatttctttaacgtatgccgaaaacgtccgtatacgcgcaagtataccatatcgatacgtgacgtatatcgaagggtagagggtataccttacccgtaaccttgacagtagcccccgacttctgcttaaatgaactcatgtaaccgatcgtgacttttgatgtcgaggttgttgttgttctcgatgtgaggaccgagagacgaggagtaatcgacaacgcccagtgaagctcaacggtcatgagtgaatttaaattgaagtctgaaaaattgccgcgcgtaacggacctagaaatttccggcggctatctctctcctttccttggaattcgcaccgtcggaagtgcgactatttaagggagttttggggatccatttcgaagtccgcctattgtgaaaagattctccagtctccaagcgttcctcgtcttctccacccccataagaaccctagctagttcatctcggtcccttctccggcgatctccggcggcaatggatctcgacaagtccacctccaccagcacgtcgctgaagaaactacaggcggatggtgcccttcccggtcacgggaccatggagagagaagtaggaggtattgaaccccagcctgtcctgggtcgcatggttgcgatcgaggactacattctctatggttttcttcctccgccttctaaatttcttctcttggtcttgaatttctacggcctttctttgctccatttgagccccagttacatcgccttcctcagtattttttcacatctttgtgaggcctacattggggtagagccgtttcttgacctctttcgtttctactacgagttgcgctggatggaacccaacagggtatccgaatgtgtcggtttccgactcagggatggcctgaagtcgcgctatatccccttccagtgcccttcttctcgtagcaaatggcgggcgaggtggttctatcttcagatagaaaattcagatccagtcttcgttgttcctgaggaatgaccagacaagattttgtcttggaccgccaaacccgccttgaccccatccctccagtctttcatcgatatcattgatgacctccgagtacgggggttgtcggggtatgaagtcgctgccgacttcattggtagacggatccagccgctccaggctcgggcccacctagcctttgactattctggactggaggactcgacccgggtttctcctcggggtatttttcttgtattaaaactgacttccttgtgtgcgtgttcctcctgacttatcgaattctagttctcgatctacaggtttgagcagtgaagccgtggagcgccgcgtcggccaattgatgatcagcggcccgacgatggcgagcaacgtccccgtccccctttgcgataagggggcggccgaacgcgaagctgccatcaatgtgagtgtactcagcggcccttttgcatttttcttccgagatagcattgtaacttcatgaagcgtaggctctccctctgactgatatcatcgggccgctcgtggatcatcaggcggcggcgtcgctgaaggaggacgtcgtcaaggaggcgtccgatgttgctgccgctgctgccacaacgagtggcggcaacattctgagaagggggaggaaattctcctccgtgatcggaaatcgtcggaagacaccctccccctcggtaagctctcctggtgtttcatcgcgtagtcggaaaacttccgcctcacatcatacccgttgtactccaggcctcggacgcgtctcccctgcctccgcgacggcagctgcttgtgacgcttggcgagaagtaagtggatgaatttgaggttttgtcacttcgtcaaacacttgcaacctgtctgaagtgcaacctttcgtagggcggcacgggtgaaggcgacgcaggacagatctggagggacctccagcgcgtcccctgatgtgtcctcgacagatgtcgtggtcgtgcccaggaaccgcgaggcgacgcctagtggcccagccagcgatcttgcggctggtcggggtccgtcgtctgctgtcctcacttgggaggagctccaggtcgagatgggtcgtctccttgaggctggtgctcacggcattagccgcgagatcgcggaggcgagggcagcggcaacgtcgtcggcgaatgagcgcgccgaccggctgacgcgtgatttggcggaggttcgtgaggacctccagaagatgagggagctggtggccggcaatgagcgacaacggcaagggctcgagcatcgtatgtcggagctcgagaacaacttgtcggagatccgtggctcgctgcgggtcacctacactggtctgcaccagctcgctgggagtgtggcgtcaagaccaccataccggcgaatcccgacgagttctcgctgacgtcttcgcttgcagaactggcgacggcgatagaggcaatcccctccaagcacgcggccaggatctataccggggcgtgccatgtccttgtgtgtgtgaggctggcgcaccctgaactcgatctgcggaagatcttggatcagggggtggctagcgacgcacgcaaggacgtgatggaggaagtcggcgatctgggggagtctgttctcccgctttttgaagagtaggattttggctcccttgtactctttagtcatgctttgtaaaactctcattggttctaaccgcctttgtgtgtgcagtcatcaccttagttttctttagcattttgacctcgagtactttgttgtcgtttgtagagatgttgatatcgaggatgtccagcagccgggcagcctgagttgccagtgatcgttccggcgcttgcgtccgagccgtatgtgccgcagggcgatgtagatcagaattcgcctgtggaaacgggtatggcgacgacctccttaggttggttatttttgtctgctccttttcttttacctcgtctgtcttgattagtttgacttaggtgtttgcgtgttgggcagacctcgagagtgtgcttgctgatcgcgaccgtcgcatacagtactggaggacgaagttcaaggtcgctgaacttgagagaactatattggaggtgaagagggaccaagctatggaggcgctccaaggtcgcgaggtatggttcaactcgtacctcaggagttgttgcacaaccatggcggttgtctgtagagagctccgggtacaccgtggggatcccgaggaatcggcagccggatacatctcgtggctgaatggggcctgcgcccagctcgaaggcatcggcaagcgtatcaacgaggccctgaagcaggagtgccgtcgatcgagccgatatgccggggggcatgtattggcttgtatacgagatcatcgtccgcagctgcacctcgagttcctccacgaagggttttctcattctcggagaaaccctacggagatagatcacttggcgaagtcgatggcgccgctggcggagaaggtcttccagtccatggactggcgttggccttcctggtagtcttcgtatcctgtgacaaatgttctggacgtagtgtgtaagagtgtcttctcacttcgcgacttcgatcagtcgtttgagttatacactcttcctagcccccagccttgtcatcggagaattcttctcggaagataaggctcttggacctttgacctgcctcggttgaacaggcactgatcctagcccccagccgtgaagttggaaaattaatttccgattacacggcttggttaatacgcacggcgagaactcttacacgaccagatcttacatggtctttcgtctctacaggatccgacaaggccttatcggctctgggcgtcctcagccgaagttcccttaggttcctcggaggccttgtcaagacggcgtaaagggacatgaggataggtttcaacgctaggtgtcatctgggtaaggaatcatcaggaacactttgattctaatctgtacgtgaaaataggctttattggaactgtaagatgtcttacaagtatggatactattgacttatacattgaatttacgtaattgatcaatgttccaggaatttgccaactcgcgaccatcgccgtctgcaatcttgaatgcgcctggctgcaagacttgtgtgatcgtgtacggtccttcccatttgggtgagagcttgtttcgccctgcttggctttgaacccgtcggaggacgtagtcgccgatcaaaagcgtgcgtgctcggatgcgcttctcgtggtaacggcgaagggcctgttggtagctgactgctcgaacggcaactcgttcgcgatgttcctcgagtagattcacattgtcgtttcgctgctcctcctgatcctcatcggaatacttctgtactcgtgtactttgatgtcgtagctcggtggggagcatggcctctgagccgtacatgaggaagaagggtgtctccttgttagacgttgtcagtgtggtacgcacggcccatagtactgatgggagttcttcgacccacttcttgtcatgtgacatgagcctgtcgtagacgcgggtcttgattccttgtagtactatgccgtttgtcctctcgacctgtccattgctctgagggtaagaaaccgaggcgaagcagatcttgactcctagcctgatgcagtaatcctggaaatcggcactgatgaactgggagctgttgtccgttatgatacggtgaggcaatccgaatctgcaaaatatccctttgatgaatttgatggcgttgtcggccttgatttcccccgtgggtgtcgcttcaatccacttagtgattttgtcgatcgccatgaataggaacctgtagccgccctgtcctcgtgggaatggcccgagtatgtctaggccccagcacgagaacggccaagtaagagggatagtctggagtgcttgcgctggtagctttgtgtgtttactgtggaattgataggcttcacaccgctgaaccatgtcgcaggcgtctttgagggtggttggccagaaaaacccttgtcgaaaagcttttccgactaatgtccgaccggccgcgtgtgacccacagatcccttcatgtatgtcgaggaggagatgtctgccgtcgtcggacgagacgcattttaggagtaccccgtttgacgccttcttgtatagatcgttgccgatcatacagtagatttttgctttacgggttattttctcggcttctgcgttgtcctcgggcaactcttcgctgcctatgaatttaatgagtggggtgcgccagttgtctgtggtctcgatatcggcaacggcgtgctctgcctctatagcccccgagctgttgttgaggcgaccgggctatcttcgccgcttgcctctttcactgatcgccttgtcaggatgtctagaaaggttccaggttcgagtggctctcgtctggacgcacgccgtgctatatcatccggctcgatgttgtcgttgcggtatagatgtcgaacctcgatcccatcgaaccttttttctagcttcctgacttctgcgagatacttggataactcggggctagagcacttgtaatctttatgcacctggttcgcgactagttcggaatcccctttcacgaccagtcgcctaactccgagtgcagctgcagctcttatcccggcgagtagtccttcgtactcggctgtgttattggtcgccctgaagttgaggtgaattgcatgcttgaattgatctcctgaaggtgatgtcaagatgaatcctgcccctgctccttggctgttgagtgcgccgtcgaacgccattgtccacgtttcgttgtcgatttggttgtctgacctgttatcaggcatagtccaatcggctacgaagtcagcgagtacctgggacttgatggctgttcgtggcacaaagtggacatcaaattagcttagctcgactacccattttgcaatgcggctgacaacgtctttgtttctcacgacttcaccgagagggaaggaggatacaactgtaaccctgtgggcatggaagtgtagctttcttgatgtcatgattaccgcgtagagcagtttttggatctgtggatatcttgtttttgtgtcgtggagagcttcgctgacgtagtagactggtcgttgcaccttctctctctcgacaacaatgacagtgctaacggaatatggcgtggcagcgatatagagaaacaattcttcattaggttggggggcaacaagtacagggggatttgataggtagcgcttgagtgcaatgaatacctcttcggcttcctgtgtccatacaaatttgtcttgcttcttcagcagagcgaagaaaggttgtcctcgctctcccatcctagcgacgaacctgcttagtgccgccatgcatccggttagcttctgtacttccttgagtcttgtaggcgacttcatgttctcgattgccttgatcgtcttaggatttgcttctattcctctgccagagacgaggaaaccgagcagcttgcccgatggtactccgaacgtgcacttctctggattgagcatgaggcgatatcgtcggaggtcttcgaacgtttcccgcagatcgtcaatcaatgagtcgcttgtcttggtcttgacaacaatgtcatcgacgtaggcctcgacgttgtttccgagttggtcgctaagtgcgccctgaaccgtgcgctggaaagtgtttcctgcggttattagtccgaacggcatcttaacgtagcagaataccccgaacggcgtgatgaatgctgtcttctccttgtcctctttcgccatgctgatttggtggtaaccggagtaagcatcgaggaagctcaacgactcacaaccggctgttgagtccaccagttggtctattcgaggaagagggaagtgatccttgggacacgccttgttgaggtcggtgaaatcgacacacattctccatttcccattggccttccgcaccatgactggtttggctagccactctggatagagtacctctctgatgaaaccagctttgagaagcttgtcgagctcttctcgtatggcttgttttcgatctggtgcaaatctccaaagtttttgctttactggtggcttggcgtcgggtcgcaccatgagtttgtgctcaatcacctccctgggtacccccggcatgtcggacggctgccaagcgaacacgacagcattgtcgcggaggaaggtgatgagcgcgagttcctatttctcgcctagtgatgccccgatcttgacagtcttgtcggggttggcactggagagtggaacgatcttgattgcaccgtccggtttcggcttcttgtttgtcttgctcactttcttgggtggctcagctgtggcaggtgggctgggcgtgtgctcgaccatgtcgaggctccgcttgtcgcattgcactgccagcttagcattcccttgaatagtgattgttcccttcggtcccggcatcttgagcacttgatacgcgtagtgagatgcggccatgaactttccgagtgcagttctcccaatgatggcattgtatgttgtatcgaattcagcgacatcaaaggtgatctgctccgttcggaagttatttgattggccaaaagtcacaagcaacgtaattttgcccaatggtttggacgatgactgaggagtgattccatggaagggttgatcggtgggcgtcaactcacttcgtgggatcaccatcgtgtccaaggtgctggtgaaaagaaggttaattgagctgccgccgtcgatcagaactctcgcgaccttgatattccgaatagtgggttcgaccacgatcggatatcaccctgggatgacagcagtcttggggtggtcctcttctgagaattctatcttctgttcagaccacttcatcttgggcgcagctccctgccacgtcgaacagacttcacgttccactttcttgtattctcgctttgaggagtatgccgtggaacatccgaagatgtgcgagacatggaaatcgcagtctgggtatgctgagtctgattcctgagtagccgcctcagcgtccttctcgaccacacgtactcgcttgcctttttccaatgccatatgttttgcgagcgactttttgaagacgaggcaatcttctagagagtgtctgtcagacttgtgtatagggcaccatgttttcttcgtgtcgctgccttgtgggtctgggcgcttgggacggtccgcgtattctgttgcgagaacttccgcttgagctttccttttcccactcttgtgatttttcttcttgcttgagtcaggtgcgtccttggctggtttcttctctcctccggtcttcggtttgtcgttcttgcgtctcagagcatcgtccgcgtgagcgcatcgatcgacaatttcgaattatctccgagtagtcgtgacgcgcctcgttgccaactcctgggtagtatagcgatctctgacaccggacttgaaggcgcggattagagaagcgttggtgattttggggattgtatttctacactcattaaagcgccgaacataatccctcaaggattcacccgggttctgtgtcaacgcatgtaggtcgtcttcaattgcgtggcgcttgtaaattccttggaagttggcgacgaactgctgccacaagtctgcccacgaagaaatcgagtagggcgggagatgcatcagccatgaatgtgcagagcctttcaatgcagttggcaaataattcgccaacgcgttgtcgcccgctccggcagtgtagagtaccgtggagtaaacctgaaggaattcttctgggtcggtactcccatcgtacttctctattgctcctggtcggaatctcttaggccatcggacatcacgcagcgaacgactgaaagctctacacccagcgctgggggtggtgggttgtcggcgatcatacgtccttcgtggatgtctatctgatgatgaggatgaggaagatgacgacgatgacgatgggtcacttggttccggtgtacgattatgaggacgtcggccgggttctcgagaatcctgtcgtcgtctcctgttgttgtcccagcgccgatctccatcgtcgttgtcattatggcggcgtcctcgaccagtattgcccagaacccgccgttcgcgatcatcgtgatcgtggcggttgtggcggttatcacggtctcagtcttcgctcgaacggcctcctcattcttcgttatcgtgacgtcgtaaagagacgcgatgtcgggaacggttctcgttgtctcgtgcgcgtcgcgcctctcggcggccattcaggtgatcgtggagatctccggtgtcgcgaggtgaaggggtggctcgatgaggtaattcccgctgttcagggttttcgccatcagcaccgccagttggtggctgttccgggtgcgctgcagcagcggcctcttcgaacgtgttgctgaggttggtcactgattcccgtagccgttctgtccaccgtgcgagatcatcgttcaaaacgggatcgtagggggtttccctcagtattgcgttgacggccctgatgtgttgggccggtgtagtcacttgattttccgcttccgcattagcgcgcgctgacgtgccggtcccgtcgatagccaatacctcgcgtggcgtacttgtcgacgatgagccatagtcttcgagcaggtgtagaactgacggctcgtggggatcgatgtcgattacccccaacgaatcgatctgagatcagcgtcgctccttgttccttgtcctcatccctgagggggatacgtgactgctggaccttaggaggtgacgtcttcatggcgctgagaaagaccttgcagcttgagaggtcgtgattctttgtcttgtgaataggacaatagacatcacgagttggagaagtacgctgaattccacgctctttgtaggcacgaatttcagcgtggacgttgagaaaaacccagcaggcttgcaaggtgtgttttttggttttgtggataggacaccaggaccttgtcacctcggaagtcatcctcgtcggctcgtgattcttgtcggaaagacaaggtttggccgcactaggatccttctcgggctcgaatgtcgtcgatgttccgttctccgcttcggcgggaggatccttcgacatggagttgtcctgggttgtagccactgcgttctcgcttccggtcattgatggaccagccaagatcggcaccgtggtgtaaaccgggaagacgatttcgccgacttgagtccgcaccagcattgttgaagcaggaactccttggttgaggttggtgttgacgctgttgtcgacgaagctggatgatatagtagtagaaccttgagcaccaagtccccctaccgggcacgccactgtcgacgggggatacccgtagaccggatgtagagggtactggggtacgctggtacgaggatctacgtaatatgacatcaagcagacagaaaacaaagattatactggttcaggccccttgataggtaatagccctaatccagttgatatgggattatatgatggaaaccacagattacagagggaaaagcagaactcgatgataccgacgaggtcgtaatcgaacaggttcgattagatctcccgacgacttggcttctgtaggcttcaactccgtaggctgtggtggatgtgttggctatgagattcgatcccttaggtcctcccggggggtcccttttatatcgcaggtcagctggtctccaagtaggactcggagacatcggacccagcatgatacaatgatgacccagtcccatccgagtaggactccttccatctgtgaactccatggcgaatttccttaacgcatgccgaaaatgtccgtatacgcgcaagtataccatatcgatacgtgacgtatatcgaagggtagagggtataccttacccgtaaccttgacaggcaccacgtcccgtccaccgccgcgccagagccgcgcggaacgcgatgctcgcgccggcgcggctgccgatcaggaacaggggcctgcagccgggcgagcccgcggcgtacgagcgcacccaccggaccacgtcggcggcgtcctcgaacgcggcggggaggcggtcatctgcgggttcgtctcggcgtgggtgctcattgggctcaacgcgctagcggcgaggctcaaattcgacgacccgctcgagaccgcgtagctgcacagcgagtgcggcgcgttgggcgtcatcttgtgggctgttcatgggcagtggcggcggccggctgctcggggcacacatagtggtcatcctcgtcatcgtggcgtgggtgagcttcaccatggcgctgctgttcctggtgctcaacaagctgggcttgctgcgcatctcagccgaggcacaagatggctggcatggaccaggcgcaccacggcgggttaccatgacgacgacgtgagtggcaagccggaccgcggcatcggcgggttcatgctcaagtcggcgcatggcacgcaggtcgccgccgagatgggtggcaatgtctagtggcatggaggagctgagctagtaatacacacatgtagcatctgcggattcatcggtgtcgacggaggcgatgaccgcggggatggtggccgtgagggccgtgcaggagttgtggaacggctcgaacaccgagcagaagaggacatacccaccagatctgctcgatggagagggaggggaaagcgattgcggtgtccatcaccggccacgcttgccactgccattgccggtctcgtggaagagaggagaggggagaaagaggaagaagaagaaaacaagggtaatttggtcaaaaatttattgtaaatgcatctcagtggcatatctcaatatgtgcaaaattataatggtatgatccaaattcacaaatactgatggcatattttaaaactggcatatttttaatggcaatgtatctaattaaccctatcctatatagggcgcgttcttaattcttcatcaagcatatatatgcatgtgaaactgacactgaagatataaattaaatgttaacaatgtttctagaatttacggacgttgatgacttattggttcctagattaaatggagagagctttcagaggagaggagcggtgattaatttatggcatcattttaatttaagaaaaaaacaataaataccattgacaaacgccaaaatttaagaaataccatcgacgaatgcgagtttcataaaatgccattgtacaaatgattttgttccagaaataccatcatcgtcagggttccgtccatcccgcgcccttaaatgtgatgttcatcctatatcgcttaacagagggatgctagcaaaaccctaacagcgatgatatttttggaacaaagttacttctacgatggcattttatggaactcgtacttgtcaatagcatttcttaaaactagcatgatgcgtgtgcgctgcaacggcattttttttctatttgtctaatatattatcattgtgcttgtctgagggtgagctcctccaccagggaaccataaggcacccttttttttagttttggcctagggcggtgattgaagttcgaggaatctgtggtgaagtatgcaggagagggggtctaacccctcgggggaaagacaatggtggtttaaacaggttcggaccgctgagaagcgtaataccctactcttatgttatgctgactgtgagaaagagattacaagatttccttgttggagtagaaggtgtttatcatgaggggcaggagactgctctagtgaaaaatgtctcatcccctccctcataaggccaggacctctttttatatctcaaggggttaccacagggacccgccgagcctatctagggaggataatcacattgattgcaagtcttgttccttgcattggtagtctcttacacgccttgctgcgccgtcgggcctgccgaatctatccagctgacacgggcgatgcgcttgtcactcggcatttaagggatgaggacttttcggtcctcatttataccgggaagttggaaccctgccctaaacgggttaggcaaaccgtctccggctgacgtgagaggctaagctgcctctcaccatcgtgatgtgacggggtgagggggggtgttaggcggctggccgcctgacatgcagccagggggcaggcgcactaccccggccacatcagtcatttgaccggtcacagaccagtctgtcgcaccacgccgcattaaatgtaacacgtggggggaggggtgctcgctcagaccacctttagtgctgttaggtgggcactaggagcgcccgccaggcgtggcacacggtgccacgcggagggggttggggtgacctgacccctggacacgtggggaagggtcgccgccctgcctcgggccgaacctccccgggggaaggccacatggctgttaggggcaagcccttcctcacagtatgggtaccccaggcccatattaccgacagtgctaattttgctatcatttcgtaaagataaaaaaaattcataatattatattgtcatattattctttcgacgaggtttatgacatgtgggggctagaaaataagcaaagttttgtgggtcccacatggtagttgggtggtggtaatgacagactcaccaccaccactaccatctttttatcgcagtgttcggtaggccggctgcagccgcggctgcgcacagtgaataaggcattgttcgtgccgcagccccgacaaccgaacataccctatattagtatataaagattggacgtttgttaataaaatttctttggattttctcttttaattgagtgtgaatcccatcataataaagtgaagatgggctagcagagtatctaatgctccgatttaattgaatggtttatatcacacatattttcttttctattggctggaataatacggatgatgtggccgtacctgatcatagctaattgggattcttatatactctatctgttttacaatataagactatttcataatataagactttctgctattggccatatttatatagatgttaatgaatctagacatatatatttgtctatttattaatagctatatcaatatgagtaatgatagaaagtcttacattatgaaacggaggaagtagaatttatttatatatcgctgaatgtacgttaactagtttcagcttaattttttataacttgtagaaattaaatttgacatgacatatttgtgaagtgatatatctcatattaatctatcttgatattttgttttaaaaatattatttaggtgacatgaaaaaacgaaggaatgtgccctcgagacataaaaatccatctcggcaaattttccctaacacgccaacttgcaagattttaatcaaacaaattttagatgtatttaagtatcctgcaaaatgtaacatttatcccaaattgcaaagatcctgcagcaaatgttagtttttttagtagcaattaataggtaaaaaataaccgtagttccttaacagcgacatcatcaagaaaaaccaataactaatatcatcgcatgattaggatttaccaaaccattttagatgtaattacctaacccccacagtttaacaaacagcttaccatgtagtataccgtagtttcaaaaaccgaaaaagttaccacacacaatggctgtgataacgggggatgctaatgcgcgggtgatcacccgcacccccccctccccctatacgtcctcttctccccttttctcctccccttcttctctttcctactacagtataccacaaatttttttttaataaaacaaaagttagaaaaatttatgtaaatatatattatatataaaaaatttgaattcaaattcaaatttgaatcgggtatgtaaacttttgacttataaactttggatctataaattttaggtgtataaactttagatgtatagaaatactatgtatagaaaatatttgaattcaaattcaaatttaaatcagacataattcaaattcaaatttgaaacgcgtatataaacttttgacttataaactttatatctataaactttataaactttaggtctataaactttatatatattagaaatactatatataaaaaatatttaaattcaaatttaaatttgaatcggatatataaacttttgacttataaacttttggtccctgaactttagatgtgtaaacttgaggtgtataaactttaggtgtataaatttactaaaatagaaaagtaatgcggtgccagaaaaaaatcaggtgggcgaactgatcgctaccagatcgcccaggcgatcgatcgcgcatcagcttttccgtgtgataaccacgtgataatcgtacaaaagtacacgcagaagaactagacaagccagaacggcgtctgacgaggtgcacccgggagagactcaaacgtgtcgaaggtctcgacgctgccgtcctcgacgctgaacacgtacaggttcctcttctcgtcctcgctgaagccgttgatccagtagatgcggttggccttcaccccgcacccgctcgccgagcacgacgcgccgctggagttgtcgccgccgacgaggaacgcccggtcgccgatgtccgtcgccctgcgccacgccggccccggcgccgccgccgagaagtccatccggaacacgtggacgtcgtacggcccgccgatgctgtacccctcgaaggcgatggcgacgaggaacaggtcgccgcgcgactcgacgaggaacgtcagcgagctggacatcacctggccggcggggaagtagtccaggacggggatggcgatggcccccaccaccgcctcgccgccgccgccgccgccgccgccgccggtgaagtccagcgtgccgagctcgcccttgttctcggcgaag

SEQ ID NO: 16122 - DNA, 8712 bp, Oryza sativa
acgtcgaagagttgcctcctcttgggcaccgggcagtactcctccggcaggtcgtagcacccgatgtcgtagccgtgcctcgaccagcgctcgccgccgacgcggcagaacagcagcgccgggctctccaggtcgaacacgaggacgccgcagccgggctccggtggccggcccgacagcacgcaccggcgatgcgccgggagctcgccctcgccgagcggcggcagctcggcgaccctcgacccgtcgcgtgggtcgaggaggaacgccgacgccggcggcgagctcgtcgtcatcagcacgaggaccaaaccctgcggcgtctcgaggaacgtgttgccgcacatctccaccgaaaggttgacgtcgagcagcttcatggcaggcagactgaagactctcgtcgccattgacgaagacgaagacgacggagtgacaccagcaacgccatatctctgcaccagcaacgggtaagctgcggccgccgctgtcgatgagttcgccatcgagatcgatcgaaaattttacacaccggatattaatcagggtgccttaaattagccgtaaatctctccgagtctgagtcctatacatgttcctggccgagtggccgcgatggattgcgcctgatgatcgggaagaaacattaacgggcatcgttccatactcaacttatctaattttttacaccctccatcccataaaaattatatttctagctaatttaggacaaaacagtaggattagaaaatgaccacaatgaccttatttaatgaactcattgcatgcacacattccatatatacaaatgattaaaaggaagtttgagagaattaacccatataattagcatacttaaattataagctgagagaacgtaaggaaacttatctagatgaatcaatttgttgggccccacatggctagaaatacaatttttgtgggataaagccttagagctagaaatgtaattttattgggatggaggtagtatattatcaagatttcggaggaaacaaactaaacataccatcaccaatataatataacctatcaaattttggtaatttcgaagtttatattctcaaaattggttttcactaaaatttggtaaggtatcaaactaattaaacatcttatcctagcattattaaagtttcataaaggttttttttccacagtaaacaagcccaaaatataaaggtattgtgggaggatggagtggtttttaggcccaaatatttttttttacaaagccttaatgtaagactattaatttcgagtcttttcttaataatggaatgaaacatttcggtctttgcttaagagctacagccaattattactaggttcacataaaaacaaacttacaccgtgagtatgaagccaaagtaaaaaaccaaaagtaaaagcaaactaataaaaaccaaacaagataaagcccccacaactactaaattctattggtgaatctccacccgaagtttgcaaagagtagcatgatcgtcgactcaaatttatgacacatatcttttattaacttgatatgatcatcatacctttgtagttgagtctattcccggacccactatgttgccctggaaagaacctgcaaataagattttgaaggtgatctatcaaaaaccatttcatttctactaagccagagagcccaacatacagcagaagcttcaacaataataagttccttgatctttttattaacacccacaagccaattcccaaacatataagatatactacgtggagggtataatccaaatgcaaatagtatagatctcctaataaatatggcaaaatggcaatctaggaaaagatagtaaatcgtttcatttttcataaaaaaacaacatctcaaactaccattccaattcctcctagccaaattgtcttttattaaaacaatccccttaaggagatatgacataaaaatcttaatcttaagaggcatattaagttttcaaataaacttatttctctcgatatgcccattaataagagccaaatacatagatctaactgaaaattgaccactttgatgaaaattcaatctaaatatatcatcctccactgttaagttaattaacatgcacaattgaagcacataaattcaaccatctaatcaagttctgatcaactaatgctctcctaaaagagacattaagcggaacaatactcataacacttgcaactgaggagtttttccttctaactatggaatataatgatgggtatctgtcctttaaagatgaatcacctaactacttatcctctcataatctaacttgttcaccattgttaataaaccaggaacccatatttagaaaagaacttttaaccttcatccatcctgaccaaaaatgggaatcctcttgtttccgctcaacttgagttatagatttagtatcaagatatttccttttcaaaagatcttcccacacaccttgttcatttattaatttaaacaaccacttacttagtaaacactggttttgatttctaaattatgaacaccaagtcccctttaatctttaggctgacaaatagtatctcatcttgtcaatatatatttctttttatgttcatcactttgccaaaagaaatgggatctataataatcaattttttgaagaacccctttaggaatctcaaaaaacaaaatcataaacataactaaacttgataacacagagttaatcaaaaccaatcttccacctacaggcatatgcttacccttcgaactactaagttttttctcaattctttgtttaattgctaaccaatctttattactaagctttataaaatgcatagaaatgttaagatatctaacataaaaatctcctagtttgcacccaaaaatatttgaatattgctcatgactttccttagcttggccaaagcaaaataattcactcttgtggaaatttatctttaggccagataaattttcaaaaccagttaaaatcaatttcatatttttagctttctataaatcatgctctaaaaaaatgatagtatcatcggcatattgtaacatagataaaccatcatcaatcagatgttggaccactctagaaatttgaccatcatcttttgctctctttattaatatagctaacatatcaacaactatataaaaaagaattggagataacgggtccccttgccttaaacccttgtatgtttgaaaatttgatcccacttggtcattgactttaatgccaacatgtccaccttgataaaagacgcaatccaatcacactattttttgtgataaacccttcattctcaaagtttgttgaacaaaagaccattttactttatcataaactttatcaaaatcaatcttaaaaagtacaccactcttttttatcagtgcaattcatgtatcatttcatgaagaataacaacaccctccataatattcctctcaggtataaaagttgtctgtgtgggactaataaccttctgagccactccggaaattctatttgtagcaactttagtaaaaattttaaaactaatattaagtaaacaaatagacatatattgttgaattttcaaagcctcattgcacttgggtagtaaaataatagtaccaaacttaagagagtaaagaggtaaattaccactatgaaaatcatcaaataaatcaaccaaatcgggcttaagaacatttcagaaaatctgataaaactcagctgagaatccatccggacccgagctttattatgttccatttgaaaaatcgcatcttaaatttcctcctcagaaaaaacttgtactaaagctttattttctaattgagagacctgtggaatatcacttatttggctttcatctaacgttaaagaagacttttataataagtggtgatttgcgccttttcacatcaccattaattacctaatcaccatcctgtaactgataaatccttgttttcctgtgcttaccatttgctaccaaatgaaaatatttagtattcgagtccccttccaaaatatttttagtcttagctcgctaataccatttaatttcctcttcccttagaaaacaggatagcttattcttcaaataaagtctagaatcaagttccacttgagttaacaaagttcatcataattttttatcaagaaaatcaagtttttctaacaaaaacttcttcccttttcttataaaggccactagtctgtttggcccaaccttagtctatttggcccaacctatttgatggttattataagtagatgaagaatttgtgtttaagagtaaagaagtatcgtcaaagatatctctattaggagtataattttgaagtactcttggagttgaccagaaactctctccggagtccaacatatgtctactccaaaacatcaatggttaactaacgtgccgtgttcatgcagaattttgctggtacatgtacgtatccctatttcgatcggatattacgtgttttccccgtagtgatagagattttcgtttgcgactctgaaatcgtctcgtactctcgtcaacaacaatggcagacgaatcgatcccgttgttcactgttggttaccctttgttggtgtagcagagccatgccgacggccaaccaggctcaccggcgatggcctatagcctgcttgacgggaagacgcccaacgatatcagcctgcagcccgagatgcactctaacaccttcctcgagacgccgcagggctaggtcttgtactgagcacctcgccggcgctggagacgacgacgatgttcctcctcgacatccagaaagaaggtcggcctatcacctctcgactactatctcacggcaaatcacaatgtttatgctacacactgaccacgacggtagcctgggaacaatggccatctccgatcaagtgcagttgttagtacaatgacggtatttaaacagttatatccatctacaatcgttcgttaagctaatgaacgtcaaagagatgtgccacgtcaccaactggctgctagcgctacggaccatgctacagtgcacaataggactaagggcttgtttggttgctaccctgaaacctgagtccaagcctgtgacttgcctgtgttgtgtttggttggtgccctgaagatattggcctgataaaacttgcctaagtgcgcacgcctaagtcaggcctaggaaattggtcgcctgatcaccccatgtactgaccaagtaaaaaaaatgggcatcactttcccccttcttgctctcaaaagtgaatataaaagcctaatatcttcacttctctaacatttggcaagtataatctcaggcacaaattgaatcaaacaacacctgaccattgtatcccatcaggcttatttttagggcatcaaccaaacacactactctcagggagacatgcctgaccaggtaactttgctatctaagctcaggctactctcagggatgtaaaatgctcaggcaggttgctcaggatagcaaccaaacaagccctaaatgtgcgggctacagtagcacacattaccctggccgaatctgagctgctcttatttgatatgacggtcacccaatgactactaaatttgtagtccctactacaaccgctggggtcctgatccgcttgaggcatgatgaaaccaacctgcttgtgatgacagcatccagtagaggatggcagcgtctaggccatcgagacatttgaccatctccctttatctcaaaacacaacagactagaccatctaggccatcgacaccgttctgtcacgttcttactacctctgtttcatcattattatacattgttttattttttttccaaatcaaacgtttttaaatttgattaagtttatagaaaaatataatgatatttttaaaaaaaaactatcaaaatacgttaaatgtaagacgtaatggaactaatttggcgctataaattttactatatttctatagaaacttggttaaacttttaataagtttaactttaaaaatatcaaaaaaaagagggaataacttttaggcaacaattttcatcaacatgttgcgatcatttttatcttcagccacgttgttttgtgttgttaattaattatataagttctaaaattgttttcgatttgatttgggctgtgccgtagaaggctggatcgtggcgctgcgtatggggctacaagacgggccgacccaggtgcgtatcgttcgacggaggcccaagttcggaatttctgatagccactaacttgatcctttttttcttttcaatctttccgtccatccgtcaatgtcctcgtatgaattcgcctgtgtggattggaggattggttgaaatgaattactttctgaataaaatgttgccgttaatccttttaattgaaacggctattgtttcacctactccgtattagagtatctactcctcttattgccatttgactgctgcacgatggtggtgtactcaattaatgaagattaagtaagcatatagaagagaaatcattactacatgattaattaaattttaattattataaatttgagaaataaatttattttgatactctcttcatccaaaatataataaattagcaccagatgtgacatatcctaatcttaagtatctagatatgcccctatccagaaatgtaggaatggagtagtggatttctctattttaaaatgaatggagtagtttagagcaacttttatatagtaaaattttttcgtataggacataccattcagagttagctgtttaaaagcatgtcaataaaaatagagataaattctactccctccgtctcaaaataagtgcagttttgcactgttcatcttcaacgtttgaccgttcgtcttatttgaaaattttgtatgattactatttttattgttattagatggtaaaacatgaatagtactttatgtgtaactaattttttaaaaaaattttataaattttttaaataagacggacggttaaatattggacacggattttcagtatttattttaggatggatgtagtagtatatcttcaaaagaaactgccatatggaggagacgaggagtatcttgcaactgaaacgcaagtactctacagcagcacctcgctgccgctactggctacgctagtactccaacgtggaccacacagtgaaacctgcaaacatgcaacgacttgtctcgtcacaacagtgtgtgcagattccgctcgatgagtactgtgccggtaaaaggcagctggggcatgcacagtactccttaacaaaaatatatcttcccaaaataattgtattttctatacaaaatttgttcaaaaataattttcactctagagtactaattattccctgaatgaccttttatttagatttctccttattctacttactcttaaccactctcacactctcacctatacatcatttaatgaagggtaatatagtttttttactcaaaccttagtactccatccgtcctaaaataagtgcagtttaacagttcgtctcatttgaaaaaattttatgattagtatttttattattattagttggtaaaacatgaatagtagtttatgtgtgactattttttatattttttttcaaataagacagatggttaaacgttaaatatggatacccacgactatatttattttagaatgaaggtaatatattctaaataatatagaattataattattttaaaacggaggtagtaaatcctagctaaaaatttagattggttatttttttttcggaagggtacattacaattgatacaagcaccgacaggataggataggataggagtggcctcggatatcagtgggctttttatttatttaccacgaattccctcgctggtgcgtaacgtacgcagagtgccgtggtagcagactgggagcacgtactttgccggaccctgatgggcatggcatatgcaattggcagcgtgatgtgagcaaaacaacagttcggggaaggccaaaaggattcgagacaggatggacggacgtctctgatcatctctgaatgagaattggatgatggaatctggtcagttacgcatcacatcagtgttttctgctgtcatgattcctggcctctgcctgccttgcctcaccctgttctctgtcagaacaactctctcgccgttttctgccgttacggtgagcgaactctttttaaactcttgagggcacaaacacttgagggcatgcccaacgctccaagcgtggtctcaccccctcgcgaggagtatattcacgttagcttggccgagaccgcatcctggcatagcgctgcgacacccagagaagtttgcgtggatttgtcagcttttgatgaggaaaaggtgaagaatggatgaggaaccgcgttgagggagaggcgtcgctacataccgtagccccgggacattgaggccaactacctcgcgccaccgcacctcgatctgccgctgccgccgctcgatctacccctgccacgcctcgatccgcccccactgccgctcgatctgctgccgccacgcctcgatccgtccccgccgccgctcgatctgccgcctccgcctcgatccagcgtcgccgcgcctcgatccgtgacaccgccgctcgatctgctgccaccgccttgatccggtgctggggagagaggcggcgaccgccggggaggggagagaggcggtgtcggcgaggggaga

SEQ ID NO: 16123 - DNA, 16877 bp, Oryza sativa
aggtgctgaaacataaaaataagatgagcgtataacttgcaccgtgtgaggcatatacctatctaggtgcttgattacttttgcttatgtggatgatggaggtgctccctgccttgggcatgcccggagaaacgtactactcctacaccgtacacggtacagcagcagtattagtaggagtaaattcggtgaaggaaatcgtgcagcctactgactactgtatgccctgtgcggctgtggcctgtggtgctgaacgatcagcttgcgctgcgccgcgacgcgagagaagggaggggaggcgactaggcgaggcgacgtcgtgccgtctcggtggtgggcgatgatgcgagcgcgtaattacgtaggtgggcgtcggtgttggagcggtgaattggagtcgtttctctctctttttgtctcgctttgcgcccgcagaattcacgccttaaaagccgcgcggcgctcatccctgacttggcctctcttttgccgccggactgaactgctactgctactatttgatccatcacaaaactcgtagtactcgtcaactcgtatatattttgctatcgcgtttagaaagttttcaacttatctttttcggaaacttttcaacgtatacgtgaaaagttattgaaaatacctgttgttcctgaacaaataaatggtttcatcagaaaatcacacgaaaagataccgtggttgatcaatcaaaccagaccacccgtcctgaaccacccaccccacaaaccgaacaaattaaaacaacaggaatcgagagcttggaatcatacgtgcagaaatctaaccaccgtccacgctagcttcaagacaaaaaaaaaaaacccagccgcgcgcgaggtgcaggtcgaaatcttcaggagacaaagacgacgcgtgcaatgtgtctagagctctcgcgtactactactccactactaatacaggactccctccgtcccataatataagggattttaagtttttcttacaacgtttgaccactcatcttatttaaaattttttaaaattattatttattttaattgtgacttactttattatttacagtactataagcacaactttttgttttttatatttgtaaaaaaaaattgaataagacaagtgatcaaacgttacaagtaaaaactcaaaatctcttatattatagtacggagggagtactagttactagccagcacagccgatcgacgtctctcaaattaaccaacgctgctagctcttgggcgagtgacacgtctcccttaattctttacgtggatccatcgagaagaagaggatatggatggttgttggagaggaggcaaagccatcgcctgagctgataacgacagctacacgccttcggtattccacgcgtgtatatactggacggttgaatttttgggctcgtaccaccacgccgctgtcaatcacttggtcgttttttttttaaaaaaaaatacgaattacccctgaactatcacggtcgactgaattactatttgaaccaaaaaccagatattactcagcctaaatttttaataccggacgaattacctccttcggtctaatttggagcgatttgtcctgcgcatagtggtgtcggcggtggagggcgctaccgggtggcggctgcacgccacggaggccgagttggggcgaacgtggagctcgacgagattccctctctctcgggtgtgggcacaggtcgcgcggcggcgaactcctggaaagatgagtgcatcgcggatgggtgctcatcgggatgcggcggaagcagcaggacagacgacacacggcgcccccatactcagctcgagggatggagatcggtacagcctgcttagcccgccgcctacctcagctcctcacccgccacccgccgcggcctctgtgcccgctcacctccggcctcggctcctcgcccgcagctgcctccgtccccgcccgctgccgcctccgtcccagcccgcctcgactcctctcccacccgctgcccgcagccgccttcgcgcccaccagtcgtggcctctgttcaccgagagagagagggagggagagaaggagagaaaaaaattgctgacaagtgggcccatcagtttttatttgtttttgctgattgtatcgccacgtgtgtgccacgtaggctgaaaaccacttcaaatcgagttagggtggtaatttatccgattttaagagtttgggggtgtcaaatgtccggtattatagtttatggggggtaaattgtactaccgcaatagttcaggtggtgtaattcgtacttttccctttttttggttaagaaaaatctaaaaataactgattcgatacataaatatgtaacataccaatttcatcggttgctcatatttttaataagccaaaattgcttattggaggacaaaaattaatttataaataaaacttttatatatgttcttagtgacctgatttgataaaaaaaatacattaaaaatatcttaatattaacttaaataaaattaagttagaaaatttgaattttggctttgacttattaggacaaggatgaaactatatcactcttcaaacatgcaagctcaaatcgatttgcacgtataaaaacaaaagtaacaaatttggctataaataatactccctccatcccaaaatatttgacgccgttgacttttttaaaaaattttgaccgtttgtcttattcaaaaaatttaagtaattattaattcttttcctatcatttgatttattgttaactatacttttatgtctatatatagttttacacatttcacaaaagtttttaacaagataaacggttaaacatgtttaaaaaagtcaacggcgtcaaatatttagggaaggagggagtacatacgcaatactacccacagtctaaattactattttatttttgttttacttatgtaagttcaatttgaacttacaagcttgccatcgcatatttatttattttattaattttttaaatattatacaacatgcatgaagcgaggagacgtcaccttctgaaacagatattcacctcccatagatattcttgttaatcttatgcgtgacacttccaatcctagaaacttttcttttttgggtgagataagcatcaggcaaagcgaaggaccagcatgtgtcgctcccttttccaatggataatatgccttttatttattaaaaactcgttttgcaagtgataatcttggcttaataaatgggagcagagggagagtgagacaccaccgcctcttgattctttcaagatttcacatgtttgaatttgagcagtccgtttttcatgacaacatgtagaagaggatttctatctctttcattatcttaaaaaaagtactaaaaaaaccactcagccttgctctcacgttagatcaaaatccggcggttcagatggagccacgtgtcagttggagtatccatgctctccgggtaagaaaatggaggccataccgaaccatccctacatcaaccggtcctgatcattggattgaatgatttgtacaaataactccaggaattagtggagtaatagagtaattaggagtactagtagatgcaaggcattgatgactggatatgtgactggaaacctgcatgattgcacttgctatggctcacaaggccacaggagccatgccaagctagccagctgattgaggcatggtttcctggcctctgataggcatctaccacctcatcaattcagagggtgatgggttaagtagtgtggtgcaccatgaccttttctatccaatattttgtccctttttcccccatgatgaacatggtcacacttggaaattggaatggaggggccaatcatctttcctccctctatctttctttttaattttatcaatgaattggttggagatccagggcaaatgatgttctcattgtgaccactttttatgtataggctatatataaaggtttgatgggatggccctacttctctaccgttatttcacataatcattagtttgtccttgccgaaattagttagacctcctttggaattaagaaatttagagatttttcagagagaagtgaaatagttcctgtaaaattcctactcattccatcctaaaatgtagctatttttagagtttaaatttgttccaatatatagctgtttctccatctgcaccattatctcaaccaatcatgcataaacatctcccatttaactttacatattttttctcaaaccatcacaatctttcacaatttaattaccctattttttaaaaaaaaaatagaaatatttagattttttttgacaccgaaatatttagatttggggatgaagagagtatgtttcacaaccggtactttgatatggtgtagaagaaatcacaaccggtaaaatatcatggatccttgaaaaaaaaataaagggcagctggctgaaaagggtcataaaaacacgctcctttcttttttcaagtgaaacaaagtcgaattttgaataggaaaagtcagcagctacagttatactaaaaaggtgggcataataattgttctatcaatgaataaaaacaaacaagtggggaaaataccagccaactctaatgcaaacattgacaataatacagacattcaactactaataagaagccattataaaaaaaaatcaactaaggctctgtttagttcctacgtaaaaacttttcaccctatcacatcgaatatttgatacatgcatgaagtattaaatataaaaaaacttattacacaggttgcgtgtaaattgcgagacgaacttttaagcctaattgctccatgatttgataatatggtgctacagtaaacatgtgctaatgatagattaattatgcttaataaattcttattagtagttaatactttaaatatgtgtacatatactttaaatagtttattgacggattctgtaatttattttgttattagtctatatttaatactttaaatatgtgtttatacgtcaaaaattttcaccgctggatataaacacagcctaagattctcctgtcttgcttttgtgagtaagttctaatataagtcccctgtttgctgattccctttgaatatattcttcgacatacacatccacccatactcgatgacaaaaacagttggaaacagctcttcatggaaatgctacattggccaatcatgctctttatttactcaacggaattatgggaatgctaccctaattatttattagatggagggtgatagttggtactgacaaaaattccttgttgtcagcttacattaagccaagatttaagggacacttctcttgatatggtactgaagctttttcttagagctgctttaatagacaacctatcataccccttctttagctatagagaatcaattccttcaaccccaccaatctaaactttgttacaaatcagatttcctttttcttttgcgattacccgaaagaccaacacacatacaacatatacatcactatacacgcaaaaaattcctagctcacagaattcttattcacaaatgaaccctgattaataaagtctttatttgtagagaagggtatttttactcggcctctatatccaaccagaaatatgtagcccttttaaattagtaaccgaactcagagctttgggtgctactcaggtcactgcaaccactagactacatgttgtttcacgattaataaagtcatacagttatattccatgaccacatatttggcgctgctctactaaatccctctaaaacatggaccaaaaaaattcatatggtgagagttgcaacttacacttattggtaaacaaaaattccagagctctctcagcaaaaatcttttttttttgtttttgatacattatatactccctccgtccaaaaaaagacaaaccatgattttcgtgtccaacatttgaccgtccgtcttatttgaaaaaattatgaaaaaaattaaaaagataagttacgcataaagtattgatcatgttttatcatctaacaacaatgaaaatactaattataaaaaaattcatataagacggacgaaaaccatagtttgtctttttttttttacggaggtagtagactgcaatttgcaggtaggactacataactacccacgacatgacatcatgccagccgatccggaccatccgttacttaaaagtggacggccaagatgagccaaaagtcagcggcacagtcgcacagtaacggcaaggactgacgaccctgaaaaaaaaacctcgtagcctcgcaagaaattcagtcgcgtctgcatacaggtcatccatctctctcactctgcctcgccgggaagcagcagcgagcgaagtagtaggcgagagaatccgagcgaggaagaaagcccgagccgaggagcgctttaaagcgggaagaagaaagaaagcgcgcgagtaaagaaaagggaggaggaggaggaaagagagccgtcgttttcgttctcctctgcttcgcctcggccacgctgcggccacctcctttctgccacggcaaaagcctcctcgggatgctccactgatcgtcttctacttactcctctttcttccagcttggccggcgtgtggctgattattccagaatttccattagcttaatcaccggatcaagaagaatgagagaaaggggggagaggctcttttctgtgggatgacagattccgttttgtaggagcagcgcaccatttcagatttcttcctcctcctcttcttctttccgttgtgcttgctgcttttctctactaccttttccactgttgcgaagtcgggttggtgggtggttgattgattgttctttccttcctcgtgagggttcttgcttcttggcttcttggccgcttcttgagttggggctagctggttcttttgctgtctctgtcccgtcaaactgaagcgagcgagagattgaccgggtgggtgattcttcttcgaggagcttcttcttggagctcgtgagagtggagtgatcgaggtggtggtgtgagagcagtagacaggtttttcttggggagcttggaggtagccggagttgggggaggaggaggaggatggccgccgcgccgccgcccaaggccgacgagctgcagccgcacccgcccaaggaacagctcgccagcgtgtccttctgcatcaccagccctccgccatggcgtacgtgcgctctgcttctctacttcacttcagggtttcttaatttttctgatctcgagttctcgattgctgcttaaagtgttctttgtgatttgtcctttcgtgttgttttttgtccatgcttttgtttggttgatgcttgagtttttcatcggtggatacgtgtggtgatcatctgtttatgtgaaagtggaatgttttagtactgaacttttggcctacttttggtttgatgctgatgcttttgcgtataaaattgtgtattagtttgtacgacatgcttttgttcttcttttctctcgttagttctagtattttcttactttgctcagctgaggaaaaggagacttttgattaactagtctataaagattaagttcaccttttaaagttttaatccatcataaaaagggttttgaattgcaaattctttatgcagttgcctagcagtaaactgtgtgtatgttcagttcagagatgtgttcaagtatatatgctattttttttctctgaacttgttatcttatcttatatgcagccgaggccattatattaggattccagcatttcattgttatgctgggcaccactgtcatcataccgagtgcacttgtacctcagatgggaggaggaaatgtgagtcccaaaacttatgtgttacagtacatctcttagttctattcacttgcttgacaattgatttcagtactactgaagatttatcagtgttaatttacacaaaaaaaaattgaacctctacatgctgaatatctgaataattgcttctttatatcaggatgaaaaagctcgggtaattcagacgctgttgtttgttgccggaataaacaccttgttccaaacattcttcgggtctcgtctccccgttgtgatgggtggctcatacactttcgtcgcaccaaccatctcgatcattctggctggacgttacaacaatgaagcagaccctcgtgaggtagtgcccagtggttttggtcttcggattagcggtgtctctgtctatttatgacatttttttttgtgggggggtgaaagctaacatttttctgctgttgttgttgtaaagaaattcttacggaccatgaggggaacacaaggtgctctcatcatcgcgtcgacgattcagatgatacttggtttcagtggtctctggcgcaatgttgttaggttggtatggttttggtctttatttgattgaagctagagctgtgtcgtgtagagttttgatttttgcaattaactgtcctgtattatttttgcaggttgttgagtccattgtctgcggttcctcttatttcacttgttggatttgggctttatgagcttggttttccaggggttagtagttctgctccttctatttttttatgtttttaaatcctgaatataccttcatgtttttttttttggaaaaatggatgcaggtagctaagtgtgtggaaattggtcttccagaactcatcctacttgttgcattttctcaggtattaatgttactttactactctctgcatagtcagagcaatagtaacatattttacatactgatcatgtttgtattcttgatagtatttgcctcaagtgttacattttgggaagcctatctttggccggtttggtgttcttttcaccgtttcgatagtgtggctttacgcgtacattctcacaattagcggtgcttacaagaatgctccaccaaagacacaggtgcattgccgtgttgatcgctcaggccttatttcaggagctccttggtaggattctagaataaccatagtattattccgtgcttttatttcgatggaaatccttacaaggtgttgattttttattgtaggattagagttccttatccctttcagtggggagctccaacttttgatgctggtgaagcctttgcaatgatgatgacttcatttattgctcttgtggaggttggtctgcagtacttaatcaagaatagaaagaaaaggctatgctagcatgcattctaagctatccatttagaagtaataatatgataaaattttgcctgtagacaactggagctttcattgctgcttcaaggtatgcaagcgcaactatgatacctccatcaatcattagtcggggcatcggttggcaggtaagtgaatcaattgtgccttttgtaccatagaatttgtcccatcttcaatttgttacattgattatcctaaaacattatcttcagggaatcagcatcttgattgattctttttttgggacggccaatggaacctcagtttcagtgtaagtatagcgttagtggataattagaaccgtcaatccttgattgctcagatagttcctttttttccctttttctaactgggagtgtgaatttggtattcacagggagaatgttggtttactcgctttgacacatgttggcagcaggagagtagtgcaaatatctgctggtttcatgatcttctttgctatccttggtaattctgctcatgtccttatagctatcttaacatattttttttgttgtgtagaagtcattttctctgccacacttggctaggctaattataaattattttgatgaaccaggaaaatttggagcacttttcgcatccattccattgcctatatttgcgggcatgtactgtattttcttcgcttatgtcggtaggttgagatgcctgaatcaaataaacatcagttccttcatctgataattctcaacatattattccgctgtaatgattcactgttccttccatgcgcaggtgcctgtggtttgagtttccttcagttttgcaacctaaacagcttcaggaccaaattcatcttgggttttgctttcttcatggggatctcagttcctcagtacttcaatgagtacacagctgttgcaggttatggaccagtgcacactggtgccagatgggtatgagaaatactacatcctacagaatcctcctttttttttcttcatagcttgttctttgttctgatcacttgatgataatctttgctctctctttttttttcagttcaatgatatgataaacgtgccgttctcgtcgaagccgtttgtcgcgggtcttgtggcctacttcctcgacaacacgatcgagacgcacaataacacggtgaggaaggatagaggctaccattggtgggacaaattcaggagcttcaagaaagacgcgaggagcgaagaattctactcgttaccgttcaatctgaacaagttcttccctgctgtctgaatgatctagcaaatgtcacccaagcaaaaatggttcatgtctgaacataattctgctggccttcttcagtgttgctgtgcgtcagttttgtgtacttataataggcgaatcttactaattggacaacggagatgtgccttagaatgggaatatcatgtctatttttttgtcctacaatgatttatgtgtcattacctaggtctttctcttatcaagttgtcaatgacccaatgtacatgtggcttttctatcggatagtattagtatcacatttaacaatatgacctgatgctgatctgcaatttagtgagtaaaatactgaagctgtcaatgcacatgtggcttcctcagtacagatataggagtaataatcatcagcaatctggcctgatgttcttctgcccttttttgggttaagtaaatagtgaagcgttttatgctattcctactcctgttacttgtagacagctccatcgttggcttatagccgtagccaaaatttaaacttagctaaattttaatttttaatactcaattttagagttaattttgagggttttttcaccataagattataagtttttttaccgtagtttatttccaacattagcttttaaatcactataagcacgtatataaaagttttactcataaattatttatttttagttactcaattcagttttgcacggcttatcagttccatctgaattgttaatttgcaccttgcattgctccatgtgcttggcaatgtttgttctgtattctggttattaatcaactgttaaagaagccatctggaattcggggatgggcctacagattggaattcataagagcccattgggcctatgccttgcagtctccttcgagtttttttttttaatccagtctcctttgagttgttggcttgttgcatgagacttgacatgctttaagctctagcacattggaccgagtcgtaatttacagcgtagaagttacgatgttttggtggaattttacaaagtatccatttcaaatattgccacctcagaattcaccagtcaggaatttcacatgactctcataggatttagttcaaattatatgaaaatcctccaaaaatcttccatttcagaggatgccaaattcatagtagcaagttgacagcagcgaatcctacagagcacacctatccagtgataaaatggcagcacaggtgtctccaacagaaagatcatgtgactgatttgaaatgtcatttgattggcacacttcaaatcttgcatggatctcatcacacaaccgaattgcagtttcaatgacgaagagacttgataccaattactacctagtattcttggcatgccaacttccatctgctagggctttgtgtggctggcaattgaaatctggcccccaaaaatgggagagatgatggcatcagagcccccaaaatctgcatggagttgaggcccatcctcagtgctgatgacaacaccttctatcatcatagggaaaatcctcaacaaccatgatgccatatgatatgatacagctcctgaaatagaggaacaagatcagagatttgattacgggtacaaagcccatgatacaaaaatgtcacaatagttgcagatcgatggcatttgatgattttgcatctgcagtggtcatggttatacacaggtccaatcatgaatcatcatcatacaagaagacccaatagaattatccgcatcaaattgcattgtgcgaatagcgcaaatatagcaaccggcagaaatgttttttttttagccgggcctaggcggaccaaatttacttaagaaaggggtatgtacatatttacaaggttccaacttcgacaagaggctgtcgaagtaaaaggatgttgtcacaagggcaacttcccgaaagaaaaaacaattacatcatgctgttgttactctcctaaaactttgaaaaccccggcttctttccagaccataacctcctctttaatcaaagcaaagaggctacccgctgtccggctctgactctggaaaacacgtgcgtttctctccttccaaaccatccaacagacaagcaaaactagcatgtcaaaagcgcccctgcagctggtctgaactccttgccgcgccaagagccaccattcccctagttccaaccctgcttcagccggcagttggatgccaattccagcccaacccttgatcatcctccatactctggtgatgtatgggcaggaaacaaagagatgctcacagtcctcgtcgctgctggtgcatagtgagcatgtttgatggtgtggccatccgcgcttgctcaggttgtcggccgttaggcaacggcatttttctgccaaccacataaagaacttaacctttgtcggtgctctcgtgtgccaaactagattgccacaacgcgcctctgtgtttgccataaaaacatgtcataggcagaggaaggggtaaatcttccattcgaggcccacttccatattgtctcatcctcttcccctcctcgcagctgcacctcctggatcgcatcccaaatttgaaagtactccccaatgccccggttggatggagctcctttgatgtcgcgcacccacctatggttctgtagtcctctcgccactgtcaaacccttgcgctccacatgactgaagattaacggaaatctcgcctttatgctcccaattggcagccaatccgcaagccaaaactttgtgttttccccatctcccaacacttgccgtgtggctgagaagaacaggtcatgtaactccttcggctgcttagtctcaacggttgtccaaggtctgtcgcgatgctctcctctctttgccaaccatttaagccgtaacgccatgccgaagaagtttaggtttttgatcgccaaaccgcccttttcatatggcatacagaccgatttccatgccactaaacaatgcctgccactcacctcctcctgtcccttccacagaaatccccgacacttcctatcaatctccttgattgcagactgcggtaattcgagcaccgacaagtaatgaacaggcagagcgaaaagaactgacttgatcaaggtcagacggtctccagtggataggaacttaggcttccaaccggcgaacttcttagagaaccgatccaacaaaggctgaacatcttgcttcgtgagcttccggagtgaaagcggcaggcccagataagtgattgggaacggctccaatctacaacacagaattgactgcaccaaaattgcctgatcctctaagcatcggattgttgtgattgcactcttcgcaaaattcgccttcaaaccagttgcctccccaaagagttgaaggatcgctttcactgcccacgtatcttgctgcatcggccggaaaaagaggaccgcatcatcagcatacaaagaaatcgctggtggccacagcctgcctcccatcccgcacatggcgccagctgagattgccttgtttaccaaggcctgccagacgtccatcaccaacacaaagaggagtggcgacagcggatctccttggcgcaaccctctcatcaaactgaacgggtcacattcctccccattcatccccacagtcgtccgtgtcgtgcatagcagcgaacaaaccccgcgtcaccagcgcataccaaaccctctgtgttgaagcagctgcagcagaaagggccaagagaccgagtcaaaagctcttgagatgtccaacttaagaaggaccatcggctggtgttccgtgtgaaaacgacgagccatgcctctgacaaacatgaaattctcatggatcgagcgtccccttatgaaggccgactgcgtgtacggaatcaggtcccccattctgcccgccagccttgttgccatcaacttggtcgccaagtttgagaaactgtggatcagacttattggtcggtaatccttcaagagcgccggcgcttctttcttcggaagaaggatgatcacagccgaattcaatctctcaaggttttgcgaattgccggagaagaatttctggagggctgctaagacatcacacttgattgtatcccagcaagcttgatagaaaagccctgtgaaaccgtccgggccaggagctttttcagccggcatgtctctaattgtcttccaaatttcctcctccccgaagtcctccactagctctgctaggttcagctgctccaagcctaaattctgaaaattgagccccctcctactagcatcagactcagtcgtgcccatcaccccttggaaatatccccttgtcatctgaagcatatcctgctgggttgaagcccgctcggcagaaatgttgggagccataaaatggtatatgatggaatggaactgaaaatggattacacatctagtacttaaaataggtactcaccttttctttttaatcaaattcatcttccaaagtattgaagtattagaaactattaagagtggcgggctgggcggccgctcggcgtgtccacgtcggatagctacagtgcaggggtggcgattttgcgaaaaaaccctcctctttgtgcgtaattcgatcgaggttcctaacaaacagtatccatgaggtgttactttacgtgaaggtccttcagaaatacggatattccatgcgaaggagagaaaaatcgtgatttaggaccgtgctctaaaaagtgaaaaacgaggggcttttttgcaaaactacgcgcactaatccactccccctcccacaaaccctagccgccgccgccagtcccctcctccctctcgttcattgctcagtatgtatcatcgagaatggtcagttgtattgtcaggttaatgacgtgatagtatttgtagcactgacattacctactgttttcctgttgtattgagtggttttggcaatgtttgcaggtacggattcccaataaactgatgttgggtgatctaataactgaaggcaaaatgaagtaatataatcgcatcaatttgtaatgttgtggggagttgattttgtttttgtttttctgtactgatgaggtgtaggctagcagcgcccgccaaccggcactgaggtaaggagttccacaaccacagcactcagatgcaaataatgggcatgcctctgtctaagctactaagcagagaagcacactgcaaataagagctgagtgagctgggagctgccaatctctgttttctctttttcttggattgcaatttttgattttagattggatatttgagagaatgcataggaaagggaaaggaaaagggaaagggatgcctttacattgtacttatctttccttacgttacctatctcagatgtggtcatagtaatatacttttttctttgtgccacttatctttcctttctatgctccactgatatatcagctggtccatgtgccatttggtgattgctgcttacatagttatttttatttatctccgtacgctatgtgatgttatattcccttctcgatatatgttcagccattcaatcagttttgattagttaatgttcatgcatcagatttgttaatacaaaatgttctctgatctggtattcagcttggctaccagtacatgttacaagttcaatcttccacaagcaattgagaaaggttgcaggtgagaggcaagcagaagcatgacaggaatattgatttacttacatgataaccgttgtgccattaggtactaatactaacactattattttaaatcatgccccttctatagcttgcttctttggctgcatgtactatagctgattctttgctgttatatgatattttgaacttcctacagatgttgtatatgctatttaattttcatttttgttttcatgctctgcagtttcatctgcatgtaacctaaataatttcacggtgctcaactggatcactgtgggtgtagtttcattgctcatttcccatgtgaatattaatttattggcaatcctaattgtagctgccatttgatctcctttgtgatgttttacctgtccaaatttttatcccaacgggcatccttgaggtatatctgtgtttatgttataggtgcgcgctgatgcttggttctgcttcatttaatggcttagcttgattaacctgaaaatgtgaattgtgctctaggggtttttataccatataatgtaatctcttatctttttcagccttggacaatcggaggtcattgagattaaactctgcttgcttcgcatcctccagtaagtgtaagacttaaaaaaaatccatgggtattttttcacttcccagtcgtaacatacatgtcataatgttaagcactaattgatttagttataaactatgtttgagattacactagcaggtcccattaatcaatggaaaatattcttttttttcgcacatagacaagttatatttccaagtaaatttcttcattc

SEQ ID NO: 16124 - DNA, 4516 bp, Oryza sativa
ttacttctagccgctgtattatgttttcagtttggccataacataatcgaggtttcagttaatatgtaatttgtggtgtattacttgctacctacagtcccattaaattgatgttttcttaccgcctatgctcagactacaatcactggcagtccaagcagcctgcttcttgcctcttttaataagattacacatatatacatggattaattgtgtgattcttctcaaaatgcacttgaaatctgaaggtgtattctacatagtttgtgtatatggatttattcactaattcttctgcaagcagacaatcttggtttgcagccccaagtaaagggcaagtgtacgaatttagccacaaaagcgacgccaacgaggatcgccatcgacggtgaccgctgctccatcgatccttcttcccccgtttgctactctcacttcacaggttcaaataccatccccgcgagatctcatctccaaaccacatgcctttactattaccacactatttcgctctctttctattcttttcattccccattttctctataccgaatatatgtttttagatcatcgagcgtcacacccttcctcgagtcaatcaaactatcatagatctaccattaaccctaagtactgttgacagccctaatcagtgattatgcttaagtgatctaacctacaaaccctctttgatattagctgacccaaaaaatcctttctataaccattttattataggggtagactatttgattgtatcatttaactatgtagatttggcatcctaaatatacacctattctattacatattctctcactcatccttatttcagttcagatataaatgttatactttttggcttgcccattattgaaacatgtatactcgtactttagcccctttcaattccttatattttatatttgtgtcatgacttgctaatatcggattcagttcctaatatttctaatataaaaatttccctttttccatacattagaacaataccattacacgaaagtacaataaataattaatactctttcacataaatcctttaactactatactgaaaaaaaaatacttacatcaactgtaaattattaagctttttcacggctatttagtcctattcctgcatcataattatcttatatcttatcgtagtatagccacttaacccagcacattatcttcttaccatatatatctttccagctacaactaagatttacaccacataaatacttacatacatcaagttatagatcatatacttcattgcatttctacatatcccaaaatactcaccctgtttaaaaataaaaaaattataataaaaactctaataactagctgagcctctcataactttttttatttatcaaatacatctaactacatgtgtatatatattgtagccacaatcatgtcttccgcagtgttcgcatcaatgaggctgaatgcaacaaatcaaagctacttggtaagctcaaagtcaaacaaaactttctatggacaatatgctgttagcaccagtgcggatatgatattttctttctacagcctgtgccaatcacacttgcgacagcatataagatgcagcatggagataatctgaagttaaaaacttcccatggcttgaagataaagatcaaaatcaaggaagtagctagcacactgtacatgacgacaggatggagataatctgaagttagaaactggagaaacgattcttttcaggatgccatcaaggtctaaagcgtgtgttatgatactgaacagacaaggccttattagatgtccagtgaagaccccatccaacagctcatcagctaacaaaaggtcccctgatccatcaggtcaattaaccagagcaagcacatttgaccatgcatcttctagcaaaagcgttccatttctgaggaatggaacaggtacaaagcttgcctcatcacattttttcaacttacactacccattaacatgtctattctgttttcgccgggtaatagaagatatacaattaaatcagccagatactcctccaacttacattggctaaaaacactgctatattgcctcctgcaaaattgcacatgctggacaagtgatttaaatctttctatctatgtttctattcatatgtaatcattttctgtgtcattttttactagcaggcagtaacaaaagaaaacctagcagacacctccttctgccaccagattaagctcacagctgaattgaagagttacatcaaagagattgcagattgtctagaagaatcaaacaagttctatgtcgtgcgtatgaacagaacattcatggaacaggacagagtggtaatttttgacacaacatttccatcttcttatacccatactgagcatataaatgtcacttttctttttcagtactttgcgactgagttttcaaagaaatacattgtgaacttggttcgaggcaagacagcaaacattagagtgcagattgcaggtcgaccctcaacaacttaacatcagggtggttagctttgcagcagccaacagcatcaacttacacaatctgcatcttccacttttataggacacaagtcacctcatgctcaccatagatgctctgtgaaagttacctgcatcttcagtagtcgctgctattatctaccctggaacagctactataattctctctattatcctttgcttgcggtctatctaacttcacttgctcagtaagcacgtgacctataactgcttatcattgtcctcagctccttttgttattcataagctgagtgaacaattaaccactttatgtacaaacagctggcttgttatactacaggttactatggtactatttgttgtttctttttaccatatgctttttagcttttcttagttaagagaacgtgtgcatcgcatctttccatcgacctgtctacaggcggcgcgccattggcgcgccccagcctctagttcacatagttgtacgcgcgcagcatgcattttatttaggcacggtccacaattcatacatgtatagtggatacgtctcgtcggcagacactcacggtatagtagggtagtcgtgtgtacagtgatatagtcatatctgcgcgtcttttcatgccgttcgttgacttcgttcacagggtcagggtcgggtaggcgatatcgagtgtgacgccacacaggccggggccaccgacgtcgcggagaatccggatgtagccgcgctcgccccatgactggccccatgagttcttgatggtccagtacttggcgccggaagacgcgtcggtgccgtacccgacgacggtgacggcgtgcgctaggcgcgtgccgcacgggcccgtgtaaacgccacccttgtagaactgcatcccgctaccgacctcgatggccacagccacgggctgccgagcgacggcggcctgcaacgccgcctcgttccgcggcggcaccttcccgaagccggtgatcttggcggcatggtgcgcggacttggcgcggttgcaggggccccgccgcgccgtgtacgggtagtccgcctccgtggtgaggccaccgttctcgacaacccatttgtacgcccgcccgtacgaccctaagttgcagccgccgtcatagctgtcgcagtccaccagctgctgctccgacagagagaccagcttccccgtcttgatcatgttcaggctctcgatggtcgccgctgtcacgaacgcccagcagctacctgcaggcgtacgtaacgtaggtccaatgcaattaataattaataattaaggtatattttacgtttgaaatggaaccatgtgtgaaatttacacgtactgcatgttgacgtttgggacttgggaggcacaacggcgccttgggccctccagtcgacactggccggaacgtccacgcggtaggagaagctggcgtcgacgtctccggcacccgtcgtgataacggagtcgtccacggggccatcgccggcgtagtacccggtgtacgtggccaggaactcctcctcggtgaggtctgcgaactcgttctcggcgagctggtaagtgaggtcgccgcgcaggttgacggcgtcgatgaactccgcgttgcggcggtacacatcgaaccgctgcagcgcctcttctgcgctcgggtacgaccggttgtgagctccctgccaagcgcggaacctgtccatcatcaccatgtcgccgacgtccaagcaactgcccgccgtcgcacgcgccgggagcatggaggtggcgagaagggcaccgcacgacgcgagcagggccagcgtgagtaccggtggcgaggcgcacgccatgaatggtgccatggcatgcacctaacttgtgggtaagtacgcgttccaccgttcaatattccacttctggtcgactatgcatgcttagctctacttacttatatggtgtgtcggggtgctgggctggaggtgtcaacgtcgaaaagatgcgctgatggatgtaatttggctagcgacaagtgcacacaaa

SEQ ID NO: 16125 - DNA, 15019 bp, Oryza sativa
  unsure (1)..(15019): unsure at all n locations
caccaaccgggactaaagatcactactttagtcccgaactaaagatctttagtaccaaccgggactaaaattcaacgcatagtatataatccctatcacttatcctctcctccataatcacagctcacacagctcaccggggctggtggccgccggctgtggtgggcggcggcgggccgggggcatgaggtcggcggtcggcggggccgcgcccgacggcggcaggccggagaccggcggggccgcaggtggtgggagtggcgttttctgtcttttttttgataatttttgattcactgagatgtataattttgtgattcattgtatcatatggatatgagatgtctaatttgtgatgtatttgatttgtgtgtatttttttaggatttatgatgtatttgatttgtgtgtataagtaactttaagatttatgatgtggatttgggatgttactttgatttggggatttggggtttgatttggggatatgcatgccacttgattcgagagaaaataaaaagaaaaaagaaagaaaaagggaccatttgggactgccgttattctctctttactcccggttggtaataccagccgggacgaaagatccctctcttagtcccggttgttgttaccaaccaggactaaagatgtcctggttatttcaactggaactagatttatactccggttaaaaacccgggactaaaggggttatcaaccgggagtaaaaatggtttctccaccaatgagggtgcattagtgtgttggggaagtagcggtgaagtaggcaggatcgaggtgtcgagctacgacgaagggaagaaaaagaggagtaagttaggttttaggtatttgcacgaatcttgaagtgatctaacagttcaaaattcgtaggatattagagaggtgcattgcgcattaccttaaataaaaatcggttgttcccagttaggagccctaataaacgggacctttgatcatgcaccataaaggctcctatacggcggaaatgctgttgggcgatcgatcgccctggggatggggtagcgataacctcccccctctctcactccacctagtttccttttttggtatcgtattactttcctattttagtaaatttatacacctcaagtttacacatctaaagtttagagaccaaaagtttacaagtcaaaagtttatatatccgattcaaatttgaatttgaattcaaatattttttctatatagtatttctatacatctaaagtttatacacctaaagtttatagacttaaagtttataagtccaaagtttatgtacccgtttcaaatttgaatttgaattatatccgattcaaatttgaatttgaattcaaatacttttttatatatagtatttctatacatctaaagtttatacacctaaagtttataagtcaaaagtttatatatctgattcaaatttgaatttgaattatataccattcaaatttaaatttgaattcaaatattttctatatatagtatttctatacatctaaagtttatacacctaaagtttatagacccaaagtttgtaagtcaaaagtttacatacccgattcaaatttgaatttgaattcaaattttttatatatagtatttttttacataaatttttctaacttttttttttaaaaaaaaatttgtggtttattgtagtggggaagagaagaagggagagtagagggacgtacgtatagagggagcgggcccagcgatcaccagcacattagcagtcccccttatacggtcctaccacttaatcatgtacgagccacacaacacaggaacacagcagagattagaggccaaggaagcatcggagcgaggtgatcattgacgcgcaattaaacaagcgtagaaaaccgggacgtttgggcggccgccacgcgggtttcgtccacaaatcgaagccgcacgcacgcacgtccgtccgtccaccccggatggatggatcgatggccctcgtgacctgcgttctctattcgttgcgtgcgacgccgggcacgaacgatccacgcacgggaggaactttgactccagatcggccgccctgccggcgaactggtttcgatcggagggagagagtgagcaaatccgagcacgcgactgtaagacccgctatatactgatattaacgaagttatcctaaacggcccgctgtcgataggatcatcatatataccatatcgagagtgcaacataaatcataaatacggggacttgtgctaaattttgaaacttgaaaccggatgagttggttaaaaaaaaaactaatcaattaggctacaccttacttcgcacgtacactacgttgtacttgctttcatatatatatacgtgaccaagcacccgtccaaggtattttcataatttatttgtatttgtacgatcgtcagaggaaatggaggtattggttgatggtttctattttgtctcgactttttatgggatgttgcaatgtacgtgttagatgagtcgcacgatataagtgtaaagtcatatgcacatatgaccttacaccgcagcgaccattgagccgcacaaccactgtagccatagccatcactacatctgagcatattcatagtcatattgaaatttaaatcttcagtgataataattattcacgcatgcatggataccttctaatggaattcatgggttcattccctgaatttatttctgaactcgttagtgtgcaataatttaagcatatagggtgttttcttcacaatagaaaaagtacagactgggctgatggtcctaaggttgagtactgtgctggaacatggaccatatcgccctatccccttcaggtaggatcatataatcttatcatctaaatgatttttttttgtctttagcaaatgtatggtcattttagctatagtacttatatcagtagtgtgtcactgttatatatcaatcatctagaaccatgggataacaattaaaattttccccagctggctaagctataatacgtgttccatcttccaaaactatgaataatttttaccatgatctctgatagcaatcatgcataatattatgcttgccgacttaccctagatcttgtgaaacctgatttattgagtatactatatcgagtagattaataggttaattaataatcgcattcactgtttggcttgtttagttgacttggttgctcataagtcctaaccctgcatacacacgattgctaaataccaaaatcatgtgacacgagtcattttcttggcttatcgtgtactctctttgtttaatttcctttcagtcctttctctcttctctctgaattttgtgagaaaaacctgtgtgcatgatggcaatggaaaaggtacgaaagaaacagactttattccacaagacttcacgagttgtaatacgtaggttgatgtcaattcattccagttgaattttttgccacttgtttcgagagaaaatcagctgatttggctcatgggattaggccaactaattaagcacgaatataagcatattggctttcgcaaagcctccactacttcattacaatatttttgtgcacgccaattaatttgtagtcaactgtatatgtagaaaaaaaatgctaatggaaacccatttatcagagaaatataataataaagctaataaaattttatgaaaaaaaattagtctatgtcatgtcgtcgtatgccgtttggtagcaagtccttgtagtatacgtacatacgtgtcgatggaaatgctaatttgacaataataacaactaaatgaatgccagtattatacatgacgaatatggaccattattcctcgctaatgcagccaatctcgggccggacaaaacatatatgcatattgtcaaataaaaaacatagcacaagtacatggaaattaaataaacacattaataaattttaataccacaaaaataacaactaggcaaatagatggttttaccagcacgactctatgttagaccgtggttcgatccccactagcagctactacatgttagattagatttattttgtgacttttttcgtgtactagtttgagcccgtgaaccttttggtatagccacttgtgttaacaaagtgtgcaaccctgcatatatataatgcgatagaaaaatgctgcaggtgtgagagctaaaattgcaaatggcctgaaacaaagaaagctgttgacctcccagctttggttggaaccctaaaatgtaaacattttttttgggccatggcatgatctgctcgatctttgtgttagcttataaaatggggcaaagtagggaaagcaagagaggcactaggagttgattacttttgatgtatccatcttgtcagatagattatggttaaccagggctttggtattaaagatttgcagattcgcatcgtagtttaatcaaaccaaggcgcctgtagatcatcaagtggtgcactaagcaacaaatgctcctttgggtcatgtgtatacatgagggctattattactttcgaaatgctccatgttagtgacattatgaaatatggcgcgcatgagacattgagccccattgttccaattaattacaagtaaaaaaaactgatattactttgcttggcttgctgagattttcttttggaaggatctaggatagagctgcaataattcaaagttaaagctcatgtgtttgaaacaaatgtatcatgaaaagacaatttatcaaaccttgggaaacatatatcaagaggaacccgatacttttcaattcacatgcttgttatggaatctatgtgacttctatttgatatttcacctaaacatcgttgcgagaaatgtatattcatctcataacctcgagtatttttatttgtcttttagaactcattggtcgtgtgaactgatttttttttcaaaggcagctgggggtgtgaacaatttcattataaaaaatcacaaataaattgtgaatcgaattcttttagacttccactgctcttctactcactctgataatactttgacaaaaatgaaggcctggtttagaaaacaaaaaaaaataaattaaaacactcattcgtacgctacatgaatcatactattaaattcttatacagtcaattcctaccctccgaaaaaaaataagtatagttgcaatgttatctacaaatgacaaacaactatattaagcagggatcttgcaatgctaccaaacacatgttttgctacaacttcaatttgtttttacttaggctgtgtttaaatctaaagtttgggtccaaacttcagtcattttccatcacatcaacctgtcatacacacacaacttttcagtcacatcatttccaattttaaccaaaatctaaactttacactaaactaaacacagccttacatttctaaaaaaaaccccaccaaatttatttgaacaaagcgtgtggagatggacatggctgtgcactgtaacttgagtgccaaccgctgcatttgcagcaagtcgtttcttatacgcatcaacagaagagtatacctggtgtgtcctctggttcctagactcgcaagtggtgtcctgcacaacgtcgcactcatgatttggctactccctccatcccaaaatatttgacaccgttgatttttttaaaaatatttgaccattcgtcttattcaaaaaatttaagtaattattaattcttttcctatcatttgatttattgttaaatatacttttatgtatacatatagttttacacatttcacaaaagttttttaataagacaaacggtcaaacatgtttaaaaaagtcaacggcgtcaaacatttagggaaggagggagtacaaaccaaaccaatatactactagtacaagccctattcttcttcttgcatagtgagtgacattggcaggtggggtccctgttgctgttcaagtgtaccaccattcacagtgcaggtacgtggctttagcttcgttgggacacgtaggagaaaatctggcgtgtttgtgcgagccggaacgcccttcaggaggatgcgcacggcccacctgcgtttgaggtcagacgacacgagacacgcatcccgcattggcgggtcatcccctctccacttcgtcatctcgcctcgcacgcgctccctcgtcccaaaattgctttggctcagcctgcactatgtgagttgtggcttggcacctagagaaactcaatagtgttgcttgcactgctattgcctttatgtgtgttgtggtagtattctggaggggggcatatgcttttcatgcaatgctgaaaagtttttggaggttaattgctgataagtcctattggagaagatactaacacattggacatctccaaagaatattcaggaagcagccggtgaaatgtggtcaatgtaccttcaatactctttaacaacttccaccacactttgtaggctcctccagttagcatacaccctggactcaaaatttttagccctattttagttgcaaaactatccttttaccattatgaagttgtggatgtatatatataccttcgtaaatagggttcaaattataatatccataattaaataacatatatatacacacacacattacggttgatatagaggtcggaagaaacttctgttacgtagaaaacaatatggcttgtgaggatcggcggagggtaggatgtcgccgcccgctgccgcagccgtggcccgcgagacgggaagaggaggagagggcaggggggctgctgctgccgccacccaccgccgccgccgcggcccgcaagaggggaaggggaggaggccaggagagccgctgccactgccgacgccagccgctcgccaccgcggcccgcgagaggggaaggggaggagggcaggggggccgctgccactgccgacgcccgccgccgccactgcgggacaccggctgctaccgccgcggcccgcgatagggaaaggggaggaggggatcagaggagagggaggaggagtggaggaggagggtgtgaggagatagagataagggagatagagtgtgggaggcgtgcggcagcggtttccgaggagataacggtgagtgggaggtgagcggcagcgttttttttttaaattttggtcctgatttgttacacttacacttagatctttagtctcggttggtattacaaaccaggaatcccctcccccgccccccgcgacaatctttagtcccattggagttttaaaccaaactaaaaaaatatttttaatgtggttttcggccgacccagtaaagatcagttctatcataatggtactcggaccaaatgccctccaaagaagggaaaacaaaaccgaaatgaactgatgccgtgttagttccaaagttattcttttaaactttcaactttttcatcacatcaaaactttcttatacacaaacttctaatttttctatcacattgttccaatttcaatcaaacttctaattttaatacgaactaaacatagcctgaattgaaagaaagcgagaaaggaactgacggcatggcaatgatgcgacgatgcaaatgtttgatcacgatgcaccaaagatcttcctccggccggattcacggcctacgcatgccgtacgcatgaggtggtcagcagcgcagaagtgcagagttcatggcaaaaccaaaggcaacttctgctagctctcccataacgtgggggccacatgcattcggtccctggcaggtgggccctatgatgccacgtacatcaccacgtctaagttccaaagtagtacgtgtagtgtagttcaccctgagatgcaggatatacagggccataaatgccatggccataccatagttttcggaatatggtgtggcgaactgacgatcacacgcgagagacacatgtttttttttctttaagccgacgcattttgtacgttttgtcgagagatttgggatccaacgtcaaacgacatatttacattacaaataaaaaataatttatgaataaaacttttatgtacgtattcttagcaacctagaagcaaaggctgaaaaataaacttcgatgaaaaaaatcttaaaattagcttcaaatttaaagttgaaaatttaaattttgactgagcataagcatgaagcatcttcatggatcgtaggttcaatgtgaaatataaatgaattttcttgagttatagaattttctgagactatatgaacctatattaaaaaagcaaatattaggaaatgacctaatatcaaataattagaaggtatgagacttcggcgtgaatattaggaaataatctaatatcaaaaaattagaagggatgaaattttaaaccaaggttgtctaacccaccacttatgtagctagccggaagacccctggatgtttcttgaacctatatttatccaatgaaacaatgtctacaccctcttacagaaggtattgcaaagaaaactagagtttcatttgttacatgatatcttgcgatccgccgccaatgaatttttttttgtgtgtgtgtgtgtcccctatgaaacaaagtatttttgttgtctgattcacctaagattttgcactccagcttacatagagatcatttctgcgatttcgaagaacaaaacaaagtgggaatgaaaagaggaggaaagccggctagcatgtcggaaaaaggtaacccaaaaaaaataagggagaaaataagaagcagataagcaccaagtttctcagtgcatagatgatgttcagataaaaataaatataataataaaatggagaatagaagtgcgtcatgcccatgacatctccagccgttgcaatctggggtttcaacgctacaagtgcactgtcacattggcacaatgtttgcttatcttatcctccttttctatatttttgttgaagacctgatatacggcttattatgacatgctaacaaaatgaatgagtcaggataactctgtttacatactggtccaaaattattaaaaatcaactagataatctataaaacctaaaagagcttcttaatgaagaagtgaccatatataggaatagtcaacgacccttcattcttccctgtccctggtctctatgactctacctatccatttaggcctccttttaaataattcatatgaaaatattgtaaacctaattcatatgaaaattttatgaaaattgaactaattcatatgaaaatattgtcaaattcatgcattccaacgggtcctttagcaataaaataagctataaatatcgacatattatacatatgaacctacaagaggatacaaccttattatacctatattataaacctattacttgcctacttggtaaggtaataaaaccatcacactagtcgtatgatatgactttaccctgcagtaacttatataacttgtgtcactctctgttacgctaagcaagtgctcgagtgtgattgtctcctgttaaacacctaaattgtaattgataaatataaatttactttaggcatgtttgataggactatagcttcggcttcacttctcctatagcttaaatctaaccaaatagcttcaacttcagctaaataagagtggagtggactaaagtgatatgcaaaaaataaactaaagaaatgaagcagggttcgagccactccataactcaactccagacttcactcttagagttatatttagaagttagagcccggtaacagaggcggatctacagtactagggccggtgtcaggcaacaccggcggctttcgacaaaacctatagcaaaactgtttatccatatgttataatatcatgatttaaacataattagcgtactatgacaccgatatacatgttatgacaccaacgaatcgattttctggatccaccactgcccgctaaacacacattttaccgataacggatcttaattgataataaacacactttttaccggtaacggatcttaattggatgattaacccggatccaaaacaaagcccaatccaaaactaaaatctccactaaaatatgagagcccccccccccccttcccccacattacccccgctccttcaccgcatttaacaccaccacctcaaaacggcaactgcatgacctccaccacctccacctcctcctcttcactcccaagaactcgcaatcgccaccgccgccgcggcggcgcagcttgataccggcggcgcgagaggaaggcggaggagggagagagaaatgggcaactgccaggcggcggaggcggcggcggtcgtcatccagcaccccggcgggaaggtggagcggctctactggcccaccaccgccgccgacgtcatgcgggccaaccccggccactacgtcgccctcgtcatcctccgcatctccgccgacaaggccgcctccgccgccgccgcgggggacaacaagaccaacgccggtggagccaccggcggcggcggaggcggcgccaagatcaccagggtcaagctcctcaagcccaaggacacgctcctcctcggccaggtctaccgcctcatcacctcccaaggtcagcacccatccgttcttgcgcttcgattcgccattctcgttgacgcggcaacctgaaatccgcgcgtggtggatgcgcagaggtgacgaaggcgctgcgggcgaggaagaacgagaagatgcggcggtgcgaggccatcaggcagcagcacgagcagctccggcgaggcgacccgctcgctggcgtagccgaggaggaggaggaggaggagagcgcctccgacgatcaggtcactgtccctgcattttttttcctcatgtcaagactgaattctccgccttgcaagaaagctaacgcctcgagatgttctcgccgccgcgcaggacgggaagagggaccggcaccggagctccggcgccggcgcgccgccggccgccggcggcagaggccggcactggcggccgtcgctgcagagcatctccgaggccgcgagccagagcggcggcggcggcggcggcagcagcatctctgaatccgccgcaagatgattcccctgtttggtgctgtattgtctggttttcttttctttttttttctttcttcttcttttcttttttttcttttctctcttagtataaagtgcttggaagttggaactacctccaaaagaaagcagaaaaaattgtaaatcagagtaatcagagcaggatcaataggaaggaaagcttgtttcatctctcatgtaatttgcatggtgaaaaactgaaacttcagtgtgcaattggggttcagtgatttgcaactctgaagctttacctgaacagaaggagattcagaaagcatcccaacccttttccatcaacatatactactatttacccagtccagttacttcgcaaaatttaccagatttttcagtttgaaatctgcagagcaaaatatccaaggtaccaataatgcatttcttcgtctcgaattcgcgccgtccgaggcgtctcggttttgaattccaggagtgaaactgctagatcaggtgctgggcacatgctatccagtgtttcggtgtaaaatactcggcagacgaggacacaacactgctggttctgattcttctgaagtgttttggagttgctaagctccatcagtccacttggaggctctggcaatgccagcccggatcagggccgccgtccacggctgccagtggagctccagcgagcctcgccatcgacaccccacacgtgtggtggctctctgcgcatcgtcgtcgctgctccggtggctggccgtccactgctgtgttctcctgggattcagtgatgctgtcctgcaggctgcacaagggtcagtctgaaatttggaagaacagaactgaatttactaatagagtattcctcacagtacagaagatgcagatccataggcaatggccagtgatcaagtatggtttagcatagtttacaaggtgacttctgaagacagtattgtattgagatgtcatgtatcaatatctcaaacatattattgtcagttgcacgatgccatttatgcaacaagattatctccagttagatgtccagctcgtaaattctgttgccttggtccctcagatgcttcagatccagatctttacagtgcaaatggtgggggattaatttgatagtttggtatgtgatccatgcatctcggctcatgattatggaagaggcaaaagcctgattagcagcgtgcgtgcgtgctgaaaaggcaggcagtgtatcattgttcagacttcagacagtctgaacttttttgaccagcaaatcaaactgatgcatgaattagcagaagaagggactatattttagcctaactaaaccataagaggactgaacattaaatgaatgaactcaacaccagaacaggatatgagtgaaaacataatgataaagcatcatcagatgaaatgctaagttcaaagtagctgacattagaagtaggaaccactgacaagctatcctcaactcgtcggtaaaaaagcctatttacaactccatcagtaacaaacactactagtgttaatcatatttggcaaatgaacttggcattgtgcccaaaattgtctgatcaaagtcgttttctgtgcatttttgtcatagatgaatcctgcattcctgcatctcaaaataaaactaatgagccattgctaacaacatattttgaagcgtggataagttaagaaagcagcttacatggaaccgttctccttttgagatgtgaagattaacttcactcagtactaccattcgtcgacttctggctagcagaacctgttaattcatgataactacagtaagtacaacaatgtaatgggagaacaataagagaacgcaaaggtataatcataccgtcagttgtgagccaatcctgcaaacaaacgagcttttcaatatggtgtttacgtgattcaaatatagcaaactttgcagttcttattgctacattgcaatcagtacgacatggctgtgaattgtgctaaaatcagtactgtgtattccaggagagcactagcatatacaatggtatatgggcctcatgggccaacagtaaaataagtctaagactacatcgctatacacatatctaacagcccccttcaaactcaaggtggatttggagaatgatttggaggatctatcacattgagtttgagaatgtaaagacggtgttgctctctagtttgagccttggtaaagaagtcagcaacttgaagttcagatggcacatatcgaagagaaattgttgactgctgacaatgagagcgtgtgaatgatgcatccactccaatatgcttagttaactcatgctttacaggatcattggcaatttgtatagctcctgtgttatcacaaagaagaggtgttggatccttgcattctacaccaagatcagataataaccaacgaagccaaacaatctcagaagtggtagtagcaagtgcgcgaagttcagattcagtactggatcttgacacagcagtttgcttcttggacttccaagcaatgagagaagtaccaaggaaaatacaatatccagtaattgatcgacgatccattggatcactcgcccaggttgagtcagaatatgcatggaggtgaagctgactcgagcgtgcatagaatagttgtcgagatgcagtccctctcaagtaacggagcacacgaagcaaatggctataatgaacagaggtaggtgcactgacaaactgactaagcacatgaacaatgtgagcaatatctggtctggttatagtgagataaacaaggcttccaacaatttgacgatatcgagagggatcctcaagcaaaacaccttcagtagaacgaagttgaacatgtagctccattggagtagtggcagtcttggtatcagtaagaccagagcgtgttataagatcatcaatatatcgatgctgagaaaggtagtagccatcctctgtattagtgacctctatccccaaaaagtagctaagagggcctaaatcagacatcatgaattgctcacttagacattgcttcacaaaagcaatatactctaagtcatcccctgtgattagcatgtcatcaacataaagcaacaatagagtccgtccatggtcagaaacatgaatgaataaagccggatcatgatcacttggagagaatccagcagcacaaacaacggagctaaaacgctcaaaccaagcacgaggtgcttgctttaaaccataaagagcacgattgagacgaaaaacataatttgcaggggcatcaacaccaggaggcggtttcatgtaaacctcctcctttaggtcaccatgaagaaaagcattcttcacatccatctgagatatggtccaggaacgagcagctgccacggctacaagagtacgaacagtggtcatgtgagcaaccggagcgaaagtctcatcataatcgcgaccatgttcttgctgaaaaccgcgagcaactaagcgagctttgtagcgctcaatagagccatcagagcgagtcttcaccttaaacacccacttgcaagtaattggaatggcatgacaaggaagaggaacaatatcncaggttcttgttcgctctaaggcagcaagctcctctgtcatagccaattgccactcaggaatggcagcagcctcttgatatgtactaggctcctgaacaccatcaattgctgcacacatatagcgaggatgaggcattatcttgctgcgatctcgaagaccatatcgtggtgtagcagactgtggtgatgacacaagtggatcatcaatgagcggagcaacgggtggatcatcagattagcattaatggtactagttggaacatctgaaggaagacaagagggaggctgagactcatgtggagttcgaggtcgacgactatagtggaaaggaaaaggtgacatctctgaccttggtgttagagtggatgatggtatatccaaagagggtgaaggaatggaagatggagaaggtgtctcactgatggtagttaggtcttgagaaggaata

SEQ ID NO: 16126 - DNA, 1732 bp, Oryza sativa
caaaattctcaactccgcctttagcttcggtgtactttgtgttgctctaaagtcacactttacctcttcatatcttttatctcccaccaatctgtcaaagtgctcaaaaaaagtaagcatgtcatacttcacactaatataaccctttaattcattattcaggctttcatttctttgggtggtactcatatccgcagaaaacgtgttccggccatatactaatgcccattgctcccttttcttaaaaatccgttgcaaccatgtattttgctggagcttatatttttcaagcaattggccccatgcacgtaaaaattcttcttcctcttcctgatcatatatgcagttctgaaagtcagcattaaatttcttatagtccttaacacacccagcaaggtgcttgcaggcattctgattcatgtgccatacacatatccgatgatgagtttatggaagaactattttaattgctttagccatagctgcatcttcatctgtcaaaattgtttttggcttctttcctgacatgacatttagaaaagttttaaataaccagacaaaactattagcggtctcatcatatagaagagcagcaccaaaaatagtagtcttcttatgattattcactcctacaagcaaaccaaaagggcgtccgtcatccaactttctatatgttgtgtcaaagcatacaacatcaccaaaatcttcatagtcggcaaccattttagagtcagcccagaaaatgtttgtaattaagtcatcctcatcaacctgaatagaataaaaaaacttgacatcttctgatgctttcttctccatatattctaacactcccccagtatcaccttgtttggtttgtagtgacctcttggagtataatttattctttatgtcaacacgagtaaacccgagattctcaaatccacaagcttgttttgccatcaaatcaatagctgctttagtagaaatccctatggattttgcgacttcaatgcttgcaacttgagcttcatttatcttcctttgtgatcttaactgatgagcctgacttctagtggcaagattatggttatgttcaggcacaaagtgatagatagaatagaatccatctatgagacttatcttcatacatgcttggcatttgcatcgagtttctggcttactaaaactatcgccatagcctgaagcttctgctcttttgtcaatacctctacttcctgttaatacagtgcactaattgaaacaaaatgtctctaattgaaagttaatgtaactataaaaagaaacaaagaatttaccttgacgagaacaacaaaatgtcatgttttttataattttagtatttccaatgtaatgatagctgcttcttctaatgctgaaacctttcttaagagcataagcattgtagaaatcataagcttcttgttcagagctaaatttcatgccaatctttggcaccaagtcttccagatattttgttgtatgagcagcttcatttgttccttcatcctaattttatccgtggtaatagtttccatcaaaaaattgcaaaaaaaaaaaaaggaacgatgaatatagttgttcatatgcacgtgcacatgtccggatcttacagtttagatgcaactaatttaacaaaatgtaaaggagaatagatagggatcttacagcttctaattgatttcttctcaggccatcagagggatctgtggactcagcaggatttgatgat

SEQ ID NO: 16127 - DNA, 13475 bp, Oryza sativa
ggagagttcttgttagtgtggagacgcaatctgtgtagatgaaaataaaacaactgtgtatttgtacttatgtaccgctctaatcctttttcccgccactaattttatttgcttggcgtcatatttttgttagcgcttaaattgcgttgtttccaatttaattgtgatagtataacatgggacgatgacgccgtttaagtgaaagaggagcgcatgcgtactgacccaccagaaaaaacccagcgaataagaaggtgacacgtcgccaggaacagggaagggaacaggtatcgggacaggaagccgcatccccagcgagcagtgcgccgcgttgactcttgctttgcattgcagggccctctactttgggcagaggaaacacccggctcacgaaacacaccgtcctgaacttccatgcatggcagaaatgcaataatgtttacctacccggtgaatcaaaaacgtagtccgtccgtattttaatttatgacgtcgttgactttttaaccaacgtctaaccatttattttatttaattttttatgcaaatacaaaaatacttatgtcatgtttaaagaacatttgatgataaatcaagtcacaaataaataaatgataatttcataaattttttaaataagcagaaatgtcaaacgtttattaaaaatgtcaacagcgtcatacattaaaatatacggagcgagtattaagttcggaggtggagttagttgatggcggtgtgctggtgcgtttctaataactaggagatccaggctggtgatcattgtttggggtcattgatgtgatggctccttctctaccggctaattttataactcgtttacacccttttaatttacaggagcaatattttgcatgcgtggtcattacatcgattaattatagctagagcatgcagctgttgacatgtcattaatctgttggtataggttactgaagacacaatatatgatgttgtatacatatagtggcatactccctccatattaaatatatgattatgttaacttatttggttaaacttctgaaattcccctcatcaatagctctctttagtttgaaaacataaaaataatatgagtaggttttatagatttttcgttttaagtacgtttgcaatattataattttgttggatactatcactatattctaatagaaaaatagtgcttaaacttgcgcatcaaagacaaagtaaagtctccccttcaaacaataaaagatagactaaagtcaacaattttatatatttaaatacaaaaatagtacttatatatttagatgttgaggcctatatgggtgccaatgctaataaccttttattttgatacatgggttgtatttcataaacctataacttatttattatgttattgaaccgcactgtatcagcagaccactcatccaaggacaggtaagttaaccaatcagtcgacccatcatatttatcgaaaaaaattccttacgcggtaatcccttctatgtacttaaattttactttttttatcccctttattttgatcattttttgtagataatttcttgtatgcccctaacaatttagccaatcccttccatggcgttgagttttatttactcccttagtgtcatgtcccttaaatattaatttaattccttccatgctcatttcatcagttgaccatttaatgtataagaaaagttagttttaccattgggcatgtaaggccattcccaacccaatgactaggatgatgtctacagcattaaataaggcaacatatcctatgcacacaggccctcatgtgtacacacgtgcacaccaactaaaaaatgtcaccaaaaaatctagaaaaaatcatacacatactttcaattgtattacacctagggttaaaatcttaacgtcaaattcattatattttagccgtaacaaaaaaacaaaaaatctgacagttttaaggttgtaattttgtcagaattttatcttttttgttattctctatgtagaatgaatttgaagatgcgactttgcacgtagatgtaatactattgaaagtacatgtatgaattatcctagaattttttgtgataatttttagttggtgtacatggtgtgtacacgcgaaggtctgtgtacataggatacgctcccattaaataatatgccaactagaatgaaaaatgatgtggcaagtgaatacatgaggaaagagaaggaaatcatgtcttgcataagacatgtcttgcatgagacatggtttctacacaacatccaagacatcatatgagataagtagcattaaatttaagtatgaaatagtggtgtttgcattggaagaatagtgtctagtactagtttcttgataattcttgataatgtggagtttatagaaactatgtctagtgtcttgggttgggaatagcctaagttatttatgaaatctaccgttggaagtaagtaatttattgcataactataatattcataagtttattgtgtgagaaagtattaaatgcagaaaatctaacatatatttaaagaaatatatttagcattttttaaaggataaacatgacaattcgtcttgtatagtagcatttttagataatatatacaaaatgtgtcaaatcttttgtgctactgtcacaaaaatatgatacatatgctttttaataaatagaaatatactttattatcgtctaaaaaattttttgtcgtgataatacctcacataatgacactcgtaaatataactgtctcatacaacaaactgcaacacatccaacaatatactccacaaatttagaagggatcaaaccaaaatagaggtacacaagagagtgagacatcatggtaagaaaaacagaatgctcaacataaaaagttcatttccaaaaattgatgggatataattataggcaaatgttgctacatgatagtcaatgtttatttaatttacatgtggacatccaaaaacgtgcgatgactagaggacacctacagaatggtaatttactgaacgacaccacactcattgttttaatattttagatccaatcgaagggatttttttttcaaaaagacaagaattcccctcaggccacaaaattataagctacgctggagaaaagaaaagaatatgatgtatggtagcagtgtactttgggggaggatagattgagagttgcatgatgtgtagtttgaaaatctaccagaaaatgtatatgaaaatttagatttttctgaaaatctagaaattatttttaaaaaattcagattttttattttttattttggaaaagttgcaaaatgtaccagttgctgctgctctagggttttggagggggttaagagcatgcccagcagatactctaaccaatcctccatcccggtattggcgtatatgggtgaaaaaaatgccctccagcagatgcgctacccccacactccaaaattggcggatgcgccatagtaggagagagaagaggcaaaaatagcgtatctctctcctcacgccatttcgcacccgcccccatccagactttcgcaaccaccacccctccggtgtgccttcccctcgccgtcgtccccaaccggcgtagatgagttccccgtgcccctttttttgcttttttttcagcgatttgtggagcgagccttaccagatctgggggcgtgcgcggggccttttgtccgccgccgtctccccacgcgtggccgccgctctgcgcccgccgccttcctcctccggcgtgcgcggggccttttgtccgccgccgtctccccacgcgtggccgccgctctgcgcccgccgccttcctcctccggcgtgcgcggggccttttgtccgccgccgtctccccgcgcgtggccgccgcccctcgcttgccgccgtcgccctgcgcccgccaaccgccgtcaccctgcgcttgccagccgccggcgcccctcaccagctcgcccagcgccgtctctgagcagcccgccgctcgcggcgccccttccctcgtcgccctgctgccctcaccgcccacgctgccaagccgcctctccctccgccgcccgtcgcctgcatggctcggggatagaaaagagcaggagaggacaaagaagcagagaaggatagagaagaatagagaaaaagagagataaagacgaaatataagctttaaaatataatataaatgtagggtggttggaaaatattattaaaacatagggagggtgtaatatggatgatctgttggagtgagtagggatatagaggaggaatctttttggatggccatctatataggcatatgaaggattaaatttggatgagctgttggggatgttctaagggagatatggcctggtttggtccaaatcaagccgagtaatatgtgctgcttcgaggacaaatttgtcatttcaacgcactgtctcccattaggtatgaaataatatggtaacggttgtggtgtccttcacctgtagtaagttttttgtgatgttcaccaacaaattacgtaatttgagtgtcggaagcaaaattttccattattatatgaccacaaattaaccaaaaatacattttaaataaattttagaataaatttgatgaaactcatacaacattttcaccaaaatttaaacccaaaacaaaaaaaaggggttttcattcacagtgaaactcgtttatggctgtaaccatcttttgaaatatttgtttcaaaatttaaattttgtttttcaaatttggtgtaaaataattatgccctattgatttattatatttttttaaaaaataacattgatattttttaagtagcacattagtatatatgagagaggggtaatataattattttagagaaacataacggatatctaatgaaacgtggccatgtgggtatatagggataaatgtgaaaacctatgaaacaaaattcaaaggtataaaagagcttgagtaaaactttttttttaagaattacacaatacaacacagacactcacaacgcatgcacactcacccctatgaacacacacacgcaaactctacccctatgagtatcttcgaatactactcaagcacgtgtaagtagttttctgcttttcatactgtgatacaaacctaataaatctcgctatatccacaattcccctacattacaatgagtcatgtccatgcagtacagagcaacctgaacttcatctctttttgcagctaagatcaaaacaactacctgggtggcccgcgcaattgtgcggctagcacctaaacaaaatcaaatattttttagtatgattttacttaagatttattaaatagctatcctcgtatttctagttatataattttaaaagtcacaccagctgctaccctatatttctgtcatattcttctttatttgtttgctcggtctaccactatttctattcattctccttaaaatctttaaaaaatgtttcttatagctttttaagtttattatctcgttgggttttatttttataatttctagaagtcccctcaaatgctgccattatattcctctatgacccatccactgtcttttctctttattgtcattgggattttacaaatcgaacataattatttttttacaaatgaagtcccgccaaaccgtcagcggctttgccattatacttctttatggcctgaccgctgccttccttcttcattgtcattgagattttaaaatcaaacatgattatcattaatttttttttactttttagaagttctgaacctttaaaaattggatcttgtagtttttagagtttattgtctcgttgggtttcttttttttatattttttagaagtcccgtcaaacgatgctactatactcctctacggcctatccgctgcctattctttattatcattgggattctaaaaatcgaacataactatcgttggaattcatttttttattttctagaagtcctgccaaccgtcggcggctctgcaactgtactcctatacaccccgcacgctgcttctcctttttattgtcattgagattttaaaaatcgaatatgattatcaatggggtttgtttttcttactttctagaagtcccggcaaccgccttactcgtttgcttcactgcctgcttgtcatccctccttttaatcatcattagaattctatttgatgttttactaacagcttttatatgtcgtatcaaccgccagcactctacttttttataggccttttacttaatttatctcgtcatgtgttttagatggtctttttttaatagtatttatttttatcatcattttttattatttataaattgtattcctaattgaatttttttatttttataatttatgaatttattttttttcattgtaattaataccgtatagtgttcttttaatatttttaatttttattttttgaatttcagttgtttcaaaattgtattactacttaactcttttaatttttttcattttggatattattttattattttattttgaattttaattaatctcgtattgggttcttatatggatttttctttcaatattgcttatttttaattccgaatttcagttgtttttaaattgtattcctacttgaactcttcttttctttttgctaatttcggattttatttatatttttattctgtatattaactaatctcgtattgggttcttatatggacccttatctcaatattccttatttttaattacgagtttcagttatttttaaattatattcctacttggactctccttttattttctaatttcggattttattttatttttatttcgaattttgattaatctcgtattgatttcttatatggagacttctttcaatatttcttatttttaattctgaatttcagcaatttttgagttgtatttctacttggactcttattttctttttctctaattaatgttggaatttctagcccccacaatgaacgtggagcctcctttcaaggctgttttaataatataatagatagatagatttacccttttatgattgacgtattttgactcttccgagtatgatgggttttcaatttgaacaccaaaactaaggtaacccgcaaatgtggccatgaacaagcaaacgggtttcacatgtttattttgtcgtatcagtgtatcaccatgaagaaattaccatgtcaatgaaggaaatgtaaccactctggatcagggattataaacagagcaccctgaacgcgtgcacataatattgtacagacgcttacctaacccgctctgatatattttttttccttatctgaatatgattgtacacatgccagcctaaccagctaacacagaattgctgcctaattgccaactggagtaacaacagaagtacagaacccaagtaagaaatgtttttgatcgagtgattgattctgtgttgtgattactgaaacaataggtgatcaaatggatttaaacacgcaactcctaatacgtatcctttatccagagagaacttcttcaatacttgaaattaattaggaccattgatctgcaatgatctaacggacagaaagagaaggtacctgaaaaaaggtattaaaagggtgggccaggtatggaaggtgggagggtaaaatggtaattgtttttcattaattttttttcagtaaagggcaaaagcgtattcttacaaattcagaacttttgagagaagcaacaaacattttcagcaggaggaagaaaaaaacgagaggaagaattagaacgctcgcgtgcgagaggaacctacatgatctgctggttgtcgctgccgtaaaaggccgccgcttgccgaggcctcacacgcccgccgctcgctgccgccatacgcgcctacgaaagcagcagctggacaccgtcgccgccgccgacgcacgcgcccgtagcgcccgccggtcgcagctgacgtacgcagcagaaggtcgccgtcaccgccgacgagcccgtcgcgccagccggtcgccgccatcgcacgcgctggctcggttgattagggttaatcttgaatcaacggtgcgacggcttggttgattgggtgacgggtgggatttgagcaattactaagctacccttgttaataaaaatttgtgttcctaaattaccctttgaagattaacgggggataacaattcgttaaggaggtacctggggtacctttcaagcaccgtaaaagatctcttatccagatcatcagcaactgagttttatctgtagaacttgcatacgaagattggagaattagatgagttcgatcggcctacgtatgtaaacacgcaggctgataaaaatctgcaccaaaaatctgaacctgtatatatgctcgcattgtgtccaacctttcgcatcagaagcatcaaatggtaagccgtccggtacaaactgaaaaatcttcagacgcagtacttcagagaccatgaaaaatctgccacgcacgaggattaacctggtatttactgaaaaaaaatatccttggtatgatgtgccctgcatttactgaagattttgccgccgcctcttgctggtctcttcaagacatgaggcctgttttgacaatgtgacatgacaagctacgttgcgaccttgcagcctaacacgttccttgatcagatttccgacggccaacacgtagtaaaatcgtagttttacgatctcagctaggccggcgtctgaacctcgtggcttgcagagccgcttctctctgacggatctgaatttctcggccatgaactgcacgagcgtctacaggttagcagcacacgctgcacgttactgtaccagaaacctggcatctctcttcgatccagtttctgacgaaagatacagcacccagcagctgcttccgattgacaacggctgaattgcagtttcgagcccctcctgagattaattgcagagatgttcaagaaagtttgcatctcctcttcgctgccaaccctgaccgaccactgctgttaggtcaggtgcctgtcacgtacactcctttggtcagaacaccatagcggagctcgcactatataagctgctcgccatgagccataatggccaacaagaaaccacacataatagagcgtattgctcggaggcagccacagccatcgccgtcgccgtcgccgtcgtcccctgcatttatcgccgggccaccgagatctcgcataagtacagcggcgccggtgagagggaggcagaggctgtaggtagctagagaggaaaaatccacgctagctatgccttctccttcctcagctcattggctgagcttggtcggaagcgtctggctccagaccatcaacggcccgaacgccgacttcccggtgtactcgtcgcagctcaaggaggtgaagggcatctcccaggtgcagctcaacttcctcgccttcgcctccgacgccgggaagctcttcggctggttcgccggcgtcgccgccctgtacctgcccctgtggctcgtcgccgtcgtcggcgcgtcgttcgggcttgtcgggtatggcgtccagttcctcttcttggagaggcccgggctcgcgtactggcacctgttcctgctcacctccctcgccggcaacggcatctgctggatcaacacggtgtgctacctcctctgcatcaagaacttcccgtcggacagccgcgtcgcggtgagcctcgcgacgagctacctcggcctgagcgccaagctctacaccaccatggccgagaagatgccccggggcgccacggcgaggtactccaaggagaaggtgtacctcctcctcaatgccgtcgtgccgatgctcgtcaccctcgtggcggcgccgtcgctccgggtggtggagctcaccagccaccgccggaccgacccggcgttcctcgccatgttcgcgattaccctcgccaccggagcctgcgccgtcgtcggcagcatcggctccaagtccatcgggctctcgaccagcgagcacatgatcagcctctacatcctgctcgccctcccggtgctcatcccggcggcgctcaaggtgcgggagagcatggacaagctacgggaggcgaagcgggagaacagagtgcacgacgtcgccgccgccaccgacgtgccggagacggccgtgtcggtgctcgaggtggccgaggcggcggagaacaaggaggaggacgacgccgccgccggcgagagcggcggccaagacgaggtcggcggcatccggctgctgcggcggctcgacttctggctctacttcctgagctacatgttcagtggcacgctggggttggtcttcctcaacaacctggggcagatcgccgagtcccgcgggctcagcgacccgtccactctcgtctccctgtcgtcctccttcggattcttcggccgcctccttcccgccttcttggattactacaccgcaaagtaagcaaccaagctgcatgcatgcatgcatgtgccgatcaaatcaaatcactcgtgttttttacaacttgtttaaatgttggagtctttgtttatgcatgtcctgacaggggatgaatttttggtttgggttttgactatgcgcaggagtggctactcgctgtcaaggacggcgtccatggcggcgctgatggcgccgatggcgggggcgttcttcctgctgctggacccgagggacatgttcctgtacaccagcacggcggtggtcgggacctgcaccggcgccatcacgtcggtggcggtgtcggcgacgggggagctgttcgggaggaagaacttcggggtgaaccacaacgtgctcgtcgccaacatccccgtcggctcgctctgcttcggctacctcgccgcgttcctctaccagcgggaggcccgcggcgccagccgctgcgccggcgccgcctgctaccggggcaccttcctcgtctggggcgccacgtgcgccgtcgggacggcgctctgcaccgtgctgtacgcgaggtcgcgcggcttcgccgggaggctaccgccgccggcgaggtcgacgacgatgccatgcgccggccagcggccagcgactaacttaggagatgataacaagggaccagaaccagaagtttctagtacagcagtttaacaaattaattaggtgccacgtaattaattaagtggagaaaaaaatctacagctagtgatgtggagtaggatttgatgatttgcctttttttttcctctgggaaaaatattttgtttcattagtttctttttctaatctttttgagtaatcccatggtggattgagaagctcaacttgtgtgtacgtatatacgtatatggccaaaaaggaaaggataatacacagctcactttattactagatgcgctgcaaatcactgtgactggacaaagctttttttttttttacatggacggttttaatatatccagcaaacttttagtggatgtaccaccaagaaaggcaacttacaggctgaccattttagggaaagttggtagggaaaacttttctactcagtataggataatattgtcccttttcgggtgtatttaagatcaaatgtatagaatgtatctatgaattgtttttcttgtggccaatggattttgagacagtttgtgggattgttttatggaagaaaaaaatccaacatactccatccgtctcactcaaattacaggacgcttctattttttaaaaaaaaataaatttggtagcttttgactaatgatcatactagctatatctatgctaagtattatatatgttatatcattatatttgtatttttaaatacttcatatgatactaattttatattcgttaggaatataataacgaataacttattgaacaaattatgctattaaaaatcatgtaaaaatataggcgttacaattttgaaggaagaagtattattttctatggggaaccttgaaggagctctaaaaagaaaataagaatgtcatggtattactgatgctatggaactatcgccgacatccatcacttattgatggttaggatatttttaactcctagccatccattcatctcacgtcatttcatcttacccattcgttcatttccattttctaattcaatccatcataactctttttttttgaacggaaaaaacagcacagtagtgctttttcattgaatatagaaggagaaaatacaacccctaggggtaaaacaaaaagatctttagactatacactatacagagtgcgggatgagctcgcgcaatcttttagccccagctaaagcccacaagctggcctcctctttgatttttgctaggagaacacctgttgccatctctttgtgatcaaagattcgccggtttcgctccttccaaatttcccaaactactagcaggataagggaccgaaggcccttctttggaatgccgggtgtattagctaggctctcccaccactgatggactgaccgggcttcctcccattgggccggttccaactgctgatatcccgcccatgtagcaacgaggcgccagattctcttcgtgtatctacacatggcgacgaggtgcaaggctgtctcggtgtcacaacgacatagggggcaatgtccgttattccgccagccccttgtcgcgagtcggtccgacgtccagactctattttgaatgatgagccaggcatgaaatttacatttccctggcgcccaaactttccagattagggagttgaagtttgtgtttggcgcccccaaacattgggcatgataagccgaggaagctgtatagtggccgctgcttgtgaatttccaaacaatctgatccggctcctcgctgtctaagtgcacattccgtaccgcctcccataggcggactagctgatcgaggaggttgattgtgatagatgaacccgcatcgagggtcaggtcatgcacccaggagtcgtcttctttcccttgccgtagggatttcttcctatttttggagatctcatagaccaacggcattaggtcttttggtcttcggccgttaatccatgcggagtcccagaagcgcgtcgtattcccatcgcccacagttatctttgttgaggcggcgaagaggtccctatccacaccatcacaaggcgtttccaaacccacccaaggcttgcttggatctctccattcgttccacaaccatcgcaatctcagagctcttgtaaatttgtccaagcttaggacaccaaggcccccttggctggtcggcaagcatgtctttgcccagttgaccttgcatttccccccggtgatatcccccgtaccagcccaaaggaagcgacgtctctgcttgtcaagctgctccagggattccttcatcaccttcaaggcagtgaggagataaattggctgtgctgaaagcacagactttacaagcgtggttctcccggctgctgccatgtttttccccctccaacttgcaactctccctgatattttgtcgaagaccggttgcaagtccgtttttcgca

SEQ ID NO: 16128 - DNA, 6226 bp, Oryza sativa
agcatcatccgcatacattgagatccgcagccgagttgttcttcctcgtaattttgaaattgcacccaactctgttgccttggaaaggatacgctgtagaggatcaatcgccaagatgaagagaagcggcgagagggggtccccttgccgtagtcctcttccatgtttgatccgttgccctggcgagccattaaggaggacttgggatgtcgaagacgacagtaaagcccctagccagtctatccatcttgtcgggaagcccttgcgctgcagcaaggccagtaggtaatcccatcgcacggagtcgaaggcttttgttatatccaacttgaagagcaacattgcccgtcttaggcggtggtatcttctgatcatgtttcttacgaagaggtagttgtcatgaatacttctcccctttatgaaagcgctttgattgaccgagatcaactcatgcatgtggggccttaaccgcagcgctagcatcttagcgaagatcttggcgatgctatgaattagactaattggcctatagtccgaaacgctttcagccccatccttttttgggattaggacgatgtttgctgagttgagcaaattcaggtgcgcacatctcaggttatagatggagctgaagactagcagaatgtcatccttgatgatttcccagcaaactttgaagaaggccccagtgaagccgtctggtcccggtgctttgtcggctggcatttccttaattgccctatgcacctcctcctcagtgaagggttcccccagcgtggctagatcaatcggtgtgatgtccaacgtctcccagtttagctcgtttggcctcggccccggcctccccatgaagcttgcgaagtgatcatggatcgtcaattccttttcaccgtgcgtcaccgcccaaccactgtcctttttcaatctttggattgtattccttctccttcgcgcattaaccctgaggtggaagaacttcgtgttcgcatctccttcacggatgtgagttaccctggaggcttgctttttccttgccctttctatagaagcgagtcctaggactttccgcttgagagccgccctcagtcgcgtttccgggggggagagttctctgtgctcttgtgccacgtcgagtctttggatgacattgagtgccatatggaattgcaatttagcctctgagcagatgccttttgtccaatctctaaggccgaccgccgtacgttgcagcttttgattcaggtggtgcataggctcagtgtgcgaagaaggttggctccagatgtccttgactttgtccttgaaccccgggacccgtgtccaaaagttttcaaacttgaaggtcctcggacgatgtgggccttgcgggttggacagtacaagagggcaatggtcggatggccctgtaggaaaggcatggagaacatggtgggggaaagcaagatcccattcctcattgcaaaagcaacggtcaagcttgacaagggttgcctttcgacgctcattactccaagtgaacttcctgttttgcagggggatctcatgcagctcacatcgatcaatgactgcgcgaaaacatgatcataactcattatccgaacatgatcatagtgtgtacatgtcttcaatcgttctgtgtaaccaagaaaaaaaaatctaatatcataagaggcaataatactttagacaacagatatgggcatatatattacccccatttgcctgtcataaatcccgttattttcgaacggccaaaattcttcacgatgcgtgcactagtcaaatcacttaatcagtcctctccctaatcacctaaagttgtcatgattcatcatgacccatcatcgccaatgagttctctctcctctaggtcctctatctccatcacttcgtctgtgagactgaatatgtctggctggaggctgaagacaatatatacactgtctagacagagagatatcatcacaacagggttagtatgtggtcaaatgacatatatcaacatatgtttataactttatattattgtgtgctgattgctgaacacacatgtcgcttttctggatttcctcataagcgatcaacttacctgtctgtatatgtcactgcagtgttgcgcaggttaagtaagattcaatgtacggtccaaagcaatcctgagacaacgaagactagccaaggaatgatcggagaagacacggtccaaattaaccgtgtgcatcacggtcagggaaaatgtgtcttcaaaagagaattactctggtctattctccgagaccactgtcaaaaaattaaaaccaaaaggccaagcttctgtcgtggctcttgacagagccacttactgagaagagttgccgtgatctatggtgatcaaaacgctcgtctcacattcctcagtcgatcggcgatgatgcagttaatattgacgagacatcaaccgttgacagttacaccatggcccatgcttgatagatccagcggaagaaagaagacgttcttgcgccagattctctcagctgcggcagtggacacgtcgagatgcgtctcctgtccggctagccgtctctgtttctgagggtcttgccgtcttggaacagaggaactgctatttttactcggtcattaattctgggagccaagtgtttgatgtttcagagtcatattgacctccttaattagatgcctttccaaccgtgacaatactccgaagaaaaacaatgctgcatgctttcgaatttatggtcggtaaaacgtgcatacaagtttatcgctagtcgtactttggcctaacattttggcatatacttcatcaatttctccatggcgagaatgaattttaaactctcgagaaaatatctactcgagaaatatctacttgtgtatgcatgttattcatatagttatatttttttctaaaataatagattaatacatatacatcacttcataaacatgcaaaaaaaaacaccttctacaagttgcaaaaaaagttatagctagttaaattcacatttaaatttgttttcctattttaactgatagaagttaaatttgaatttgcatgtttgtgaaataatctatcacatattaatctatcttgttgttttttattaagaaaaatcataactctgtagaattgtttctcctcgacggctgataactcgtgaaaataatgaagcaaccgaaaataatttatggataaaatttttatatacgtgtttcttagacattttaaagtcaactagaaaaactaataattattagaataataaaatatatgatatattttatataattgtttaaaaattatacgagattttactaattattaaagtgccatgttgcggcttacaagcatttgtatgagtgttgtgtggcggcttaggagcgtttataatatgctttacggattttttttaatatatataatagatagatgctaaaaaataaactactataaaaacatcaaaatcaatttaaaattaagtctttgatatttacttttggctatgaaactgataatcaaaaggcaaatgagaggcaggtggaaattgtgtgctctacctggggtagatgtgataaacacgaggcagttcggttgagatgatatggcccggacggccggtcaaatcctctgctgatcgacagggaggattacaagcgtttccatcagcaatgctctcgatcgattcagcaacttcggtctctttccggtgagctggtttagtacttatgtggttgcttagccagatcggtctaccgtgaatataataagcgcagcatctacatgatcaatccatatatccatcccccatgtctcgtctaatccttcaacgcgaacatgcacgcatgccctgctcactttctatcagcgaaagcttggcatgataaaaccataaaactctcgttgcgtgcatgcatggacgatggccggtccgaatggggctaagtacacgtgagccaagcgagcaggcacaatggccttccaatcctggcatgatttcctctcctccacaagagtgacgacggaaccaagaatgcagaggaggagaggggcaacgatgacgacaaatcgacgatatctgtcgcgtcaggtccaaaaagatggcaaccgtcggcatgcatgctgggaaagtgacggcacgccacgagttggagcgtgacgacgggcgaatcctttggctcgttgttgctgctgctgcgagccccgatcgatcgatcgaaacggatggtaacttttgttattagtttcggggccggggttacttgacgaccacacgtcgcacatacgtccgcgaaatgtttttgcatgcgagtagaaagggtcaaggaaaggagaaaggagaaagtaactaataaccaaagtgccgctttctttacgctactactactactactactactgtgctagtacatgcctgtgctttactacaagtgttagtgcatcagaagactattagtagtagtattagtcagctagcaacggatcgaagaacgctttaataaattctttggtttattttagccggcacgaggtgtagtggagtgacaagtcaagaacgtcatatcgcgagcgagatcaggttcgttcagaagcattgcactatgcagtgcagtgtgcacagcgagcgattctttcttaggacgtccaaacaatactccttttaggagtattattggaggaaacggatcgagaggggctaagctaattaagcaaacctccttttagcacccgcaccgcgcgcacgcgtgataggggggcgcaggatgaaagagatggtgatcatgatcactagcgctagcacaattgcacaaagcaaaagaaaaagctataatagcatcatcgctcgctcgttcacacacaaaacacgaacacgattcacacctccttcggctcaattcagcagctgcaccacggacaggggggcagtgtgccgcccggtcggccgggggagctgaatcctgtgaaagcaatatgcgacgtgcgcgtgagggcaccccgcgcgcgcccgcggccactaccgaccccggaagagacgagcgcgcgcgctgatcgctacggccgccgagacggaacgcgcgcgcgggggcctcgccgtggtggggaggcttgaaaacgccgagcgatcagatcccgcggtggacgccgcccccccgcgcgcttgcgcttgcgtgcgaccgccggccgtgccgtgccaatgggtggattctaccgttcgtagggaactggggcgcagtagaaaattaaactttattatctttacttttttgacatgaatttccgccaaagcgatcggaaagcgaagattctaacgagcagatcagggcacaattgcacaaaactactacgtgcactagcagggtgcataatcattttccggttacgaggagaaaagctgaccctgacagtccattaaaccgccaactgatccccaccactgcaggattttgcatatacacgcttagcacactgcccacccccaagtgctcgtggtattctagtgtgggagcgtcacggtgacgctgccctgatgccataaaccacacgggggaatttataatcacatcgccgatcagttttcagcattattattccacgtcttaattctggctgtgtgccttcgctgtggtcctcttgtccacgagcgatacggccatacgggggcaaattgcaggtacgcgatacaaatccgatcgagacatgagcgtcatgcacgcacgcatatgcacacgatgcagcccccgatcggaacacttctggattatatcggagctacgcgcggcgccgcggagagctcggatcatctcgctctcctagtagcttgtagcgtttttgcggcattggatatttgatgatatttttggaatgaaagggcggatgactggatgtcgtattgcgcatcacgctgatgcaggcagtgatgccatgctgcttcgatcgatgcatgtgtgcttgttactttacattgtaaaagtggccttgcttgccctgctcagtggtatactaacctaattaggcctttcgattctagaaaaacgcattgtcaggcaacagttaattaagaaaagagctgggtatcgtaggtctggtttggccataccatgaacttttcaaataaaagaaaaggtaggtatttgcagtagtgaaggggagcaagaggatatgcatatatatgcgatcaatgatgtgtagtatgcgatatacgctttctgatgagatgatgtg

SEQ ID NO: 16129 - DNA, 14681 bp, Oryza sativa
  unsure (1)..(14681): unsure at all n locations
caccaccttagttcacaccaaaattgaaagtttggttggaattggaacgacgtgacagaaaagttgtaagttgtgtgtgtaggaaagttttgatatgatgaaaaagttggaagtttgaagaattattttggaactaaacacggcgatggtgagatagatctggtgacgaagttgccagctagctcgatcgagcacttgcagattatcagcccatctcctgccatttttctcggccataaatctgatttttattttcaaaatttagcctaagtccacgatataaggatctgaaccactgcatgaagcctaagggtgcattcttttcagcctatagatttcgggtgattatacactaaacaagaaacatgattagcatatacttcctctatcttataactataatataagggattgtttctttttttttaaggttaaacatagtggtcaagtgggtagttaggggttaaaataggtagaaatttgaattggagttaacatgtgcgacaaatagtacaccaaaatttcttttactgtgagacaactagaagggatgaattcccttatattataaaatgaagaaatgaagagagtaattaattggttaattattaaaaccttttaaaataaatttatttaattctttaaaagcatgttctatgtagaaaactttagtacggaacaaacattttagtgatttaaaaagcatgtttacgaaagcaaagagtagctaacttcaattagctttttagaacatgccgtaagacatgtgaatttttttttattcaccggaggggagagtttcccacctaaatttcgttaccaaacttagggaagtaatacaaagttttacactgggtttagggattggagaggggatgaaaatatttggttccacactgggagtactattgtgtcctttctaacaaccttttggctcaaaggttggcatcctcgatacatcttctaaggacactcggtatcgatgttggcgcgtttctgaagacaatatcgtgacaatggtttcaaaattcccagaagcacaacagaaaaaagatttggtgatgcagcttaggcggtcttagaacttgccctaagagtgtaagacatgagaaaaagtttttattcaccggaggggagagatccccacctaaattttacaggaatgctagggaacggtataccgtccctccaacaagatgctcctcttttccacaacttgctcgttcgatgtagcaagatatcgcaacgtggtgatggaagcagtgccgacgatgagctccggcgtggaggacgcggccgccggcgagctctggcgtgggacatggtcgcatggacggcggaggatcctgcgtggtgatagagacggcgctgacgacgagctccggcgtggggcgtggataacggaggatcctgcgtggtgatggtgacggcactggtgatgagctccggcgtggaggacgctgccaccggctgaggtgtggacgacggacgcggccgccggtgatgagctcctgacggaggacgtggtcgccggcgacgagcttcgatgtggaccgtggacgagagaggaccgtggacgggggaggatgcggctgccagcgacgaggttcaggttcggtgtggagcgtggacgggggaggacacggggccgccgccgccgacgccttgatgcccagctcctgatatctagcaggtatcatctgatacctcgtaagtatcacccgatacgtcgtagaaatcgcgctatatctgagaggtatcatatgatacctcgcgaatatcacctgatacatgataggaatcgtctgcatgatacctggtaggtatcacccgatatcggctatctatcaggacctgataccttgcaaaagtatcacctgttacgtggtaagaatcgcatgatacctgatagatatcatctgatacctcgtaaatatcatctgatacgtggtaaaaatgcatgataccggttaggtatcaggacctgatacctaaccggtatcatcccgtttttgaacggaattccggtatatagcagccctcaaattttattaccaaacttaaggaagtaatacaaagttttacactggatttagtgactggagaggggaagaaaatatttggttccacactgagagtactactgtgtcctttctacacacacaacctttcggcctaaaggctggcatcctcgatacatcttctaaggatactcggtatcgatgttggtgcgtttctgaagacaatatcatgacgatggttccaaaattcccagaagcacaccaggaaaaaagatttggtgatgcagcttaggcagtcctgacggaggctgtaagtgtgcaaatgttgctcatctcctgaatgattggttggaagccgatcgcctcctagaatggttttgcgaatgggcagtgtaggcatagatggctagctgtttccgttgtatatatcttcgcacagatcacataccgcagtggggactatcactttttttattcaggttttgtttcgttggtagctgttccttgagatgcgtccttttcttccagacaaactcccagttggggcattgatctagttgcggacttgcggtgccctggcattgtaaacttgcgtggatgttagttcgtttgattgtgacagctctctgtttcttcggtcatctactgatttgatcggaacgatcgtatttgtagttgcgcttgtgctgttgaggacagccgcggggagatgattttaatctcggatggacgttcacccgcttcttatatatcatttaaatagttatgaaaaaaaaattaaaaaataataatatagattaatgcaaaatataccactgcacaaacatataagtttaaattcgacttaaaaaataaaaaattaaattgtaactagtttacatatatttgcagataaatttattatttttgttacaacttatagaagatgattttgaacttgcatgtttatagaatgatatatttcatattaatctatcttattattttttaaagatttttcatgactatttaggttgacatgcaagaaacgagtggatgtccgtccgagtgtttaaaaaagttttcccggccgcagagttagtggcacacccccttggaacacagacttcactatgacgtcttgatccgttgcatgggaaaatagggcttcgaacttttggtacaacgtcgggttgatggcccaggtgtcattccagaacagaatagcagttctatatatggaactcaattgttctatctgtaatggattactagtttttttctgttgacagaaaatagggagaaaaactttagaattttttactgtcagatttgcctcaagattcgtgctgtccttacagaacggagtagtagttctatttgtggaactcagtaggtctatctacatgtaacagatttactagttttctgtcgacggaaaatagggagaaaaactttcaaatttttcaccgtcggatttgcctcaagattcatgctggcgtgtgtagggaaaaaaatctgcgcacctggaagggtaacccaggacctcactttgtctcaagattcgtgctggcgtgtgtagggaaaaatccagtgtgagaataaatctgtgcacttggaggggttctaaccgaggacctcactccggcaggctgtgtgtgctagtcactagggccttgtttagaacccaaaaaatttggccaaaaatatcatatcaaatttttaacacatgcatgggacattaaatatgaaaaaaaaaaccagttgcacagtttgcatgtaaattgcgagacgaatcttttaaggctaattacgccatgatttgacaatgtgatgctagagtaaacatttgctaatgatggattaattaggcttaataaattcgtctcgcggtttacaggcggaatctgtaatttgttttgttattagtctatgtttaatacttcaaatatatgtatgtatactttaaaaactttacacccaatgaactaaacacaccctagctagatctgttgcaagtttttgaaaaataaacaagttacatgttagttgtactccatttacacttccgttacaatgcaattacgctatagttatatttgaaagattttatagaatttttctttcgacagttttataggtagtcccatgtgtaaacattgttagctggatgcgggcatgcggccaagtcagctcaccaaactggcagaatcgccggtcgtcacctgcgcacacaacacaagccatgatcattgatcagcgatgtgatcagcttcgatcggggaacgtgaccaagttggttggtgcctttggtcagagtgcgccggcgaaaccgatccatcgatccacacaccccaccccatcatcatcatctatcgcccacgatccgatgcccgtttaatgcagcagcatcgagaggcgcaaaccgcaaagggtgcaagggattgcgtcccggtcaagagactattcctacttgagtctgctgctcaccctctgatcgatcatcaggcgcagttcgttcgcgcgcgccgtacgtgttggttggtcgacgacgctagctgtcgtcgcacgctacagcagcgtggactctcttgtcgcgagtgaaagcgtcgacggccggggtggccaccgccggtggacaggcacggcggaccggccggtgagagtgagttagtagtagctagctgggcatctgcgaagattgcgattcttatacgtacatgtcggagatctatgtgtgcataatgcctctgccttacgttcgtgtgtacgctcgccgccattgattgatcaccgcgagtagcggcgccgttaaccgtgtagaagttactgctcgatctccggatgtcggatggccccgacacaggtacaaaactctgaccgtgtacaactatcagctgtacatgcatatggcctcataaagttggcacttggcagtaaatttggtagctaggctagattactgatgtcaacgggttagatttggtaattggtactgccaatttatactaattaattaatagaagcgtacgtgaatgcagctacacgcccatggcaacttgctctgcatatggaagctgtcattgaccgtacaacgttattttctgagttactccatttcgttaattagcacttctgcacgagagaaatggattgtctcgttaacacgggggcttccatagcacttctgttttgttggcatgcatatacatggatgcgagatagaacagataaaaaaaatgagttgtctcgttacacggggacttatagagacaattgttgcctcaacctgcacatacgtacctgagtttcatgatcatgatggtatgtgttttgttgtggaatatatatggatgaatatataagttagtacggagtatattttaggacggatggagtaagcattatacaaatgatgagtaaatatgttaaaatactatgaaaacgatatgagagatcaccggtggaggagaaaccatcttaggtcggtcgaccaaattacacaataatccggttgcaaaaaaaaagactaaagatcatttttagttccggttaaaaaaattttgatctttagtcccggttggtaacagatcatttttagtcccagttcaaagaagttggtgggtcgagtcaggctccaattatctttaatcccggttggtataaacaactgggactaaagatctatttttagtctcgattgtttataccaaccgggaccaaaataaactgccaagccacgcgctgaacttatctcctcggtatcccctccccttttttctctcttcattaagactcggtatcccctccccattccttctctcgaagtctcgatcagagagaggccctctccccttcccccccccccccttcccctctcctccgatccccctcccggcctcctcctcctccttcccctctctgttgcggccaggcggcggcgatggagcgagccgaccgcgcggcaggtggccgtgcggcgaacgggtggcggcagccgggtggtggcggagcgaggcggacgcgcgacaggcggccatgcggtggacaggtggcggcggcggccggtggggccgcgcctggcggctgtcggggccgcaggcggtggccgtggcgggcagcggcagcggcagcccgcattgttttcttttttttattaatttgtgattatctgagatgtacttttgtatgcataattttgtgattcattgcacatttgtatggatctgtgatgtatttgatttgtttgtaatttttataggatttgtgatgtatttgatttgtgtgtataagtaactttaagatttgtgatgttgatttgggatgttactttgatttggggatttggggtttgatttggggatatgtatcccacttgattcgggagaaaataaaaaagaaaaaaagaaaaggagacctctcactgccgctaccctctctttagtcccggttggtaacaccaaccaggactaaagataccaaccggaactaaagatcgatctttagtcccgggtatttgaactgggactaaaaatagcgatctttagtcccggattcttactctcggttggaaaaccgagactatagagggttaccaaccgggagtaaaaagggtttttgcaccagtggatggtgattagatatgtttgcatgttgatatgtataattcattaatttgtgatatatgcatgtataagttttgacatgtaataataattgatagggcatgatgacgtggtatgtttgtatgttatgctttttaagtttagtgggttgtaggtatatagaatttatagatacgttatggtccgaaatccccgctagggatggtaattttgcccatgggtccgggtatccgcggatacccgacccaatgggcacgggtgtgggtgtgattttttacccgtgggcacgcccgcccgaaacccgtagacatcatgggcaacagccgagtttcatttttttcctgtgggtaatacatgcccgacccgatacatatgtattagctaatttcaacttatctgttaattcttataccctttcttttggtttatttgtgatactaactaatataagttgtgatgtaatttaaattattattgataactgataatttggtaaattgtcgattttatttctctttgttaaattatatatctttcgagttattattcatatgagatccatgggtacccgccgggtatatccgtgcccgtcgggcatgggtacggacacagagttttacccgctaaccctagtgggtagggtttgggcgggcgacggcgggcatgggttcgggcatggttttgctctacccgtgcccgacccgacccgctgccatccctgatccccgctacaaggacctcatctttatggactactgctgatagcctaaaaatgtccatctttgcattcaagttcaatcataactgtggacgttgacatccacatgatggttgatgtgtaccagttgattgattccgcatgagaaaacaagaaaaggattcggtcattccattttgtaggcaaaaaaagaatcatttcgccatgaccaaccattaaaactagaattatttacagcgctagattggtaccggacagacaaaatctctgaatttatttcatcatctaaaaccaattatcttatctggataagacatcacagacgagattaatttttattgttttaacaaagaaaacaaaaagaaattgcagaggagatgagaaaattgagcatgttgccatgttcatgcatcttgatgtgctgatatcttaactaattcgccatgcttaactagcaaggaatgcttagtcaggtagagagatgaccaccgttcatagctttctttttcactccagtgacctgatcactacaccagagcttcagaattagaccaccggacacataaacacgtgaactgtcagttccattcgccatcgacaaaacgcattttccacaatccaatcaccggcattttaaaggcaaggcagaagaacaaacgttccagccagagataaaacgtcaacccatcgatgatatgcttgtgtgtgtgtgtgtgtgtgtgtgtgtgtgtgtgtgtgtgtccagccatccaggcacctagcagcagccacacaatacggcacaaccaaaaaaacgaatcatgcaaatccatacacttaatattgagaatttcttatatgttgtacattatcaggacacagcagcagacactggatcgaacagctagctaattaccaatgcacacaaatacgtgacaggaacgatcgatgtcgtgtacaccaatctttctatagtaggttaatttaaggaggcccaaccactgcatgtgacgcatgatggagtacgtctgtgtacgtggacgacggtgtacgtgcatttctgttactgttacacttactaccgacgccgacttgtcgccggctcgccggcggcgaccggcctacgcccagccgtgcgtagcccagctgctgccggtgtcgaccctcctgatgctctggacgccgcagagctgcaccatccacgggctcggccggaccccgaggcagaggaggcctccctgcttcgtcgacgccggcgaaatcgccggcggctgcggctcgtcgctggtctcgacgctgccggagccggagaagagccagcgggtggacggcgagggctgcacggccgacgaggaagacgacgcgcgggatggcttgccgagcgcgaggcggcggaagacggcggcgatgaagccgatcttgatccacttgagcctgcagtagccgcagtacttgccgcgaccattaacaacattcctgcggccgctacggccgtgcggctgcggcgacgacgacatggcggcggcggcgcggaggtggtaggacggcggcggggtgatggccgggacgccgccggcctcggcgaagggggaggaggcgtcgaccttgggcgtgcccgggtgggactcccagacgaaggggacggcgccggtgccggcgccgtagtagcggaacgacgggttgccctgggagctctccttggtgagcagccgcgcgtagaactcgccgtcgtgcgtgatgcgcagcgggctctgcggcttgctcgccatctctccctctctcactctcactgtctcggtctcacacacgaactgccactattgtgtgaagtggaggagtggatcggtcagtgtagggggtgagagagagagtgcggtgtggcgcgaacgaacgatccgagaagacgagagatccgatggcgcgtttttatacttggcctccagatcgatcggcgcggtcacttgcgactcaaggtacttagaggcacttttctcacccacttgatgacatgctggcgtcttaatttcagaggagtggacaagttagcgggataatctttgctcttttttactaagttgttttactagttcttgtagcttagcaaaccatatgttccaaaatataaagatttctaggttatttagtaactatataaaaaaaaattagtcacttcagttgctaattttggattactcagatttagagcatatgtgatttattttggaattattgacatgatggaatcatcagaattagtgtattttgatacaaaatttgaatcatgcaaatttttatatttcaatagcctaagagcccgtgcattacaacggaaaacaaattaagttactagcttattaaatcaattaataaacacttattcagtctaagtagtactatgattttttttattgaacaactaaataattttgaaatttggtgagccaattgtgaaatggggcgacttattgaaaagtggtgtaataatacagattgtaaatctagatgttagtggtagaggtggtgtgagtatgaacatcaccaccaacaacattttaagcatatagaaaacgttgatatatatgaaatgttgagagggatagagcggacaaggtcgtgagttctctgcctgagcctaacatgcttgatcgaacatgcctgctgtctgtttgagtgtaatataggtgcagtgaaacatgcatgaagcctgcctgccgattcagtgacatactggcgtgcagaaacatgcatatgcatgctccacacacttgcttacaaaaccattcggcgtcaccacaaaaatgtgttggtgggactcaattcaggttcaagtgtctgattaggcaaaaggaatttttgacacgcgaaattaatgccagttggaatctgacacaggtttgtcgaaatctggcattctggctgtcaaacttgggccaagaaaaatagatggaaaaaaacaagtaaaaaacagttttcgtgatatacagcagagtacaagtttttttaagaggaatacttatacaggcaacatagtacatgtaaaatagaaagtgaggtgaccactgaccaagcatggtccgacctggcccatgtacagcccatagcaaggcccagtcctcgtaggaatcctctgaaatggaccgttagtaccctactgggctaattaatttgtaaagcccaaccaatatccaggtcacgggctaatttcctatgtaggcccaacccactgtaatgggcctcttaggcccatctgtaatgcgttcagttcacggcgaacgtgagaggacgactcccttattcatggcaccgttccttgtgacaaaattacagatttacaggaacgaatgcagcgcagctgctctcactaaaacagcatgaccaacaaagacacaaacatgcatcatgcattcgaacactgcactagttattacttcgtccctacacagagagaagcgtgcgtgtatgtgtatttatttaggctccgtttacttcccacacaaaaaaatttcaccatgtctcatcgaacgttggaacacctgcatgaagtattaaatataggttaaaaataactaactacacatattgcaactaatttgcgagacgaatcttttaaacttaattgctttatgatttcaaaatgtgttgctacagtaatcatttgctaatgatagattaattagacttaataaattcatttcactgtttactgatggattctgcaattagttttttttattagtgtccgaataccccacacgacactctatataatacctaatttaatgttgaaaatttaaaatttgggtgataaacataagcgaaaaaatgaaatgaggtcctgtaattaagcatgcttactaaatcaaaccaatcacccttttccagttcagtgatgaggttttttctttttacagcggtcaatgtatgctccagtactccgtacaaaggggcgatggcaagaagagggtactctacaactgtacaaagacagtagtgagacatccatcatcacggtgacggcttcacgggcaggtgggaccgatgcactaccatgatcagcctcatactggtcatatgccccttcctgtctcctgcaggcgcagcgagacgtacgtacgagaatatggaacctcgaggggtttccgatgcgccgcagtgaactttttaccacacagccttctactgtagttctcgcgaacagagtgcagagacagtcttgcacttgcagtgcagcattgaggctagaacacgctcattacttctgtttttaccttgttgcttagtaccgtagtacgtgtctacaggataaaaataataatttaaaaccatgtcattataatttttcaaagtttaagatatgacatcgatatctcaataacatgtagaacccatatgagtcaatgatatgtgggtcaggatgacatatctcaaatnttacaaaattataatggcatggttccaattttccaaaaaaaaaaaggatcagatctaagagcaaaaggtcaatagtgcagcccactactagctccaaatcatataaagccaatgtaatagctaattcacacaatagttgcttactatactatttatacctggttctacctgtcatacacacattatatctatctgtagcccactgcccttctcttttttttaatctctttaaaatatgtttatagccggtttatagcctgctattgtacatgctataagtgcccgggaggataggttaaaaaaaacaaccataaaaagcgagatactccaattaaccattgcatgatgattcaggactcgtattagaaactgacaaagccctggtgccaccgactgcatccatgaggtaagccagattccaaacaagggcccacatttgacccctcctctcatgtgatgcggtctggcaggtgggcccggcgctttctgggcaccggggcccactgtcagggtctggtctctttagcagtgcagcttttggtttggattagtgtaagcgcgcaccgagtctgagtaggacaaaggcgtacaggacacgtcgttctcacgagtgcgcgcgtgcagcgcagggaaggaccgaagaggacgagtctaagattcaaaaaaaaaaaaaaaaggacgagtgtgaaattggtggatttcgccaactcaagattaaacattcagggattgtcctatgactttgctgggatttaaattctaaaagcttaattttaaaattaacaagcatagtggcccgagcagattacgtggctagtatcattatattttctctcatataatagcatatagtatcattatattttctctcatataatagcatatatgttttctcattatattattcaaatatattaaaatgacaatataattttaaattctgcaataactttacaaaactactaatgtgtaatattcatattatattttatatatgtgttagttattaattatttttaatatcaaattttagttatttgtaaattatatatatatattcctatatggactctagagtcatcttttaatatttcttttttaaaattctgaattttctgtaaattgtatttctatatagactatatgttcttcttccaatattatttatttttatttctgaatttttattatttctaattgtatttctatgtggactctaaacttaactttcaatatttttaaatttttaatttcgaatttatgttacttctaaattgtattcctatagatgtattcctttattgaccttaaactcttcttcctatgtttttcttaatttcgaattttagtttttttgtaaattgtatttttatacggactctaaactctacttttaattttattaaattttagttagttttaaattcctatatggactctatactctacttctaatattccttattttttaattccgaatttctatttttttttcttaattgtatttctatatgaactctatactctattatttcctaattgtatttctatatggactctatattctacttctaatatttctaatttttaattctgaatttcagttatttcctaattgtatttctatatagactctataccctacttctagtattctttatttttgattccgaatttcagttatttcctaattgtatttctatatggactctatactccacttctaatattccttatttttaattccgaatttcaattatttcctaattgtatttctatatggactctagtctcctcttctaatatttcttatttttttaattctgaattttaactatttctaaactggatttctatatggactctagtctcctcttctagtattacttattttttaattccgaatttcagctatttctaaattgtatttctatatggactctgctttttctttttctccgattgatgtgagaatttctaggccatgaaagcgaacatggaggctcctttttctattcctttaataatataatagattttgacattaacgtagttctttttaatattgacttttaaattgctaaaaacacgtatgtaaaagttttatgcatatattattttttattattaataaatcgcatgatttataatctgccataggtaaccgacgatggagactttataatgcaattttgacagcagtacgtgctgtacttcgtagtattaatgtggagtactatttatggagtaccctgcactgtttccgatttcgtttttatctcgccgacatttcatgttgcgtaacgtgtctcggtatgataatcacacaatatttggagtgctcgatttaagattggcatttcagcagtgccaacttaattgtgaacgagagaaataccaaattattaacattttagtcctcatataaaacttgttttgaaacataaacccttgcaaaaaaaaattaacacataaatagaccatcctcgaagaaagttgaggtattgtctgagatgacatgaattttcgttgtcacaatagtactctattgtacgagtagttgaaaatgtgtacgggcggggtctgtttgggaaggagggacttattccaagttcttgtcacatcagatgtttggatactaatttgaaatattaaacatacactaattacaaaactcattccataaccttggactaattcacgagacttttgagtctaattacgccatgatttgacaatgtgatgctacaataaacttttcataattatggattaattaggcttaaaaaattcgtctcgcagattactctcatttatgaaattagtttttttattagtctatgtataatactccaaattagcgtccaaacatccgatgtgacatggactaaaaatttagccccatctaaacaccccctagctagcaag

SEQ ID NO: 16130 - DNA, 1875 bp, Oryza sativa
gacgcatgaattcctgcctttgcaatcgtcacagtttgctgttccataacttcatgaatagccactcggtcctgatcattcatcttatcaaactcatcaatgcagacaacaccacgatcagcaagaaccatggcaccagcctccagccttctctcacctaaccacaagaaatcgctcagacctataagaatcaaacaaatatgtatgaaacaagtttcaataattaccagtctcttgatcagaagtgacagcagcggtcaaaccaacaccagatgaaccccttccagtagttgaaatagccaaaggggcaatgttcataaccgctcttaggagctgggacttggcaactgaaggatctcctaccatcatcatgtttatatctctgcataccacataagtaagatatatttacactacaatcattgaaagcaagttacaacagaagcaatgatacgaagaaacagcactgaccctctcaagtgagttccattcttcagattcttctctacaccaccaagcattaatagaactactgctttctttatccacagatggccatatatagatggagcaagtgaatttcctagtaagtcaaatgtgtcatttctccttgatatttctttcatcctcttcaaatcctcccgagtatagacaggtgcatttgcttctttgttcataagtgaaacattgtttgcaataaggacagtcctataggcattgtataatataaaggatttcagaaaacaataaagtttagttcaggaaagtttaaggtcatagaactcacctgaacacaccactaacactgcccttgcttttccctggaagagccttgtaaacaccaacaattgatactcggtcacctggcttgcaagaatctactaggtcatcttctacaataatgtccactgttcttgggagctgtccaggggcagaattttcaggcacttcttgcatggagagtgtttggtgatccttgtattcacacatcccgtactcagtgaccaacaagttaccattttcatcctaagtattccaaattagcagcattacaaacaaaacaacaaataggtttcattgaatagagtagcaaaaggatgatcaaaagaatgtacccttgttggataaaccgaaccagtaggtaggcctacgaaagatgtgatgtccctgtattcacgtgagagagtacctccatagcagggcaatagtgaacactcttaacaactttcggccttactagtgaacctgaattttttaagtaaaatagcattagcaatatatctttaaatgattctgaactgtgaagtagcaggcagccaggcacagagtaatgatgtgataggcctaatgagctatcaacttaatatatggaatatgcacaactaaattgaatgatcagttgaacactaaactaaacatagatacacatagtattacttaatcaagcataagcaacaggtgaacattcttatccctaaatttttcgctgcctcagccagagctaatattcgcaatttctagtcacattcttagctatgctttaccatcactactaaccgactggactgtgatatatactttttccaccagcaggatcaactgtagaacattataacttaacttgaacttcttaaatcataaagaccacaagttaaacccagatcagccaactgcaaccggaaaatctatgaacaaactagattatgtccaaaattagggagattcaattacatttcgtgacgatgccctcgacgcagaccatagtcccgatgaaggacgacatgaggtccctgggcgtgaccctgtggaagccgaagggccccgagaatcccaccagcacgcgctgcccttccttcaagaacttggggtccaggt

SEQ ID NO: 16131 - DNA, 691 bp, Oryza sativa
cctcctcgttgacgtccatggctgctgctccggagacgggacgcgcgaccggaggggagggagagagagaggagcgggaagccgggaatgggcgggggattgtggcggcgggttcggatttgggggtagaatttggggaggaacagggcacgtcttggcgggaagaggcgcgcggtgtggcgggaagaggtgccctttcccgcgctcgggactctggactatggaccacgtgacgtgaccgcgatccgtgtagtaaaggagtattgaattgtactgggcctccaattgaattcctaatttaaggcccaattcaggaattcaaacagggcctaaaaggactccacattttcatgcatgggctttctgggtctcacggcccacattaaagctacggcccaaatccagtaaatttaacagagcattcatcgccgcggttgaaatttctctcgaaaccgcaagaacagtagatgtttgtacatacttacaacctggagtagctgctgaatttcaactttgtgcatagaactaactaattacacatgctgattattcataagtctgtactattacactgcatagctactactcattgatccagaagaaaaaaaaatgttgctaattaatacacagccttggtgctgaagctgccatgggtgcaagaggaggagtcggcggcggcggcggcggcggg

SEQ ID NO: 16132 - DNA, 814 bp, Oryza sativa
tgcatcaaagtgcatgagcttggatcgagaaggtccatgatgtgatcgatgctgacatcgtcaagtattacgccaacctgtggatccaatccagcccgtgtgaggtattggttcagtaagatcccaatcccaatgttgttgcctttgtttttcagctctgttcaatttttggcaacttctgaatgctatgcatgatttagagagtatcttgtggcctgaagaggattgctgtatagtttgcacatcgtttattcaaaatctgaccaaaaacacatattactactaataagtaaacttcattgcagtgttcagtaaattaaaaatacgaaatgttgttgcactaaaagaaattaatattgcaagtaggtcaggggaacatattgtggaaatcagtgtcaaattgttgaaatggcctcccttggtgcagcccctgactttctggagtcactgagataggagtatgaaataaagggtgtgttgacgcttccagagcagcatagtactgtgatacatgtaaaaaagtttggttgctaggaacctccagatggccctaacataacaaaaaaaaaacagaggaaaggtcagggatgataacaagagcatgcgattttggagattaattatgtgagaaatataccattactgtagcaggtggttgtgactgcatctcaggttgtggttctagcacatggtccggaacatcgtcatccttcttctttctcttcctctgcgatgatgctttctctaagccaccaacacgtctagctgaaccatggatgcccttttccttgagcttaatgcctcttggcttttt

SEQ ID NO: 16133 - DNA, 15498 bp, Oryza sativa
aacttgtcctttctactgtagtattataattctgggaacagttttatctcattgttttgaaggatagaaaatgcagggcaatctaatgaagttgcatttatcttgcattgcacgttctaaaaactgacgttgaagctgcactgcaagttctgaattttgcaatataccacaaagagttaactgagatggaagagcgtgaacagagagagatggaaatgaaacaacaagctgatcatgatgcaggtgcaagtggtggtaatgcagatgagcatagaaggtgagcatagtgcctgtcttcttaaaaatggtcctttaaaatggaaaagcatttgacactgatttctgcagtcctatttttaatgtaaagcaatgttctcataatgcattctcgttcctttttttcctcaataaatcttgctcgctttgactttgcaaaaaaaaaaaagagccacatttaactgacataatgtttattttgcactaaaatgcatccttctccattgacataaaagaactgtttgtagcatgaaaatgaaaggtcaatttcttttagaaatgaatggcgtgctatggaaaattgtttgtcaccatgcaaacatgtaaaaacatagaataacaactcaacactcaaaactgcagtattttcttaactgcaataagcttattttctgcaaattaaaatgaatgcagttttattctccagattacaatacatcgtgtttagctagttgctttcaatagtctcacatgtttttatcccctttcaactcctgccagttctggaaacgacccaatggatgtggatgtaggaaatgcatcgaatgatcaggatgttcctgcggagaggttactacatgacatgacctcaaattgcaaaatctgaatctttagcttaggtttctttttctcagctaattgtattcttcctgttatgtcatatttctgcagaattgaagcatttgaggcgattcttggtcagcatgtgttggcaaatcatctcgatcaaatatcaattgacgaaattgagcaaactgttaatagagaggcagctgcaccttacaatagacgtcaagtagaattcattttggaggtacaaacaagaaccggctatgctttcagtattgtcccaaaattaactatgagatgccacttatttttggttcagttgtatttagtttcatttccttgttttttcagaggatgcaagatgcaaacaggataatgatacgagatggcatcgttcggataatctaacttcaaaaatcatgtcttgcattgtggacaagctgattactgtgcatcatccttgtctttttcatctgatacttagccagtttggcattgcagaatgtctgcatctgcaccggaggttgatgtacccgtgtatcttaatttttaacagcgagatttatgatgatcatctgtgtctttgtactttaaattcatgtaccgtaacgtaacaattctcctgatctagtgatatgtagtccctgattttatatggtcaccattgtgtgctgatagatagtctggttactgtcttggaatggcttccaattagatgcaactgtttcttcagaccacctgaggttacaaactataaactcgtttcagaagaaagcaccggtcgtaaaattgcatatactacaatcagctttatttccttaacggttataaagctcgttttcgcctttctttctttttctcttttgatgaaaaaaatgctcttttttcacatttgccagactgcagccagacgatggtttctctgagaaacaccaaggcaagttctaggctataccgatttaatgatagtatgtacttagtacggtaccgatcaatcagcttcagtgtaaagtatccgtgttaccgtgtggaccgaggtgcaagcagacatttgcacagtttcacatcaacttcatacaacgagttcatatttatatagcttggcttgttcgattgggaatttgggagacgacttgctccgtggacttgcaaaggtgaagaagtactactactagttggcgtcttggcgatggccagggatcgagccgctgccgctggcatctgatgaggaatctcccggcaaatccgcggtctctgcagcttcccgggtgagtccgtgtacgcccaactccgccttctctagcattatcacctactccctttttttttgcttgctagctagagttcaggctcgcagtcgtcgtgctagtggcctcgccgctcgccggccgatcatacgcacggccgtcggtcggttagttcgctcgccgctctcgatcgggctctgtacgtcttcggatctatacatgctactgcccgtcccgtatgaattgtactgctacgaattttaacgtgccttctggttctggttcaagtcagggttccaaaatgcagccataaactctcggttatcacaggtaaaatttgatgattttaaactattctttttttatttattgtaatggcacttgcgacaatgatacgtgggtcatcattttgacgctgcacaaaataggtttcgattatttggcatcctggtccattgttattggctcatatggctccacatatcgtcgagtgccaatacaatgaaaatggtaacaaataaattgtcaaatcatcaaattttacatagacgcttagaagaaaagagaagccccctccgtacaaaactcgggaggtggctccacagggtctctcggaggaccgacggggaggagcgcggcccttttgagggggctccgaagatgtctgaagcgtggactaactggaccttcggaggccggacaagatcgtggccaacggattctagagggcaggcgaagagctgagaagaaaaggccggagacaacctctgaagagaattaatgtgagaagacccgacctaccacaacgcattcaatacctcaccaaccagctgacacactccgccacagggcgcaggtggggcggatgatgaggcaactttaggggcatgcattagcctgactggtcacacacaagatccacgggtttccgaatgcctgaattaattgggcttgatctcctaggtttttaccattctgccccaagggctagggccacctgccagttggggtgcccttgtaacattccatacgattcatggggctatataagtgtattccgcttcccgaaggaggcagaagaaacagaaatagagcaatctcgttttcactctagactctcatcaatctctgggtgtatttagtttacgtcaaaattggatgtttggttgaaattggaatgatgtgacggaaaagttagaagtttatgtgtgtaggaaagttttgatgtgatagaaaagtaggaagtttgaagaaaaagttgaaaactaaaccatgtctctgttggattttgttccaacttccaacggatcgcattctgaaaccctacttgaaacccggtccattttgagtctcatcatgcgtgtattggaatcgatgacaaaaatgactggtaaagaaaatagcaaaatcccacgcaaaaatggagatcgctataactagtatactctacaagtagcgttacttaattaacgtgcccgaagtagaaatgtacaaagattttgacaaacaaagggatggcgatcaccaacgcgaggccggggaagacgagcgacaccgcgccggcggccaccgcccaccaacccctcgccctcgaccgcccgaacggccgcagcatctgcctcaggctcgacaccacggcggtcagcatcaccagcatggccgccctcaggtacacgtcgtacttcttctgccctaggtacaccgcgtacgtgcccgccatgagcgtgaagctcgtggtcgccacggccctgaaccccttcgccctcctctctctcgcccccgccgatgccgctgccgccgccgcctcaacgctgccgtcgacgacgtttgcgccgccttcggtcgtccacgccatgatggcgacgttgagcgcgacggcgatggcctccgggaggagggagagcatgaaccaccactgcaagaactcgacggcgaggatcgtggccatcgagacgagcgcggcgagcatcgcgcggttgaggtggccggcgaccgcgacggcgcgcgccctggctgacgggaacagggtgcgcacgggcagcgcggtggccgccatggcgagcacggacaccgtcgaggcgaaggacgccacggcgaggtccacctgcgccggcggcgagcggccgcagccatcgagcgacgaggggtacttgaggtagcccaggatgagagccccttcgatggcgaacgccgccgtggcgccgaacgtcgcgagctcggcgctgctcttcatcgcctcctcgtaggcctcgtcctgcgccaccgcggccgccgtgaccgccccctccgtcggcggcaggtcggcgccggcgagcatgccgagcacgagcacgacggggaggacaaggatcacgagcatggtgtcgttgtccctgtccatgagcgcgacgaacatcccgttggtcgcgacgaggaggacgccggtgagcgagacgagcaccgccgacgagaggtcggcgcagcggctgcgcggggcggcgggcggctggtgcatctggaagtgcatcagcacgacggcggagacgaacgtgacgagcagcgagaacccgccggccttgaacaggagggtggtagcggcgcccttgccgatgtccttgtagccggagacgccggcgacgatggcggagccggtgatcccgatggcctccttgccgaaggcggtggctcgctcgacctgcgtgtcgttgcgttgcgggaggaggtgtgcatgtggctggttttccatggatgctctcgatcgttgccgtattcgtgaagacaccgtttggtttgtaactttggttatatagcaaacatagccaaactaaacggtgatcatcgcgtcgcgagaaggttcagagaaatagcagggaaaaacgaaagaaaagtagaaaaatggaggattctgctgccatagcgtttttgcagcggttgctgttcagaccattatgcctgcctgacagtaatttccccttgctttagaagaaaaagaaggcacactatatattgttattggagaagtttattcatccctagagggaacgcccctcgctaaaaaataagtcataaataattttcagtatgtgatatataactctaagaaaaataaaaatttaactccaaataaaacacgtaattttacaaccatttttttatttttgtttctaattgtatagactgaatttgaatttacgtgcttgtggagtagcatatcatagttatctatctttatgacttttagagtttagacgacatgtgtaaaacagatgcacgtcccctagagaaaaaaaaaatccatctctgttattatttggttatgttgatacttatctatgtgtatgtgtatagccaaaaatagttatatttgagaacggagagagtggatcttttactttgatatactgcccttgtttagttcacgaaaaaattttttttaggtgtcacatcggacgtttgaccggatgttagaaaaggttttcggacacgaacttaaaaactaatttcataactcgtctggaaaccacgaaacaaatttattaagcctaattaatccgtcatcagcacatgtgaatcatggactaattaggctcaaaagattcgtctcgcgatttccatataaactgtgtaattagtttttcattttatctatatttaatactctatgcatgtgttcaaagattcgatgtgatgtttttaggaaaaaaaatttaggaactaaacaagaccctataccaggccctatatggtatgatccttttcaacgttctctaatttttaatacagttcagcttaagtcaaggtgccctttataatcccttgggattgccaagtcatgtctttcctctcaaaacacacaaaagctcggcacgttaatctttagacactaagagataattttacaaaacaaccatgcagccccagcccacaagaaatgccagtcatcattgtaacaactctgtagtttatcaacatagctgcattcagccattcagtgctgaacacatttttcatttatcagaactgaacaaaatagatagtaccttgtacataactttctaagagaaggcagaaaagttgaaaacaatgttgtgtaacggcctgttttaaagtgaggatcggcttaactactttctcgatttccgttagtacaccttttaagttgctaaacaatgtattttcgtgtgaaaacttttatgtagaaattgcttttaaaaaatcaaataaatttattttaaaaaaaatcaaataaatttacttttaaatatttttaataattaatacttgattaatcgtatactaatcccatttctcgttttgcttgcggttagtcagtcatttccaacctttctttaggacggaacctatcaattagtttacatctccggcggtccagcctatcaattagtttagtcatctgatcatctggctctagcaatttggcacagacctctgtaatgatgtgatcatttatagtaaaagaaatggggaacctcaggctctagttcaagaaaaaaaaatctggttctagcaatgttgtgcaaggaaatttctatgaaaacaaccttcctaatgcaaaccatgtacagatctccgcagagttattgaaatttcaaagaaacgggatggctgaacgaaatgacagttctccgtctagaaggctgcccttcgtaatatactgggcgtatgtgcactggtgctatagttcttttacacccaatttgacactctacacggaaggattctcagttttgcattgagaaataaatacagtactaattaagttagcttataaattatttcattccttctgcacgcaatgcgtaaatctggattccttttaaatcaggtgagctgaagtgaaggcctctactatcatcacaacagaaaaagtgagaggtgtctagttagtagctgtagagtgtgtggacttaccaatagacctcctggagacacaatctgcattgtaagcctcgcctttgattccatttttgcttgcattcttactgcagtttccgtgaccatgagtccatgaccaggaagttctactagtggaataagtaaccgtgaccctgtccagaaaattctactagtggaataagaagagtgttattgtgttaccaaccactatgctgagaaaaggccaacatgccattatcaaacttgacatcggtcagatttgctgcttccgttgagatagccgcaattttcaatacaattttctactagtagttggccatcttgaccacacttgattaacacaagtggggagattaaatgcacaatagaacacctaaccttgatgcttggtagccttgattgcttctgtacttcaccttcactacattggaccgtcaattcatcatttggcagctcgatagagtttcctgacataacagaccagccgacacattttgtagtgctcaaaactgcacaaaatatacaacaccttctgtacatgcctccccccttcccttagggggggggggatggataagaaagatgaagctgcaatgttactcatttatgtaagaactacagataaattatttaatctatggccaatgtcaataggacaaaacgtgccttcgattttattgacattccatgattctagcttggtttgtgatggacattgaggggaataaaacaaaacattcacaattagtcctattttttctttgtggagatggtaagttggtgatagaggtgcatgatgcagcatgctgtgactactgttgatcaccttgccatgtccaaataatatccttgagtgatggcctaatgtcctctttcatcatcctttgatactccaatgtgtcaccattagttttcttcaactcaactaagagaaaaggagcaacctcagaaacctctgcatcaagctcaagtctgcccttccttccttccttcgtcgtagccaatttaagcactccattgtcagtttttgtaactttgagattcaaggctttggccagttccttcagcttcacaagtacagctgcagctggctttctggatgtaaacagtgactctcttcggccatatctttcaccaaataaacctgatagatcgaatccagtagagagagaaatgatgtcaaatgcattcaagttgtgtaggtttggtggctcttgatttctctcagaactgatgcagattgttgggccagagaaaggagcctcacttgtacaactcttctttcctgtttcgttgttcaatgcagatatggcgatgggtttcctgtaccaagcacttctctttatccttgagatagacatcctagtactaggatcaggatcaaggattccataaaggagctcctttagctcagctgaaaaatgacgagggcatctatactcagcctttgcgatcttcctatacatttgtatgatatttctatcatggaaaggaagataattggccacaagcacaaacagaatcactccacaagaccacacatccgcctttgagccactatagcctttcctactaagcacttctggagcaacataagctggagttccacatgcggtgtggagaagaccatcttgtctccttgattcagctaacgcacttaatccaaagtcagagactttaagggtttcattctcatccagtagtaagttttccggcttcaagtcacgatgataaacacctcggctatggcaatagtccattgcagagatcaactgttgaaaataatttctcgcagactcctcattgagctttgctctggccattttgtggaaaagctcgccacccttagcatactctaaagcaaagtaaatattgctcttggtagccattacctcgaagagctggagaacatttggatgcctcaccaatctcattatcgagatctccctctttatctgctccatgaggccaaccttcaagatcttctccttatcaatcatctttatcgcaacagactgaccagaactaagattacgagcataataaacctttccaaaggttccttgccccaattgtctcccaattacataccgttccatcaacacactcctctcttccattatatcagcaccgcgctgaaattaaaaatgggtctactatctatagagtgttactgactggcacatatctctgcatttccaggtgaatcactttcagtcttcaccaagatgctacctgcaaaatgaacaggccaagaatggaagattagtccaacatctataacgcaaatggctgcatcacaggtattatacgaactgggaacatcaagaagacatttttttagacgttacaattgtggatcgatggcatctaattccagaagaatccaattttctcgcatccgcggaaaaatgcaatacatttgatttaaaatcactaacgatccaataggaagggaagaggttcccatagattcagtacatggggtgtagctgcgatcaaatatcagaactgaagcttcaccgaacgagacagctacaactgcaatctatgatggctagaaactcctctgacataggacggaaaaaagaactgaagagaatatatctgtgtttgtgacaaaaatggatgtccaaatatttgatgcgagcaattgaatcgcatcgggatgcatatattgttttttggctccttccaagtagcagcgaaaagcaatgctcgatagaaacactgaaataaactgttcttttgtcgacacatacggcatgaaatttaatgcttatgcatcattttttttttcatattgagtataccttcctttgagtttgttttctgttctggtggcacttggccgtgagattttatgggacacaacccaaggagaaaaaccgttaatctcgcaacagaaaaactaaagagaagttcccaatcaacaagaactcgaatcaaatcgagtgaagccggcaacaatccaacaacagatgccctcaacggagactagcatgacagatcacaatcgaattagactcaccgactcagctgctgatcgaggcagatccgaggctccgagcaccggactccattcgactcgatccggccgcgcggcaagcggagggcgatgattctctgcatcacggtcggggaggatatgccctcttctcaccctgcattacacggcggctggcctgctcgccctcggcgaggatgagggcttctgctccaaattcggctgatcggctccctcctcgtgccagtcgccgctcgtcggcgtcgagcgggtcgccgcggcgatgtggggacgaacaggcagaggcaggggcagaggcgtttttccggattggcccctccacttttgggtatttctgcatctcgccacatcatgtgtgggatgggatgccgatgggctccactaggcccatctaacaatccaatcgaataggcccacatagagaggccttgttcttcaaggcccaactccacgtctccgtgtttaggcccatttagcagtcacacacagccacatgacacactgtgtcactgtgtctggacgacctctcgatccagagagagagaaaaaaaagggccaggaacactgcacaatcacactgttggtgaatgcataaatcaggcatggtaccatcaggccgtgactattcgtctacactgttgatggttggacgggtcggcggccggctggtgccaccggggttaggtccatgaacagggagcgccactgtgggagcgtgagttccccaggtttttaccgcttcgggagaggtttttaactcgggcggggtgaactccgctgcgcaacacacgcgctgcccacttcacagggccaaccgtacgtgcgtgtggtgccaattcggcctgcgtccatgtgtgtgagctcagtaaaactcaccagcaacgcaccaaatgtctgcagatcagcagccatggctgctgcagctgacctgctgtgtgtgtgctgcctgctgctgcacagctgcaggacatgtcgtggcacgaggactcatgcccatgttttcgcgcacatattcaaacattacaatcggactatatgatagacgacgatgagtcttgttacaaatgagaaatgtacacttgatcgatctgttgcatgccccgtgcaggcatgatgcgagaactgaaagcaccgggagataactaggagtgaaaaaaaaaaggggagatatatatatgtataacatggcaaagggactcggccggtggtggtactgtgtttttcagtttttcactaggtagccaagaatgatgtgcgcagggatcacatgaagaggcgcctggggcagcagctttcctcctcatctctcctctgcgccatcgcctcgtggtaggcccaaccaaaagccacactgcaatgccacagttttcagagacgatcacgctggcccaggccccggccccccagctgccgccgtgcatgcgccgtgccaccgcgcgcgcgtggtaggccagtccaccgcgccaccatccgtcacgcgccccgcgccccacctgcaccacccatgcacgcatgcccccacgcgcgcgcgcgagacggcgagagaaagagagagaaagagaggcatgccgcaccggacgcgatgatgcagcggcagagacgacgggcggacggtgcgcctacctgttgtgtcacggcgccatctcggtggtctcgtgcggttggatcgagacggcgtacgtagaggggtggggggtgtggagtcgtcacggcatgtagaggcggttgcggcacttgcagcgccaggcctcggggtagtactcggtggtgacgaggacgccgggggggacggacacgtgcacgggggagcacgggctgcagctgccgcacttggacgtgcaccgcggcgggtgcgaccctggccctcccgacagcagccgacgccccaacccgacgtggtagtgaccaccaccttcctgcatgcacacacgcaacaccagttaatttaaccagccatatgcgtcgtcgatctatgcgccggccaggccaccgccgtcgtcgtgagcagctgagattcgccgtgctgctcgtgttgatggttgtgcagggaccattgagatctttgcatatgtataagcatctatagatgaatctacatgaactgatgttcacattcatagttataagattgagacacatcctaagttgctactccctcattttagaatatagtaacctagaatcggatggaatatattctagtaatacgaaactggatatgccctttccccctgtctggatttgtagtactagaatatgtccaattcgattttagatgctatggttccaagatagagggagtatattttaagacgtacgggtggaggatggagtatatgatagggatctgtttgaacctttcagtcgtgtaatttgactcgtcatcagcatgtagtgtatcatcagctattcagctgctggcgtcaaacgactagcgaagcacagtgcaagatgcctagcctgtgaggagactgacacggtggttttctgctactaccgctgctctttagctagtaggggagatgcagaactcaccagaaggtcgccggaatgggctcctgctccttccagcctcccgaaatgatctgttcagcgagaggcaactgaaacgagttaactcctatcgccaaaacgtgctaaaaagacgtagagttctgtgcagcagcacaagcatcaacatatctctagtggggttcttctctcagatccgcagagatcagttgatacttgattctgcagccaaaggagatacaccaaacaccaaaaaactcgctttctagctagtacagaatctttgcacgcaaagagcaggagagctgccaagaatcagctctcaactctcaagtgctagctacatctcacacagcatatgcttaccggagtaacggcgcacgtcgtcgtcgtccctgccggcgccgccgcacgcagcgatgaagcagccggagaggcagcacagctgcagggaggtcaccgcaaccgccgcgaggcatgcgacggcgagtttggatccgccgctccatctcctcggccgtctcgacgaccccatgccgcaggccggcatcatcagctagctagaagttaagaaaacgagctagctagctctccctagcttccacttccaccctttggagtggtagtaagccagctagtggctgaggaaggaagagatcgagatcagcaaaatggcaaaggtgatggcggaagcggccgaccggctggctgggctggccggtttgttgcaggcgcggggaggaagaagacacggagacgaggggctttgtacgtgcgcgcgcccgtgtgtgggtgggtgcgcgtgcttgcctttcgtcttgctctcggcgactgtagctgcgtcacaactgggagtgcaggtgcagctcccccccctgagctatgtaggagacgagacggtcaaatttaatatcggcgagcacaaagtacggcgtagggtagctgcatttcagtcgttcacctaagtactctctgatctcgatctctatatatctccttgttttttggttctagaaacagagatggagagcgcgagcgtgtacgccatacgtgcccggccattgcggcttatatatatgtattttgcacatgttgttgacatgcaatcttgttttgagcagcatatgacacgatgtttgggaggcccggttttcacgtgattgtcatataagataatgagaatcagatcgattgtttcctgatgaaatcaggatggggccggcaaaaaaaatatttgctggagtggtgagataaaaatatgcagtataaatcattgtgttctcataaggtctagtgatggcgtaaaagattgatctggttatatattttgttggagatgtcaaatgaatatttataatctatatacttcctccgttttacaatgtaagaatttttagcattacccacatacatatagatgttaatgaatctaaacacatacatatgtctagattcattaacatttaaatgaatatgaacaatgttagaaagtcttacattatgaaacggataaagtactttaaaaggctccaatggtgatggtgacagtaatatatctgttaccacccactaattaacacgtgagtaaaattaacaatttatctgttagagaacaacaccctccgtcctaaaaaaacaaacttctagggataaatctagacaaatgcgtatttgtccaggttttttcccagaagatgttttttatggtaaggaggaagtatgtctttaagaaaaaaaagtcatccttaaaaattcaaaagataatcttcaaaaatttgctctctaagtaaaatacaaaccaagcaatctaatcatttatgtaagaactacaaataaattctctaatctatggccaatgtcactaggacaaaacgtgccttcgattttattgacattccatcattctagcttggtttgtgatggatatagaaggaaaaaaacattcaaaattactcatgtcttttcactgtggagaagttaaggtggcgacataggtgcacgatgcagcatgctgtgactactgttgatcaccttgccatgtctaaataatatccttgagtgatggcctaatgtcctcttacatcagcctttgatactcaaatgtgtcaccattggtcttcttcaactcaactaggataaaagaaggagcaacatcagaaacctctgcatcaagctcaagtctgcccttccttcattccttcatcgtggctaatttaagcactccattgtcagtttttgtaactttgagcttcaaggctttggccagttccttcagcttcacaagtacaattgtagctggctttctggatttaaaccgtgcctctctttgaccatacctttcaccaaataaaacagatagatcgaatctagtagagagagaaatgatgtcaaatgcattcaacttgtgcaggtttggtggctcttgatttctctcagaactgatgcaggttgttgggccagagaaaggagcctcacttgtacaactattctttcctatttcgctatttagtacagatatggcgatgggtttcctataccaagcacttctctttatccttgagatagacatcctagtactaggatcagtatcaaggattccataaaggagctccttcagctcagctgaaaaatgatgagggcatctatactcagcctttgcaatcttcctatacatattggaaaggaagataattggccacaagcacaaacaaaatcactccacaagaccacacatctgccattgagccattgtagcctttcctactaagcacttctagagcaacataagctggagttccacatgcggtgtggaaaagaccatcttgcctccttgattcggctagcgcaaataatccaaagtcagagactttaagagtttcattctcatccagcaataagttttccggcttcaagtcacgatgataaacacctcgggtgtgactttaagagtatcattcttggatgataaac

SEQ ID NO: 16134 - DNA, 5524 bp, Oryza sativa
atggtcttatccacactgcatgtgaaactccagcttatgttgctccacaggtgctcagtaggaaaggcagcaatggctcaaaggcaaatgtgtggtcttgtggagtgattttgtttgtgcatgtggcaaattatcttcctttccatgatagaaatctcatagaaatgtgtaggaatatcacaaaggctgagtacaaataccctcgtcatttttaggctgagctgaaggagctcctttatggaatccttgatcttgatcctagtactaggatgtctatctcaaggataaagagaagtgcttggtataggtagcccatctccatatctgcactgaacagcgaaacaggaaagaagagttgtataagtgaggctccttgcatcagttctaggagaaatcaagagccaccaaacctgcacaacttgatgcatttgaaatcatctctctctattgggttcgatctatcaggtttatttggtgaaaggtatggctgaagagaggcaagatttacatctagaaagccagttgctactgtacttgtgaagctgaaggaactgaccaaagccttgaaactcaaaggtacaaaaactgacaatagagtgcttaaattacccatgacgaaggaaggaaggaaaggcagacttgagcttgatgcagtggtttttctgaggttgctccttcttttctcttcgttgagttgaagaagaccaatggtgacacattggagtatcaaaggcaggtgaaagaggacattaggccatcactcaaggatattatttggtcattgcaaggtgatcaacagtagtcactgcatgctgcatcatgcacctctgtcgccaacttaccatctccacacggaaaagacatgactaattgtgaatgttttgttttttcccctccatccccatcacaaaccaagctaaaatcatggaatgtcaataaaatcgaaggcacgttttgtcctattgacatgggccatagattagagaatttatctatagttcttgcataaatgagtaacatggaagcttcatcatttctgatgtttctttcttccccatcccccaagttctgagcactgcaaaatgtgtcggctggcctgttatgtaaggaaactctatcgagctgccaaatgatgaattgacagtccaatgtagtgaaggtgaagcacagaagcaatcaaggctaccaagtatcaaggttaaggtgttctgttgtgcatttaatctccctacttggtgtgaatcaagtgtgatcaagatggccaactactagtaggaagttgtactgaaaattgcggctatctcaacggaagcagcaaatatgaccaacgccaagtttgataatggcatgttggccttttctcagcagagtggttggtaacatagtaacactcttcttattccactggtagagtggctggataagattgaaactcttaaattttctgactttggattaagtgcgttagccgaatcaaggaggcaagatactcttctccacaccgcatgtggaactccagtttatgttgctctagaagtgcttagtaggaaaggctacagtggctcaaaggcagatgtgtggttttgtggagtgattctgtttgtacttgtggccaattatcttcttttccatcattgaaatctcatagaaatgtataggaagatcacaaaggctgagtacagatgccctcgtcatttttcggttgagttgaaggagctcctttatggaatccttgatactgatcctagtactaggatgtctatctcaacttctcaaggataaagagaagtgcttggtataggaaacctatcgccatatctgcactgaacagcgaaacaggaaagaagagttgtgcaagtgaggctcctttctctggcccaacaacctgcatcagttctgagagaaatcaggagccaccaaatctgcacaacttgaatgcattcgacatcatttcactctctactggattcgatcgatcaggtttatttggtgaaaggtatggtcgaagaaaggcacggtttaaatgatgcatcaacattaaatttcatgttgtatgtgtcgaaaaaaaaagaaccgctgtatttcaatgtttctatcgaacattgctttttgctactacttggaaggagccacaaaaacaagatatgcatcccgatgcgattcaattgctcgcataagatatttggacatccatttttgtcacatgcacagatatattctctttagttcttttttccgtcctatgtcagaggagtttctagccatcatggattccagttgtagctgtctcatttggtgaagcttcagttctgatatttgatcacagctacaccccatgtactgaatctatgggaaacctcttcccttcccattgtatcgttagtgattttaaatcaaatgtactgcatttttccacggatgtgagaaaattggattcttctggaattggatgccatcgatccacaattgtagcgtctaaaaaaatgtcttcttgatgtttccgattcgtgtaatacttgtgatgcagccatttgcgttatagacattggactaatcttccattcttggcctgttcatttttccggtagcatcttggtgaagactgaaagtgattcacctggaaatgcagagatatgtgccagtcagtaacactctgtagattgtagacccatttttaattttggcgtggtgctaatataatggaagataggagtgtgttgatggaacggtatgaaattgggagacaattagggcaagggacctttggaaaggtttactatgctcgtaatcttagttctggtcactccgttgcaataaagatgattgataaggagataattatgaaagttagcctcgtggagcagataaagagggagatctccataatgagattagtgaggcatccaaatattctccagctctttgaggtaatggctaccaagagcaagatttacttttctttggagtatgccaagagtggcaagcttttccacaaaatggctagggcaaagctcaatgaggagtcggcgagaaagtattttcaacagttgatctctgcagtgaactattgccacaactgaggtgtttatcatcgtgacttgaagacggaaaacttactgctagatgaaaatgaaactcttaaagtctcaactttgaattaagtgcattacccgaatcaaggaggcaagatggtcttctccacaccgcatgtggaactccagcttatgttgcagtggctcaaaggcagatgtatggtcttgtggagtgattttgtttgtgcttgtggccaattatcttcctgaaatttcatagaaatgtataggaagatcgcaaaggctgagtacagatgccctcgtcatttttcgactgatttgaaggagctcctttatggaatccttgatcctgatcctagtactaggatgtctatttaaggataaagataagtgcttggtacaagaaacccatcgccatatctgcactgaacagcgaaacaagaaagaagagttgtataagtgaggctcctttctctggcccaacaacccgcattagttctgagagaaatcaagagccaccaaacctgcacaacttgaatgcatttgacatcatttctctctctactggattcgatctatcaggtttatttggtgaaaggtatggcggagagaggcacggttttcatccagaaagctagctgcagctgtacttgtgaagctgaaggaaccacccaaatccttgaatcttaaagttacaaaaactgacaatggagtgcttaaattagccacgactaaggaatgaaggaagggcagacttaagcttgatgcagaggtttctgaggttgctccttcttttctcttagttgagttgaagaagaccaatggtgacacattggagtatcacaggctgatgaaagaggacattaggccatcactcaaggatattatttggacatggcaaggtgatcaacagtagtcacagtatgctggatcatgcacctctgtcaccatgttaccatctccacacagaaaagacaggagtaattgtgaatgttttctttttgagaacttttacgatacgatgtattgctaatatatactggcagtataaatgatccaatggtatagattaatttgctttctccacttaaattgatttcagtgtaaaattaaaaagaatatttttttctttctactttagaatgtgttggcgttttgtgtttccatccactccatccaatctcgtcatcagcacgagtgatggcgtcgctccggcaaccaactctactgaccatgctaccgccagcacgcagcaccgtcgcctctctgaaatcaaattgattttttctcatcaccttctccgttcctcctcctgtcgccctttccatctgcccaaaatccttgctaggtcatttacatggaagtagaagcaaccatggcagttcacctgctgcaccataattagtttgatcagatcacccaacaaatcattgttatgattagttaattactgtggtttaatttctaccagtgaatattgctaccaccgagcacgtagccggtcgagaagtccttgttctcccagctggcgtcgcagaaggaccggcttttgctaatcctgattggattgaatctaatccaataaatcactagaaagctcttttcaattttctatcgaattcctagtatacccttttatatactgccagtatatactagtagtatattgtactataaaaattctattgttttccccctccatgtccatcacaaaccaaactagaatcatagaatgtcaatacaatttctttgttccctttatcttccatatatctatttgcttctctagttgtgtatccatgaagagacaacccctcttcttaattgtcactactctatttagctgatgtgtgtgaaaacagagatgacttatttagctgactaattgtcactactctatcactagggataaaaacggagcggatacggacggataatgctcataccatattcgttttcatattttttgccggatacggaaacgaatacggatagctcgaatacggaaacaaatacggactatctcgaatacgaataagaatcgaatatgatcggatacgaatacggaaacaaatttttctcggaactcgaaaaccaattcaacttctaatacaaacaaatatcaacatatataattagctcattttatataaaatgtagtataatttataaatatttttaaaattttaaataatattaataatgtggactagtgttaagagatgaactactattaaaatctaaaaaggtatattgaaggtcatagagttataaagaaatgggatatgtcttgtggcttctgcggatatccgaatagcactgttcaccggatatccgaattattatccgtatctgacggaaactctgataccatattcgtattcgtatccgagagaaaatatccgtatccgtatccgaactatccgctccgttttcatccctatctatcacacctccatgtaaacccccct

SEQ ID NO: 16135 - DNA, 30652 bp, Oryza sativa
aaccgggaaaaaagatgcctactatctttagtcccggtgttaccaaccgggactaaagatctatttttagtcccggttggtaataccaatcggaacaaaagatcgtggcggagagtacgaggcatctgccatctgcgagatcgaggaggaggagacgggcagccttatctcttcacctcttcctccactgaccttatctcttcatcccatatcttcctcttcctcctcctcctctcctctaactcctctccttccctcccccatcatcccttcctcttcctcctctctaacttctcctctaactcctctccttccctccccatcatcccatcgggcggtgggcggcctcgcggcggggcggaggcccgggcggtggcctcgcggcggtgggcggcgctgtggcgcggcggcggaccgcggggccttgcggcgggcggcgcgctggcggccggcgcggcagcggccaacagcctgtgttttttttctttttttttttaagaatttgtgatttggatctatgtatttgatttgtgtgtgatgtttgtgaatatgtgatgtatttgtgatgaattttgtagaagttgtgatgtaattttgttttaagattttgtgatctatttgaatatggccgatttggggatttgaggattggggataatttatttgggattttgggatgggtatagagtaaaatcaatatattaaaaacacaatgaagaaaagaaaataataatagagcaatcggatatagctagctaggctagctctatctttagtcccgattggtgttaccaaccaggactaaaaaggctctatctttagtcccggttggtaacaccaaccgggactaaagatgtatttttactcccggtttttttacccgggactaaagatagtgatctttagtcccggattggtagtcccggtttgaaaaccgggactacaggggggttacgaaccgggagtaaagcccctttctccaccagtggaaggcgaggttgggtcacatcagatcagctgcctgcatcctgctgcgtacgtactcgatcgggatcgtgtccgtttcagagagactgtgtttagatccaaagtttggatccaaacttcagtcctttttcatcacatcaacctgtcatatacacacaacttttcagtcacatcatttctaatttcaaccaaaatccaaactttgcgctgaactaaacacagccagaggacatatatcgatttggaaacggaaagggctcaaagcatctctgcctcctgctatagctatcactctatcgtcgatctacccggtctctttccagctgctcgatcgatcgatcgatctttcgccgatcatcgtggtctaggctcagtgcgtggtcaggtcatgtgcttcaacagtggcacatgattgctgtgttctctctcatgctgcttccgtatgcgtgtttgtgggagcgacacactgtacgccttgttcgtgccactactgccgtttgctattggagtacttgaccagtgatgctactactcgggcgctctagcttgctctacatttgtgtgtgtacactgatctcatcgaagagtaaaaagctcattaggatagaaaccaatggagttacaaagctgcaagagttaagatcataatgaaccatcgtattattggcaccgatcatcatatcataaccatcgtattattggcaacgacgttgagtttccgttgtcactatgctagggcctaacgtcatgtcctccgtttggatggccaatcaatggggagatccatcaagggcagccagcattaattgtgtgcctgcgacgtacgacgtcgtgttgggccacatgtcgggcagggaagcgcccggctgattgagctccgttgtgtccacctcttgcattcattgttgtcctgataatcttacgaaatttgttttttgtcgtcctcgtgtcacactgctcaaaaatcaaaccgtgcaccgctatatataactagaccataagagaagagtcgcaatgaagcaacgatgaagaggatggacacaatgatgatatatatgtcgactgtttaatttcaagtgaagtagctagattgcttgcattttactccttttccgtctaaaatatttgacgttggttagtctggagtactttattttcagtctctctgtaagcatatatcaaccaagcgaaaacacatgcattgatatatccaagaagcattgctgcatatgaacagggcacaccactatcactatacgtggcccatcagttaagaaagtaccaggtgctatacgaaggatgcatcatgcatgtggctgcttcatgtgagatttgtgtacatcgcagtggcgacgtgcgttcgttttcaagcagacagattttcccaaatgggccagtccatggggtcatggccactctaattcaaatcaccttttctgcgttgtgtgtggaactgtgagcttgtgatctgaagtctactcaagcatgtgtgatatctccgtccttgcccccactcgcaatcaattgattttgcaaaacattgttctattgcttggggcttgcttcatcagtcgaactgctgcacggccgcacgggcactgacgctactgagtactgaccatgcattcttctagttttttttctgtatatatattcccagcagaaagtatgaatgcaattaggaggtacagctctctgtagctaattaatcactcttacgaatacgtacagtaaatgtagcactgtagatatatattagtactactccgtcccaaaatataacaagatagaaccaaattagatactacatcttagaacgatgatctaaacatggacatgtccagattcataaatagtgggttatgtctaatacaatactaagttggtatattttaggatgaacagagaggacacaataattgaagattgtatttgagtgtgtagtagctaagagcctcattggctgccctaataagtcaaagcaaaaactaaaatttagattttcaaacttaatttcaaaactgattttaagatattttaacgtagtctttttttcaatattagcttttaaatcaataagaaaattaataagaacaagtacataaaaattttatctataaaataacttttattccctaataaaccatatatagccatataggcaaccaatgaggctaatactgcatagcctatatagctataggaggctttaccaattgggataagttcactttagtccctcaatttgtttccgagtctaaaattcatccctttatagcgaaaccggatacaacgcatcccccaacttataaaaccagtgcaaacgagatcccttaatagtattgtccccggttttggccgatgtggcgcatgcatggtttctttgactaggtcgttgtcctaggtggaaatgacaagatgattatgtggcagtttgatccaaaaaaaataaaagagcaagattgaaaataaaaaaattaaacaaaatatgtttggcccatatgtcagtcaaacacaaaacaaaaaatagtgggacctagacccacatgttagtgggcccacttctgccaccccaccctctctacctctatcgcctctctccatcgacaagccgaagatagctaagcgcgcgcggagaggaaggaagcagggaggctggcaagcaggatgggaagggaggaggcggggagggtggacttgggcagtggagagaagggtgacgatgggtgttggtcgaccaggagagagatggggctgggcatgagaaaggtggggcaccgacaacttcttggttctcttcgtctttgtcgtcaacatctcttcacctctatccttctcctcgcctactacctcttccttgtcatcccctctacggtaaggtagcaacggcagtgggcgatcagcaaggaggagggccacggcggtttgtggcgacggagaaggtgagggaggcgagggagccagtgagctcaagctcgccatcccttccacgttaaggcagcaacggcgaggaagggcccggagctttctgatcctgcctaaaccaatgcttcgatgtcgtcctcccccgatgcgccttcccttcttagccatcattgtccgtgggcccaacacatttacgactccaacctctccatgccacttgctgcgcgtcacctgaagatgggaagaaaggtgtcgatggcgaagggtgtgcccgcggtttgggagggggagggggtcaattctggcactggcagggcgtacggcgacggggatggtgctggagctgattgtggcaacgctgttgctgatgctcttaaactccgtgctagtgtttgttgtcgttgcagcgtcgctgctggcagccaggtttgcgtcctccgtgcggcatgatggtgtggatgtaccactcgccagcctccaggcctcctcctcctcctccttgtcctacttcttgcctcctccctctccgcacacactctctgccctccccactaacttcggttggcttcagctcactagcagagagaggagatagaggtagatatggtgaggtggcggaagtgggacccactgatatatgggtcccactaatttttttgacagacatataggtcctgtgtactttgttttagtattttagttttcgattgtgctcatgttcttttttggatgaaactgccacgtaagcgccacatcattgtcacgttggacgaagaactagtcaaaggaaccacgtaggtgtcatgtcagtcaaaactatgggataatactgctgagagatctcttttgcgcttgttttgtaagttgggggatgagttgtatctggttttgcggtcccaaatataagaatcggagacaaaatgaggggcccaatgtgttcttcccagttcgtgtccacagagcgtgaaggcccatagtgcgcgagcgtgcgcacctgacctgactgccagagcggctcgctagcccgtacattcggcctggcccatctaactgcctcgcgctccagagagatgggccgtctacgcattgcagctcccggctgaccaggccgctcacactttgggccgagccggcgaatcaggctggcctgggccaagactggtgagtactgggctatgggctattgctccttcaggccggcgagtttgttccggcgaactccactggaccaccttcatcatcgacgaagacgtgaaccagtgcacgtacgctcaccaagcatgctgaaaatgaagggggcgaagggggttgtgcaatcaatgaagatatgaattaatatcaagattgatttttcatatcctaattaaatatatgtattaatatcaagatcgattttcatatcctaaattccttattaagttgtttgattagttcgagtatcttacaagaccactggtacatctccttccaacaacatgtattctgcatactactgtctgctgatttgtaagattttttatcaagttttttttttcaccctcagaacattaccccgtttcccgatctaaaatttgaactcagaaccaggcaagaagccaagaacactctgaacacctgcacaccactccaagaatccgagcccaaaaccacgggcgagaaatgatgatccgtggatggaaggaccagctccatcgaccggggagcacgccattgattggccgtgtgcccacgtcgccggctctgaaactgaaatccagcaaagcgatcatatcgccagcgccagcgattcagtcggccacgatttggcgcagaaatctacgtgcccaccacggcagccaagccagtcgggccggcactgaatttttttggcgctccgatcggctgctgtgtctacgctgcgcgcgattcgcccacaaatctggtcgcatccgcgcccaacttgacaacttgctgcaaggattgctcgtctcgtcagatggctggttccaattcaaccgttccagccgcccgttgccgtagcctggacgactgattcccttctgttgcaaacaagtactccattccaatttccgtgggagcgcgggggcaggtttggctgcgcgtctggaacagcggtggacgcggtcgatcggttgcagttagcgaatggcttggtcgcttgtgacggtggattacacgttacagtaccggattgggtgccgctctgcatgttgatgttcccagatgttgggatcgatatcagattttacggaagcacaacgttctttccagtttcgctttggaacctgggatatcaggtttaaacaaatgctattgacaccagcagggtgatggaagcaaacccttccgtttaaattactggacaggcaggacagccgcagggaaacgaaaatgggagagaagcctggcaaaaagagatggaaaagaaaattggagtaaaaaaatactccctccatcccataatataagtaattttgactttttcttgcactgtttgaccattcgtctaaccaaaaaattttagaattattattttttttatttgtgacttactttattatccaaagtactttaaacacgactttttattttttatatttgcacaaattttttaaataagactagtggtcaaacggtatcttttatattatgggatggaggtagtagcgattttcgtagacactttcgagcaaatgggtggttcaactgcatgaataaatagggtttgatcgtctgaaaaaatgtttctttcttttgtagtgtacgtatttttcattatctacttctagaagttatgctgacattactggtactggttgcgtgcttagtatattatggactatggaccgtcgatccatcattgacattgctagttgaagtgctgacagagctaatttactttagtccatcatttcccgttgaatattatattgatactctctcttacaaatgcataagtactataattgacacatgagacttaagctcgctctgcactctgcagtagtatgcagcactgtataagtgtatatatatatactacatcattgtacatttctagttttctactctctcgagccaagaaattaaagaacgattccacgaaaagttagactcagaatctcatactctgatcccagacacttgtactcaatattgctggttgaactcaaccatccacgtagtactcaatagtgaatacacaacgtagtgcgtatcatgtatacgcacatgcgtatgtacagccaagcatatccatacgcttgtaataccgcggtatcatgcatccattaaacacacacgtaaacgttaaacctcacggtccctcaaccgacggactgtaaatctggcagaagcgtcttacctctctcgaggccgcgttgcatgttaatatagatgagaatagccctcaccgagacgtgtacagattggagacatattacatcttgcaatacaagaaagaaaaccaaaaccgattctatctctaaccatagatacgacatatacactacattaacatatgcgtgtatcattgtcacatgtacaaggactcttgtaattctaacactccccctcaatcataacttatctaagttaagattgtgtctaaaatttcttagcagctgaaccgacaatggtttagtaaaaccatcagcaacttggtctcctgaagatataaattttatcaccaattgtttcctggcaactctttctctgaaaaaatgataatccacttctatatgcttagttctggcataaaacacaggattaactgaaagatatgtagcaccaagattatcacaccataaacaagcagcttgagatgtattaactccaatttcctttaagaaaagtttgtatccacattacttctgcagttgcattagctactgccttgtattctgcctctgtacttgacctggatacagtagcttgctttctagcactctaggatactaagttggatcccaaaaacacaacaaagcctccagttgaccttctatcatccacagatcctgcccaatcagcatctaaaaaagcactcacaagcatagaagatgaatgacatattttcaaacccaaatcaacttaagactttatatatctcaatatcattttcactgatgtccaatgttcaactgttggactatgcaaaaattgacaaaccttgttcactgagaaggaaatatcaggtctggttaaagtcaaatattgcaaagctccaactatacttctatatttagttgcatcattttcacccagaacagtaccactataggctgataatttctctgaagtagaaataggagtactaactggtttacaatccatcattccagctttcttcagcaaatccgtagcatatttttcctgttttagtagtataccatcatgtaacttacgcacctctatacccaagaaataatgaaaattccccaagtctttcagtgcaaactcttgtctcaagtctgccaataatgcaatagctgccccttctgtagaacttgcaacaattatatcatcaacatagataagcacaaagattgtaacatcccctttattataaaagaacaatgatgtgtcagccttagatgccttaaaaccaagatcacataatttcatactcaaccttgagtaccaagcacgaggagcctgtttcaacccataaagagctttgtctaacttgcaaatataattaggcttacttttatcttcatatccagggggctgtctcatatatacttcctcctcatgataaccataaataaaagcattctgcacatcaagctgtcgaagacaccatcctctagatacagcaatagacaagataattctgatagtagccgctttaaccactggacagaaagtatcttcataatcaattccatatcgttgtttaaagcccttagccactaatcgagctttataacgatccagacttccatcagacttccttttgattttatatacccacttgcaatctataatattcttgccatgactaggtggaacaagatgccatgttttattattcaaaagagcaaataactcaatatccatagcattcttccaatcattattagctaatgcttcacttaaattatttggttccccgttagtagcaagaaaagaataccgcacagtcccatccgtgtataccttttcttttcttatccctcgttgaagacgagtagtgggtcgagtctgatgtcctgtctgttgtacatcttgctgttgttgtattatctgcatgtcctgctgctgcacatcttcctgcaaagacgtgactggtgatacaggcgactcaacaggcgatgatgaagacgacgtggtggcagtggcaggcggtgattggctctcttgctccccttgcgacgcaacactaacatcctcgtcagcatcaaaccgcacggcatcagaaaaaacaccatgggagtcctcgctattagactgattatttgcatcatgatctggattttctgtgccaccaggatcttctgtatttgcgccaaaaattcttgtatcacccgtatttatatgctccccataatctgaactttgcccctgctgatctgtaacattctcatatacaccattagaatgttcaggagtattaagcatatgatcattactatattcaaccccagaaggacttaaaaatgaaggtaaaagcaatatttctgatctcaacctagctcctgcatttgaatgcagtttagagaaaggaaaaatattctcataaaaaacaacatcccttgaaatataaactctgccactggatatgtctaggcacttgaaacctttatgtatgttactatatccaaagaagacacattgctttgagcgaaactgaagtttacgcttattatagggacgaagattaggccaacaagcacacccaaaggttctcaaggcagagtagttgggtttttgattaaggagtcgctccagaggagtatcatattgtatgactttgctaggtaggcgatttataagatatgtggctgcaaggaaagcttcatcccaaaatttaagcggcattgaagcatgagcaagaagagatagcccaacctctacaatgtgtctgtatttgcgctctgcggaaccattttgttggtgagcatagggacaggagacatgatgagagataccaatcttattaaagaaagaatttattttttcatactctcctccctagtcattttgcatagagatgatcttgcgattaaacagtctctcaacacgttgttgaaactcatgaaacttggaaaacacctcagacttattctttaacaagtaaatccaaataaatttgctgaaatcatctatgaaactgacatattattttctacccccaacagaaataggggcaggtccccacacatcagaaaacactaggtctaaaggatgactcgacacactagaggatttgggatagggaaactgatgactcttagcctgttgacaggcatcacacacacctaactcattaatttctcctaaacatgggagtttattgttgctaacaatcttttgaacaatggctaaagatgggtgacccagacgactgtgccacttagaataggtaggcttgacgactccgaggacttgcttggatgaggaaaacgaagatgttggcaacgggtaaaatccattgcggcatggccctctaagaagaagattcttcgtgacctgatccttgatggcaaagaaacgagagtgaacttcaacaaaagcattgttatcaacggctaatctatgggcagatatgagattctttttagccttaggaacatgaagaatatttttgagataaatattgcgaactggggtatgaatagtagaatgaccaatatgcttaatattcatacatgctccactcgccgtgtggatttgatctttgccattgtatttctcatgagtcgacaatttctccaactctcctgtgatgtgatcggtagctccgatgtccatgtaccagtttgtatctacaccataggaggcagctgctgctgttcggaaatccggaacgaagctttcatcatatctgtgccaacaatcagccactacatggttgatttttccacaaagctggcaggtaagacgaggtttgttgctgaaaccgcgcgcgccaccatttcctcggccgcgaccgccacgatcgccgcgaccaccacctccgcgcccgcggaaggaattggctgagttgctgttgaagttgctgttgaagccgccattattcttccctccatgcttggcgctgttgacagatgaagagctcgcctgctgccgcaatctagctctgctttcaaagcttagaagctgagaatagatttctgtgataggagccggctctgcccttccaaccagattggacacaacaggctcatagtcatcatcgagtccagcgagaatataagacatcatctcctcgtcatcaagcggcttccgagcagatgccatctcatctgccaatgatttcatcttcccgatatactctgcaacgctgaggtcacccttgcgagttgtcgacaacgcgagatgcgtgttcagagcacgcgatcgagactgggaggacaacatcgttgtgattgccctctaggcttcagcggttgtctctatattgacaacctgagtcagaatctcctttgataccgatgccaacatataacttagcacctgctggtcttcagcaacccaagtctcataggctggattggaaaccttgacaagcttatcaccttccttggcgtcaacttctgcagctggagcttgctttgcgccggtgatgtaaccttccatgcatgcacctctgattgctggtaagatctgtgtcttccataacaggaagttattcctggtaagcttctctggaataggttgtcccgagagagggttggcgccgctggaactagacgaactcgccattgccgtagatgcaatctcgtcgtggctatcctgctctgataccatgtaaatctggcagaagcatcttacctctctctaggccgcgttgcatgttaatataggcaagaatagccctcacagattggagacatattacatctttcaatacatgaaagaaaactaaaaccgattctatctctaaccatagatacgacatatacactgtattaacatatgcgtgtatcattgtcacatgtacgaggactcttgtaattctaacacggaccacgtggccggcatggatggcccaggaaagccgtgtcagtgtgtgtcaccgcaccggagtagtgtgtgtgagcgtgtcaccgcaccggatagatcagctagctagtagcgatccactcgatcgtaaatggcgcatccggatatgtcacgctcgcgagtcccaggcgccccggccccaacacccatctggctgctgatggccatccccatcaccatacggtgtgcgagtgacaccgccgtacgtgtcgccgctagctagcaggcgctcaatcgtgtatgcgtatatgcatcgcgtcctatgatttcgttcgaggtattatgtttttttcttttttttatgatttttataggcagtggttgaacaatctagcttttgagtaatagcgatctgcattacgtccttatgcaaatacaagtgatggtgattaatataattacataagctctttccttggtccgcttctgagtgttttcattatctacttctagaagttacgctgacatttggtactagttgcgtgcttagtatattatggactttggactgttgatccatcattgacattactagttgaagtgctgacagagttaattctttaatccatcatttcccgttgaatattattgatactctctcttacaaatgcataagtactataattgacacatgaaacttaagctctgcactctgcagtagtatgcagcactgtatatatatacatcattgtacatttctagttttctactctcgagccgagaaactaaagaacgattccacgaaaagttaactcaggatctcatagcgttcaaccctgaccatccacgtcgaaaattcgacgccacgcacacatctaccttttccaaccgaagaacacggagccaaacaaagcaacccgttcttcgtcagaactggcaggcgtggggcgaggggcacattgggagggggcatggccccatgcgacgcccccatacccatgcaacggcggcggcggtatagggagaagaagagaagatagcaactgcggtggcgtagggcgtaaaaaggaagatgccggcggcggaggaagagaaggtggtggatctagcacctaacttcatcgttgtcattgttccgcgccgcctccaaacgcaacagtgacagatcgacggcgtcgagctatgccgcgtagtcccccgcaagcgcgctgccgaactccgccgcgctgtccgtcgcaggcgcgtcgccgagctccccccgcgtcatccgctaatagtcggaggaggaggagaagcggcgccgcgcttgggctaggccgccgccgagctccgttgtgccgttcgttgcgggtgcgtagctcagtcgccagggagacgctcactttctctccgccaggcaaaattgctaggagaggagagagatggggagaaaaagtgaaggagaaataatgacgagacccactacaaatgatttgtattgtggagcatatgataaatacagttcttagtctacgtgttatgtagggttcggtataaatctgtgacgcactgctattgtcatcatactctgatcccatacgcttgtactcaatattgctggttgaactcaaccatccacgtactactcaatagtgaatacacaacgtagcgcgtatcatgtatacgtgcgtgcgtacgtacagccaagcatatccataagcttgtaataccgcggtatcatgcatccattaaacacacacgtaaacgttaaacctcacggtccctcaaccgacggaccacgtggccggcatggacgatggcccaggaaagccgtgtcagtgtgtgtcaccgcaccgggtagtgtgtgtgagcgtgtcaccgcatccgatagatcagctagtagctagtagcgaccactcgatcgtaaatggcgcatccggatatgtcacgctcgcgagtcccaggggccccggcccccatctggctgctgctgggcatccccatcaccatacggtgtgcgagtgacaccgccggccgtacgtgtcgccgctagctagcaggcgctcgagatcgcgtatgcgtctgcatcgcgtcctgtacggttccacacgcatacgatggcatcaccgcgcgcacacgtcgctctcccaagctagtaagccgatgcacctcgcgacgagccgctaccgctcgctactcgtcgcgattgcggcgcccccacgacgtcacgcccccgcgcatcctccccgtacgtacacgcaatcctcccgcgcgcgcatcttatcgcgtcgcgtcgcgtcgcggaaacgtttcggcgatttggggcggcagaggcgtgtggcctggtgttattacctggttaatctccaccacgtcgtaacgtggcgccgcccacgcgagaacggccgctttgctcgttggattagtagctggagcttaccgcgctccactaattaccagccgggccggcccggccggtggtcagaggttgacgccgctgctccgctgccgccacgtgtcgccgtggccgctaattcgcgagatcgtgcgtgtggtttctgatcaagtcaaacgttaatcccggctagccgcgggctaccaatcacgcatagattactcgattggattaggacggctggtaaatatgtaatcccaccgtttcaggttataagatattttaaatatagtcaaagtcaaaccgtattaaatttcactaagtttgtaaagaaatatagtaataatatttatattaccaaattagttttattaaattaataattaaatatatttttataataaatttatcttgggtttatttaattaaacttaaaagtttaaaagtagtttgagtttgatcaaagccaaaacatcttatcacctaaaatggagggagtattttatactactagtttaatccgcatgtgcgtgctcgatctatctatcgcgcgtgttcggtgacctgtataacttgatcgcctgtttacttttggggcggtcaaactgggatccttttcatttgcccggatccgtgaagaaaactttgaccgctacgtggcgttggatgctgatcgtgcgatccggttttggccggtttgtttattattctcgccttcgtctggcgtgagaatgagatgagatcgttcctgccttcattgctgccgtactgcgtgtactatactgtgtggaattcggcctgggcagctgttgattttagccatcggcggcggtggccgacgtgaatgagccgtcgccgccatattttgttcctttcggttgctacttctatagtaggattatgttgttgggttagtacagcgacgggtactgtaaatttatgctcgtttcttaatttcctactctacttttgattttggggattccttgtctatctgtttggatcaacgtgacattagatttgaatctagctagctggaaagctctcaaggcgtggtgcatgacaaatcacagatgtataacctatttgcattcaacaaactagtgtaacagtagataaagtttccccgcgttaagcaattcttcacaaaaggaggccttagcccttaagcttcgcgtaggcctgtgagggaggaagcatttagctacagtccttttacattcttcttttttttttttgaacgaagtacttttacattgtgttcaccaacagatcgaagaggaaatggtcacgagtgaccctgccgccctgcacacacatgcacattggcacgagcttagaggaatatttccaacccttaacccggccttctcataagaaagcattgcttggaagcgatccgatcaactcaaaaccaaacccagccggccagccagccccaagctgagtcatcaaacacacccccaccaaaacacacccatctcacccgtccatcgaccacaatccagcggtcagaaactcacaacatcttcttcagtctatcaaaccaaaaaaaaaaaataataaggagaactcaataaaataagcacacgatgggtagccatcacatcaaggtaaacaaaagtcaggaggattccttccaggttccacttccaaccccttcccagctctcgaacaactcaacgcgctaaacgtctctctcgcacgtatatatatactacggcctcacgccttcgtctccgcaaccatacaaatttttttctgagttccaattcgatttgttcgttcggttactgcaaaagaaagtcagcaacaaaatggccaacgcgaggaacgcggctgccgcgtcgccgccgccgccgtcgtcgtcttcttcgtattcctcgtcggcgtccgacggggagatcctccgatcgctgcaccgcctggcgagggatctggctgcggcggaggcgccggcgccgttcttggagacggtgttcgcggcggtgtccaggcgcgcgaagcttctcgccgcggtgttcgacgacctgctccggtgcgggaggctgccgcggtcggcgtcgctgtgcctgcgcgaggtgctgctcgtgctgcagcggttcaaggcggtggtggccgactgctcggcgcgcagccggatgcggctgctactgcaggccgacgaggtggcggcgcgggtgcgtgagctgcagcatgacctggccacgctgctggatcttctccccgttcccgagctcgggctcgccgacgacgtggtggacctcctcgcgctcgcgtcccggcagtgccggcggagctcgccgtcggcggacgccgcggagcacgagctgaagaccggggtgctggcgctgatccaggaggtggagagggagatcgtgccggagagggagaggctggagggcatcctcgaggaggttggcatcaacgacccggcgtgctgcagcgacgagatcgagacactggagcgggagatcggcgaccgcgtggcggagaggtggacgtcggccatgattgcgctcgttgggctcctccggtacgccaagtgcgtcctcttcaccgcggccacgccgcggccgatggacaccaaggtggatgttgacgacgatgacgatgacgacgacgccgagccgccgtcgccgccgccggacttccggtgccccatctctctcgatctgatgcgcgacccggttgtgtcggcgagcggccagacgtacgaccgggagtccatcacccggtggttcggctccggcaagtcgacgtgccccaagactgggcaggtgctggccaatctggagcttgtccccaacaaggcgctcaagaacttgatctcgcggtggtgccgggagaacggcgtcgccatggagagctccgagccaagcaagcccgagccagcgccggtggtgaccgcgaacaaggcggcgttggaggcggcgcgcatgacggcgtcgttcctcgtcaagaagctctccgtctccttctcccccgccgcggccaaccgcgtggtgcacgagatccggcagctcgccaggtccggcaacgacacgcgcgccttcatcggggaggccggcgccgtcccgctcctcgtgccgctgctccactccgacgacaccgccacccagctcaacgccgtcacggcgctgctcaacctgtccatcctcgacgccaacaagaagcgcatcatgcacgccgagggcgccgtcgaggcgatctgccacgccatgggctccggcgcgacgtggcgcgccaaggagaacgcggcggccaccgtgctcagcctggcgtccgtccattcctaccgccgccggcttggccggaacccacgcgtcgtcgagagggtcgtgcacctcgtgcgcaccggcccctccagcaccaagaaggacgcgatcgccgcgctcctgtgcctgtccggcgagagggagaacgtcgggaagctcgtggaagccggcgccgcggaggcggcgctgtcggcgatcagcgaggaggagaccgccgtggcggtgctggcgtcgctggccaagcgcggcggcgcggaggcgatcgtgaacatcgacggcgcggtggtgcgcctcgtggccgagctgcggcgcggcacggagtggtcaagggagtgcgcggccgccgcgctggtgctgctctgccgccgcgtgggcgccgccgtggtggcgcaggtgatgtcggtctccggcgtggagtgggcgatatgggagctgatggccaccggcacggagcgcgcgcggcgcaaggccgcgtcgctcggcagggcatgccggcgttgggccgcggcggagcaaaccgcggagtaccccgccacctccgacgtcacgacgacggccattacagcgtcgtgaaattccaccacggccacattgattaattcataggagcagataaaatttcgattttttttcccacgcacaacgaatgcttgtacaaaaaaaaaaattgtttcttgccttcaaggccttcacgattctttggttcatgggaccagtttgagtaattgataaactgcacatacaattatacaaagatccatttctctccaaatcttgtcacatatttctcttgtctcataagtaacacaaagagaaaaagagatgtcaccaacttgtacaaatgcttgtgaattgtgatcatctccacttcccccattctataattctttaatttctgtatccacatcgacgcaacaactgtacgatttcatttcattccagctaccaatatgaaagatgtgaacaaaagcatcacaataattgtgtagttgatggcttgcaactaggaggcgcccgtgatgagtgctcactcacttagttgcttgagctgccggggaccaaattgccagccattcccggccatccaatttggaggagaaaaaagaaaaaaaaagaacaaagcgagcgcacgctacctaacgaaacaacgaatatgttgctccgcgcgagagagtgcagcaaagcataaaacagcttgcaaattcaccggcttttgggcagaaaaaggccgtagctttagtgccagcaagagccagtgtgcatccatactgttgatagattgtaggaatatctcgtatctttggatgcatgtctcgctgttccggccattgacatcgcctgatgctggccatatgtgtttccctttgaccaaagcaagatggtagtattatgttcttctttctactactactacttgtctactagtagtctatgcaatgttaatgttaaaagtagtaggctcccatcggatagcataataagctaaaaaaaaccaaattttaaattttcgagcttaattttgagatatttttaacgtagtttctttttaacattggcttttaagtcacaaagaacatatttataaaagttttacccacaaatttatttttattttctaataagccgttttaacttattaggaaataagccaaacgatggagaccgtaaaggcgtctgctgaatttgattagtgtgacttgagacgggtgttgttcttcctcttgctgttgcgtggctggaaagatgggcgtgtggttccttcctgccagggaactaagtgtgtcattattggtgtaaacaatctaggttttgtttgttataatcatacggcgctatttaattacattgcatgccagtttaaacacggttgacagtagctttctggaccagccgtgttgtttcggatgctctctcttcgtctttaattgggaggttattctgaatcatagtatgtatgagtggatcgtatttggacttggaaaatttgtctatttggggcctgttcactttgatgttaaaaaaaaacttaccaaaattttagcattaccgaaattttggcaaatatgctaaaattttggcaacttaccaaaattttggcaggatttcttatatagttaccaaaatttggcagcaaactaaatgtaggtatttttttggcaactttactaaaatttagtaaattgaaaatggcatcaaagtgaacaggcccttggactgcacctgagcatggaaagggttgaagttagcctattaattgacaagtaaccagactgaatcaattcaggactcatcaggtggtgttattttctaataacaactacatacttttcccccaaatgcagcaacacaggactgcttcttctttgcatacttgtgctactattaaggagcatgtgctatttagacgtactagttcttgataagtcaaggggtgtacttgttgtactacatgcagctattgatcctcatcaatcgatcacttatgtcttccagattgatctgcaaggttggagaaatggagagagcttcatggttgccacagtgtttttctgttcggagagggagaattgttaggtgacatgtttaacacgcctgcattttgatgacaaggacaaccggcgttgggtctcctcttttaaaaaaggtttggtaatcgggtaaccatcgccaatggcatgaagcaagagagcaatataacgtcagattatgttcttcctcttcttctttttttttaacctggcagttggccagttgttacttgttactgaccaactgaggaaggaggtaaagatattttaaagtggcatgctaattagtaactggatgtcatgaataagaaatgtaggagcatgagaaacacatggaactggagttgtatgtttagttgtactatatgcttagggatattgcaagattagagagaacaaaaatgtttgaatatactccctccttccctaaatgtttgacaccgttgacttttttaaacatgtttgaccgtttgtcttattcaaaaacttttatgaaatgtgtaaaactatatatatatatatatatatatatatatatatatatatatacatgaaagtatatttaacaataaatcaaatgatacgaaaagaattaataattacttaaattttttgaataagacgaacggtcaaacatttttaaaaaagtcaacggcgtcaaatattttaggatagagggagtagttgattggatgatttgagaataaaaaaatgtaggattttggataaatgatgtgaattacattaaaaaaatcctaaaactatattgacttattcgttattctaaatggtcagacaggagaagtttccttagaatttcaaatctcacatagattcctgaagactaaagagagccactgttccaaagggcacatggttcccttccaaaagatgggcgcagtgcctaattgctcagtgcagttcagctggcaggaaagcaacgcagcaggcataacattagacggatttgtatgatcttcagataccaattcagcatttcagttcagtgatttatttataactgactgtcacccaacaaaatctcgatgtaaagcaaatcagaagtgtttttttcttgttgacaacttgacattatgcatcatgatacagacatatgtttttaggtatcatccagaggatttctaatcggtccattcggcttccagaaatttcaattcagatcatgttgttgtgatctctgatctgtactccctcttgtacagttgtactggctgtttgcttattcaaatcttcagacatgcagtgcaccactgtcatcaggtatccccattcaacttgatcctgcagaccatgaaagtggcagatttatcatgactatatcagatttcaaactcccgtatgcaaacaaggtaccgcactcgcaaaaaggaaaaatcttaatgcagtgattcgaatcacgtcctgttctccctctccctttgcgtctctgcttgttgatattgatgcttaatgctatattatacgctttggtatctcccagacgatttggaaactggaatcaggccattcggcttagggatttcaatgatcagggcgtggattttttcgaaaatgctgcgcgtcgggcgccgagcggctgaagaaaaaaatcggacgcctccaaccacgtaataagtattttaaatagctttaaaataatttttcttctcaactaattatccaatctacgatccgatcacaccgttatattcgttgcaattaaatctttataacaagatcacacatgattatatttcgataaaaaaatattttagcttttttattgatattgttttagaatgctgcatatggttttttttatgtttcgaccagtaattttacaatgtttcagctagtgtactcgtgatgtttcactatgtactgatcaaattttgcagtggattttaatattatgggacgcgtcgttgcaacaaatcacacatatattttggaaactctctattaagagaatttgtttcttttttttcactaaaaagtttcacctagtgtactcacaatgtttcactttatatagatctaatgttgcagcaaactaaaacattccattgcaacaaaaaaaattcacatattttggaaaccccctattaagggaattcgtttcattttttgttccaccgaaaaatgtttcacctagtatactcacaatgtttcgctatgtatggatcatatattgcagtgaacttacattcttttgctatttgctgaaacattgttttttatataaggtgaaacaacacccgatttaaacgagtgaaacattttcactctacttagtgaaacaattccgatatacctagcggaacatcgtgtaatctattatatactaaaagtccattaaactttctacaaacgctcctaaaccgctacatggctcctagaaacactcccataccatcacgtggcgctctaacaaattatagaaattccaagaaaaaaacaaacatccgatcattgattttcacttcacatggtggacccatcgttttacaacattagatctatcttatatattaaaaatatattcaaaaaacccatccatatcccctccgtcatgtacatacctaggtactcctctctcctttcttccatttataggaagcaaagttttttatattaaaatatcaatctattattatatagtaaaaatccattacacttcctataaatattcttaaatcacgtggtgttcctataaatactcgtacgccgtcacatgatattgtttaatctcacggtcgattttcatttaaattgatagatccgttattttagatcactagattagatgtattatttaaaaaagtaataattccctcgtgtatattgtgggccggaatataagaaaccaaacaaaatactccgtgtacgtacgtacgtacgactggaaaataaaagatgaagcttacctactgttcctagaagaaagaaatcatacgtacggacttacgataaaaacgataaaataaaaaaaaaacatacgtaacatacgtacgtactgccattgaaaaaaaacaatggtctataacataggattttctactatttaaaaaataaaatataatactctataaacttgcgcaaatatatgtagttaaaatagatcttcaacaataaaaaaatatcctatcattaaacatcatttaaattattttaaaattatatatctaatgtgtgatcaagtcggattcctataattaaataaatattgatgtatatatacctaaatacatcataacacatgagaccgacatataataaataatgttatcataatattttaaaggaaaaaggacaaagtacccccgaattattatggtcgaccgaattacccccataaacccgaaagctacacatctttcaccctcaactattaataccgaacgaattactagttgtcttaacccggggtggttttgatcctacgtggcagtccagtcagtattttctaaaaaaaattggtgggacccacctatcatatctccccctcccctcttccccctctctcactttcttatccctccacgtttgtcaatcgacaaggctggggacgacgagcggcggggcgaaggagtatgagtggtgagtggcggacgcggctaggggcgacgagcagtggaggcggctcctcctcagcctccgctggtgcgcacctccttgacgaccgcgtggcttctccacggcctccaccggcacgcgaagaggacaacaacggcggggcggaggagcttgagtggtggaggcagcgagcggtggaggcggctcctcctcggctatctcagccgccacatgcgcactccgacggatgccatcgtctccatcctttttgtcacatctcatcatcacatgacagtcggcggagcgagcaggtgcgctggtcctccattgccaggttcggttgcacccccgccatcgagaactcccctaaaaaatgcggtcgcagctccatctaccatagcatgccatcccaccacgtttcttaatcgatccccaccaccaatgcctctctcctgacgagacaaaaagcaacaatcaatcaaagaacaacgaggtggatcaatcgtgagagcaagagcagggcaatagatgaaggagaaggacaagagagttgaggcggtgaagaccctgcagcaaggggagggagaagaaagacaggctggggaaagggattgaggaagagagggagagataggggagaggggagagagatagagagggtagagggtgtgacatgtaggtctcacctattttatttttttaaaaaaataccgactggattgtcacgtaggaataaaaccactccaggttgagttagggggtaattcgtccggtattaatagttgagggtgaaagatgtctggtttcgggtttagggggctaattcatacttttttctattttaaataatttcacatcatatttcaggtgtcaaatatcacttgatgactatatagcgctaatttaaatttacgtatgtaaaataaatgaaaataacacaatttagttgtgtatttttaagtaaatctgatttacttttaatttgtttgaaaacaacacaattttggttgataatctgtttgattttttacaactatttcattagtatctgataagtgggaaacataaatgttacacatatgtaaaaaatatgaaaaatattttaagccaatgatcttgctataatacaaccacttaatccatcataagatttatggtcatatatgtatgtttttgtctttttcaaatagttttgataacaaatgaacaatcaagtaacatgcacaataaactatttatgatatattttctaatagttgaggaattcctacacatcagacataatttgatggatgtatgttatacaccctattgacgtgtctataaagtattcttcaataaattatttattgtaaataagtttaggaaaatagattcattcatcaaattaattagtaaaagtgtctcatataattatgaacaattaataggcgttgaaaaaaccaaacgcaaaagtattgatatttatcaaaatataacaaataatatggtgctttggagattatcgtggtagcatttaaaaaacatttatcctgattaaaaaaatcacatatagtataaatagatatgaaacaactccagtattccattattattccattatcatgacacgtgtttaaaaaaacatgtttaaaatagagtcaagatctattttaaaaatatcaactacacgtaaacattcataataaaaaatcaatcaacattaaataagtgcccgcgcacacatgcgcgggctactttcctagtatttaaaaataattcaataatatgctaattttttttcgtcggaatataccatgtgtggttttgttttgaagatttaattgcaacgaatttaatgttgcaatcgaatcatgatttggataagtaatttaagagaaaaatcagttttaaagtagttttgcacgtaaatcgggcgctgacgtcagcgcctgatttccctagcccggatcggtaggcgcgtccggattttttgacctacttgatccatgcgtgtttgcatctgcaaacgagttgattaagattatcactcggccacgtgcaccacatggctcgaacacagaatatagatgcagaggaaccaaaactggggaagacattaacgatgtaatcgtcgatcagcttccaaattcactgaaatttggcgacgtaagttcagagaactgactgtacaaaaagcctgaggcataactccggtcaggattcataactgtacaaaagttgattttctttttttttttttgggggggggggggcggggagggggggacagatgaagtacacttctacaatatcagcaaactagtttcaaaaccagaattagaactgcagccggtatatttcagtatttgttcgtgccgaaaagtttagtgacatcgtctaccgatacgtgggagcagctagccttgcagccggagggaccaggacgagctcacggcagcacgggcaggtgcgtctcgtcgtcagccactcgtcgacgcaggcggcgtggaatgcgtgccggcagcgacccggccgccggcacctctcgccgtcgcgcatctcctccaggcatatgctgcagctcctgccgccgccgccgcagtaggcgaaccacggcagccgccgcagctggtctggcgttaaaccgtccttattgtcgccgccaacgtcgtcgtcgtcttcgtcgctataatctgtgtaccaggaatcagagtcgtaagagtcatcgacgacgccgtcgatgtaggtgtcgtcgtcctcgccgacggcgcaccaccaagggaggaccaacatcgcgactccagcgacggcgccggtgaagagtaacagggagaacggcatctgcacgaagagaaggatcagtttgcgtatcgccgaaggcgaagcagcgtcgtgatcggatttattggttagcaactttgcattgtccgatatcggaattcgaaaccgaccatgaacatgaagaggggttgcgaatcagaagggaagaaggatagggaggaggagaaaggaacggggatttgttgagttcgaaggataaaacgacggcccatatacgcttaggtgggcctacggttgtagggccctttcaccatcttcctctttagtgggccgaggccgaatgggctggcaggcggcgacgcgagaacagcccaatcttttaccgacggcgaccgacgaacgttcccgtgtgcgaacaaggcgccacggccgcgttctcacctcgctcactggcttctccggcgaggtgatgcgagaatttttcttaatgcagcggggcgtactgcgtgttctcccccgaccttttgcttgctatcactagagattttctagggatttttttaaaattttaatatctcgaatgaatgtctctttgtttatctataaatcgtctaaatagttatagaaaatatttaaaaatttatagcatttttacaacacatatatcatttaaaagattttagatccaaacacaactcacacattgaactaaaaaaaagataataatgtcggaaaaaaaccctagggttcagggctttaagtttggaaggtggtagaggggatagggaggtggaagggaggctttagaaagatggtcttggacggctattggacctaccatgcagagccgcacgtatgaagcagggtggcaggcaggatcaacaacaatggcattggatctagagcggttaggagaaaagggggtgagaactgagaagggccagtgtggcgggcctcacattttgcattcccttgtagagtggggttttaaatgtttacatctctgcgacaaagccccatgaaaaaaagggctaaatgagaatgatgcattgataaaagtgaaaaaaaatattccctccgtcctaaaatataacaattttggggttggatgggacacatcctaatccaatgaatctagataaaagattgtccaaattcgttggactaagatatgtctcatccaattctaaattattgtattttggaacggatatagtaataatgtttgggagcataaaagatggtcaaagagtgtggtgctaactcaatgggaagaatcatttgttcgttcgtctgtactgaataacatgaacggaacatatgcatcgcattgaccatgggaaaaattccaaaaccccccatcactgtagacgtcaccttttactccattttgattagccatcacgtacccgacccctagacgacctgagcgatcgggacaacctcacgtcaaaccgcaacccgggggcacgcacacacacgccgcggagaccaactggcgagccatgcctgacgcgcgcgcgcgaacgtggcggccatcctacgaacctccaccgtattcccacgcctcgtctcgctcccggcgtcagccgtcgacacacgcttggcacagcccacgaccacacgaggagcaaagcaaagttaagaaagcaacgcgacgcgacgccctggcccctgcatgcgtgccgcgcgcgcggctgcgggggtttctcgcggtagcgtacgcgcgtcctcccggctaccagctgccgcgccgcgcgcgcgctttggctcagaccgaatcgagtcgcaatcgcatcgcatcccgcgcaaacctgtgtgtgccggggtggtgccgtacgtggtggtgagcgcaacgcaagccgcgcgcgtttgcggggagcgatgtgcatcggagtttcacgggaaaaaaacacgtacgtcacgtacgagaagcggtgtgcgcgcccggtggttcgttcatacgagcagcgcacggggcaagcgatcgatcgaactccgagggagaagaaaactgtcccgagtctcataagcgattctcaaatactaacagtctaactgttgtcagtttgttaaccccgtttgagcacgtgagtgtgtatgctcagctcgtatgacacgaccaaacccggccggagagataaagaagagaggatgcgtggcacttattacgacctgacgttgcaaaaggcacctttgaaaaatcgtgtccggaaatagtaacgtgcatgggtttttttctgtgtcagttttgtcttgcccgtgcaccaaaacacaagagttaatacagggtagtctattgtgtgtctactcctagagaattactgtagataataccccacctcaaggtgaattaaccatcgcccgcctccatatgagttgtgacaaaataaaaaggatatatgtaatgtaactagctagttgtcgaacaacatcgatcatcatcatctcgcgcagtcggccccaagatgtgcaacaagcacgggatattaccggaggacgctggttctctgtgtgcatcatttcggactcttaagcattacacacgtacgtcaagaatgcaacctgatcaatagaatgcttccttctcaaccctatttctcacatcgtacttttaagctaaagttttgttcgtgaccatggaagccttgggtggactgacttgatcttccattgattacctgaaaaaaccatccatgttaattggttcctgtctagttttgtcacagcatatcttaggtgtgctacaattttatacatatgtgtttatcatacctcacgtgtcgtatatagactcggtttctaattaaacatttgcatacttgtttgttgtgacactcgttttctttgccacatctttttatgcatggtgggttacactttgctgaaatttacgtgataaacttcaatatgttaaccaaatagctctagataccgcggaatagacgtgagtagcaataataaaaaaatagacactgatatttttaaatggataacgttgtagaatacatgcaatatatgaactcttaattctaaaatcaataataaatgcaaaaaaaatattatttgatatataaacatacaattaatagtttattaaaagagtgtgtcatgcagatacagtattatatcgtttttttatgatataggagtatgttgaaaaagactacaataaaacatgaagaacgagatgtatagagaacacattcggaggtacagaagggtggtgtttttttaggaaataaaagtatggtattgtgtgtgtagtgatgtgcatgtgtgtgttgatttggccgtgtaataaaaaaagattatataaaaggttattaaatgaatgcctttttatgaacaaagaaaatgaatgcttggaatagtagcttatccggtgatcctactcaatgtagtcatcccgtattaacctttttctgcaaaaaaccatgcgagccccatgttgtccagcgaaccaggtgtgctgaccggacggtatggcccaccgttcagcgagacaagaaaggaacaaaaagagcagcgaaacctcgctccgcacgctctctcccgccgctacttatcccgcgcgggtcacggcgtggtcgcgctctggcctggccccccattcgatctctccctgctcctccactcctcctcctcgtacagcgccgaagaacggaggcggcgccgccgccgcgccggcgagaggagagcgagggaggacatgggccggcggaagttcaggctctccgacatgatgcccaacgcgtggttctacaagctccgcgacatgcgcgcgcggggcggccgcggtgcaactgcgatgcagccgccgtcgtcgtcgtcgttgatgagggggagcagggcggcgcagcagcaggcgggcacgtggaggctggggacgtcgtcgtcgtcgtcgtcgttgctgccgcacagggcgtcgtactactacaccacccgggacagggaggtcccgccgctgccgccgccgccaccgccgaggggcgtggatgatcaattcccttccctcacgctgtcgccgccgttgccgacgaggaacagca

SEQ ID NO: 16136 - DNA, 3144 bp, Oryza sativa
agctcgtactagcgccgtccgacgaccacgacggctgcagccaccaggagccgccagtggccgatgcgtccgggagctcccggtgccgtcgcgacatgttcatcgggagagatggcggccggggcgtggagttccggcgccgggcgacgacggtggatggtcctgaggaggacgccgccgtcgatgtcaaggtgatcacgtcggacgcggacataatcatcgacctcggcgctgacgacgacgacgacacgccggagagggtgctccggcctgtcgtgaccaggcccgcgaggagggagctcgactggtgcgagccggcggaggtgaagcacgtcgacctcgccgagctgatgacaccgagagcgagctctgcctctgcctcctcggagaagagcatcagcacgggcaagccgaggcgttcgtccgtgtcgtctcgacgccgcctcaagacgcgcaccaacagcccgcgcctcgccgcgtgcaggaaaggcaagccgacggcgcgggcaacgacgacgacgccgacgcagccgccgctcgcgcacagcttcgcggtggtgaagacgtcgtcggacccgaggagggacttcctcgagtccatggaggagatgatcgccgagaacggcatccgcgacgccggcgacctggaggacctcctcgcctgctacctctccctcaactccggcgagtaccatgacctcatcgtcgaggtgttcgagcaggtctggaccggcctcgccgctgcctgtggcgtcatgccatgagaaaacgccaagagttcatcgctcaccaaagcctccatgctcattgattgctgcttggtgaatcgctgaatcttgccatgaattattatagtagagtagtttagttctttgatttctagtagatgatggttaattagcagcaagaaattagccataaagcaatagaaataaaatcgatcgaaaagtttggttcttttcttgctaggtgatttgcctgattctcctcgcctgtcagtttgctttcctcagtgtcacactgactgtagttatgagctgcactgcactgcatcaccgctagttgattaatacagctaatgatgaatcaccagtacattttcagctactgcaaatcttccaaggctgtccattttctgaaaaagaaaacgaaaaatacattgtcttagcgtacgttctaaacatcaatttggtatattttgtgcaaaagttttttatatagaattttcttaaaaaatcaaatataaatgcattttttaagtttgtaacatttaatactcaattaatcatgtactccctccttccctaaatgtttgacgccgttaacttttttaaacatatttgaccgttcgtcttattcaaaaacttttgttaaatgtgtaaaactatatgtatacataaatcaaatgatacgaaaataattaataattacttaaattttttgaataagaggaacggtcaaacatttttaaaaaagtcaacggcgtcaaatattttgggatggtgggagtattagtggtttgacttgtttttagtgttgccgacaatcttagcccaacctctgttccgaacaaagccttaagccttgtacgatcaggtgctcaggacagtaggctgaagtaaagcatgctaggtacaggtgctgaaagtcaagcaagcaactgaatgtctggatccaatccgccgtagcacacgttttgacatgattaaccgacgtgtcgctgttacttctgacatgataatatccaagtgatttgtacggcgtcagatagtaatatgtcggcgatcgagggtagtgtaaccacgtctcgaaatccttgtgttcttgtggatgttgaacgccgtagcagggatcttggtgaccagttacaagtcaccaactgttgctacaagctgggagatgtagtggtagtaggacgacagggatgcagctgcagcagctagctcctgacaagaaaagcctagcatgtagcaagacaagtatcgagcaatcatgcctcatatgcgtttcaactcgtacagggagtaacctgtgtagcaaatggagatgccactactgactaggagtagtaatttgcttagctaatgcaggccaagtaggagcaattcagctcaaatcatttgagaagatcatatctgtgattgtcctcatggttagtatatatatgaaatgatcgagatgccattacatattgatcaaaacatagggacccaaggcaacaaaggagcagtggtgaaaaacctgaaattgaaagattcttttcttttgtgtggtcagaaacatggggtgatactccttgaatggtccaaggagtagccccttgtcgagacactggagtaagcaagacgaggccgattttggaagcccagcggttgctgatccactggcaatgctggctgcagcataagaacggtaagtcagtaactaactcaagatttgtgcaactgcctcacataattggtaggacatactctgaaggtttcaggctgaaattacccaatccaattcattcatactaccacaattgaccgttggaggaggaatgattttacattcattaataagaacatactagggaatactctgaaattttacacacacacaaaaaaaaaacaccaagtacgtagtacaataaaatttctcttggagaatacagtatatgatatttgctgctaaattgattcagaaaaaaaaaaacattgactgcactaggaaaaaatagattcagagatcgtgctaaagtccaagaaggaatcaaagaacctcttcatttctgcaagtcaattactacatgttttctttttttcacttcagacatactgctactgtattaacgtatccacaatgcagaggctggatgtaaattttgttgtatctaaacatttctgcaagctgcatgtctcaactctcaaagatctcttgcccctcgtgtcccctagccaaatcaccccgtcacctcacactgctccatcttttgtcccgtgctcttggctgggctcccaggtcaacacacatgtacgtgcacaggagaagctatagcctcctgtgatcttcagatactgccctgtgcctgtgtctttctcgcccagagtgcaagacagcaaaggcatcagctgctcatgcaatgcaggtcactgttggccg

SEQ ID NO: 16137 - DNA, 12487 bp, Oryza sativa
aaatggtatattcaaaggtggttagaaaaacatctttctcccctttcaccataatgcatgacgttgagaaagagtacggatatgagatatcgtacgacaaggcttggagggcaaaacagaaagcattggagatgaggtttggaacttatgaggattcttatcacaattttcacccactattggaggtgatgcaggcaagaaacccgggcacacacatggctattctcgatgaggtgaatgaatatggggagaatgttcttcgtcgggctttctggtcatttgggtgcatgatagaggcctttagaaattgcattcctttgctctgtgttgatggcactttcatgacaggcaagtacagaggaacaattctaaccgcgatcggagtcgacgcggatagccatgtcgttcctgttgcttttgcatttgttgaaagcgagaacacatcaagctggctatggtttttgtggcacattaaaatgtgtgttgttgaaaacagaccaaatgtgtgtgttctgcatgaccgacacaccggtttgctatcagcgatacagaagcttcaagaagatgtcacacagtccgttccatggccagatttacatagcagatggtgcatgcgacattttggggctaatttttatagacaattcaggagtaagagattgatggacctgttcaagaagttatgcaagcagaatcaacaaagaaagtttgatgccatatgggatcaactggatcgtttgaccactacacacatggaagaggttaggaaaaaacctataattgccagacaggaggagccggagggacttgaacccattcctaatgaagcaccaagtattactcggcgcaggaagcgtggaagggccacgaagtgcttcacggagtgggtagaatttgagccaagggagaaatggtcgttgttgtacgatacagatggatcgaggtatggtgtgatgacaacaaatcttgctgaagtgtataactgggttatgaagaatacacgacctctaccacttgttgctatcctggagggcatcacgaggggtacacagaagtatctctgtaaaaggtattccattgatagtcttcataggttagttcacatcacagttgtttaatcctacattttttaaaataaatcactgcacaacattttttctgatgtgtgaatttgttgttgtgcaggtactccagaaaggggctcgggctttcctacgagctagttattgtgaccacggttcagccgacggtacaagagtgggagcacgcagctgataacttggcacttcagacacctccagacgatgggagttattatggagcttaccttcgttggtaccgcagtgttacacgatggaggtgttttcctccacaaggagatagcaccgtcccccaccaggcagcgattactgacacgtttgcccctcagcctagatcagcttacaactcaatggtacgtgtttatttgtggaatttgagcaactagttcaatatttttaaaaagttagcaagtagttcagtatgtctaataaatgtgcaattggttcaactagttccttttcttacataaatgtggaactagttcagtatttataaatgatgtgcaactggttcattatttctaacaaatgtgcatcatgttaaatactcttaataaatgtgcaactggttaaataattttaattgccttgattatttgtggaacaggcggaatttgttgagcacgttcacgtggagtccgacaccctgctgcaaagactagaggcgagacctccagtcgtcaggcctgacgacgtggcgagcatccttcgcaacttccgtgcacgtgctgccgcactactacgtcgtgtctcctgtcggagcgcggcagatgtggtgcagacgtcgggccgacggccatcaccaccactaccccgacgttccagcgtggatcggagtggtccatcctcttcacgtcgcgggtacgaagcggcccacacatctcacggtcgtccttcctttcagcacaccccagcaccggagtacaccagggggtcagccggatcaggggtacccacgtcgagcacggcaccaccacgtccgcaggtattccaaactccgccttatgttcacccctcgcagggagcatctgggtcggcacacttcccttacatgccaacgggggacaacgtgttgaacacaccagcatggggacttcatatcactccgcgtgcgccagagcagggccacacacagcacacatgtaagtcattttaaacaataacacgctttagtttctaattatatgtatcgttactaactacgccatattttttggtttctccctcttgtgcaaacagatgatgagtacggttcggcgtcgacgcatcacggaatgcctgcttactcccctcgcacagcattcattgaggacttcttttccactgatcctccccagggggaagtagcgatggattactggcacgcagcacctcaggtcacacagccgacacaggagacggaggccggtcaggggccagacgtgacaccacagcaggcagctagagataggcacccccctgataatttgacatatcccactgagcagattaggcgtaggaagaagggaggacctagcaagcgtgcgaagggcactgatcgtccttgacttatctatttgtattaaacttttagtcatttatgttctgtccgtactatttgagaaacattttacgattaacttagtactatcagtactatttcataaacttcttcggataattactcagtagcatacccttcgaatgaatcatgacaaattatcattcaaatatacaaataatgaaactaaataattcaaatattttaaccaacaaataaatactacaatttctgaccaaacattatcaaaaccctaaatcaaaaccctaaatcatatacatataacattacaaaaatattttcctttcttacacactaaaataaattacatattattaaaaaaaataacttattacaaataaatggagaacacgaccctgtcgaactgcgccagttcgacggatatcctgtcgaacaggggcagttcgacagctgcctgtcgaacgggggcagttcgacagccctgcctgtcgaacgggggcagttcgacagccctgcctgtcgaacgggggttgttcgacaggtcctgtcgaacggcagccttccgatctcctcgccagtcgcgctctggccgttcgataggcgccctatcgaactgcacccgttcgacagggacctactttcgcgattttccccggttgaccactacttttgcgattttccataaaaataatattaattctcaaaaaaattcccgggacatcggctagctgcaagggttgggaaaccgagccaaccgaagtgggtcgcctttgcccgtttcgccatggcgtcgtgtgtgttcccaaccgccggtgcatgcatggggcatatgcccttttccagttagctcgcgttactagacacacccatgagtgaacgcacgcacgcacccacgaggtgcgcgtgctgattgcgccgtggactgcacgcctgcacggaggaatctactccgtccaagtccaatctaatccgccgggaggaatcaggaatggagtacgtgatcaatagtggtctgtgctgtgccgtgcgtgcaccggtggtggtggcgcaatgcacatcaggaggagggacacgacgaccgtggttgcggcaaaggtgaattcaccgtcacccgtgtccccgtcaccgtggtgaaaaaatttcaccgtccctgtccccgttcccgtcaaccacgacgggctacaatttcttcagccccgattaccacgtggtgaatttttccccttggtgaacccggttaaacaacaaattcatcaacaaatcatataaatgcaatggaacacaaatcagcagtacaccacattgatatttttccaaaataatatactcaacaaactgctggtcatatcgacggcgacgaacggcggaggaatccatggcggcggatggcgtgctggccggaggcggagggtgccgcgaccatggtctgaggcggcgagcgcgcggcgacgacggccggaggcgccggtcggcgcgatgacgtccggacgcggcgagcgcgcatcgacgacggtcggaggcggcgagtatgtgtcgacgacggccggaggcgccggtcggcgtgacgatggcaggaggcaatgggcggcgcaacgacggccggcggcggcacgcgtgcatcgacggctgggggtaggatcgcactcgcgcgaggggagacggcggccagcggcgctatgcatggtgccgtggtggctggggagaaatttggagatggggagggttgattagggttagaagatatatacatggttactaggcttcatttttatgggccaaaataactataaagtctagaactggactctagctacattacatgcgggtcaccgcggggacggggatggtgaatggtgcaccgtccccacccccaccatccccgatggtgatgagttttggaccattagattcaccatgggtggtagatatcaaccatccccatcctctaatatgtgaattcatcgtggggaatcggtgatcgggtccccattgccgcgattctttgggggcggtgcgagacatgccagcccagtcgaaacgatgagaggctctcgggctctcggcacgcgacggcccagctaatagtcgtctggtcggtccggcgcgggggacacgagcacggggccgggagcctgctcttctgctcaaccgcgcgcgtgccgagtcgcgcgtggcctgccttggtgagcggcccacgcggacaatgggaggcgtcagcgtggcccgtgcacctgccgtgtgcgtgtgtgagtgtcgcggatcgccaaggagacgtgagaggcggctttgatttgaggcccacgagagggcaaatgtcttggccggactaatgagatatacaccgctacacgcgactacgccgttggttcgtagccgcacagctggttcgggtagttcgctgctcccagcctccagccagccagcgtgtcatcggccgcatcgggtccagacaaacgagcgagccatcaatctccatcgagagattcctcgcacaagtcatgcatgacatcagctaatctgtctccctttccacccccctctactcgtgtgtcagtgccagatcgccggctggcagtacattcagtaagacgcgacttgatcgcacgattggccctttccttccaaacaagagagtgtacgaagcggttttccaacacaagaagagatttcacgcatcatccggtgaagctccggttactccccagttcacgacttcaagatttccaaaagtttggtactatatctaattttgaggaaacatgatgcatgtctcgtaaagaattcatatggatcggtgcctcttcatattttggcgcacatttatcactttcaaaacttgaataattaaagattaactgatgatcaaaacttaaccctattgattgcatgtattctaaaacatcgcttatttatggtaggcgaagtataaaaacgtaacccatctaagatggccgacagatcgacggacctgctgagcaaacttaagctgagttcataagcgaggattaggaatcctccttcccaacatgtaaaatagagcagtagattaacgtatgattaatgaagtattagctaaaaaacttcaaaatggattaatatgattttttttaaaaaaacaacttttctatagattttttttcaaaatacgcaccgcttaacagcttaaaaatcatgtacacataaaacgagggatagaagttgggaaagtgtaaaaaaacacaaccttaggttgagttcgttccttatgctcccaactccactctgttgattcccgtgcgcatgctttcctaactaatactgaattaattatgggctaatatgccatttcgtttttcttgcgtgggggattagttcttagcccacaataaagaaaccttaacctatctatgggaggtcgaccatctttccttgtggtccaccacctaccccaagtagccggcttgccatcgttgttgatgcaccagatctgccacctctctttttccccgagcttgctccatctccccttgtgtcatctagtagcacgtctgtcactgtctcctcctctgtgcacctcctccttaacttgcttcgccattcgctgttgagctccctcaaatgcctcccctcggtggcgttaagcaacatggccaccaatgtaaactcccgatgtagtcatgctcactctaacacttgctagtgagctctctcagccacctccaccttgtgccgaggctttctcatacttggccaagcttcgtcaaccacccacaccacacaccacctcacatgacatagccagtggtatgggcaatggatggggtagatggataggggagatcataagagtgggtaaagaagaagggaaagagaggatggcatgtgggacccattggagaagcagtaggagtcagaaggaaatatggatatcgactttttctagccatatgaatatttggagtgccaaaaatagtcagaatgctcttagacaagaaatgatgaaatatatgcattgggggtactatgacgatgttcaaaacaataaagtactacatcagtttcgaaatgtagctttttctagcacaatagtatgtcgaaaaagaagttatttctccactcacctttcatataaaccattcacaaccattcttcatttaatttatctatttactttttcttctcaatcaatcccaaatttccccaatcatttctacctattttttttaacatatatgtccgatttaagaaaattcttatattttgggacggatttattaaaaaagaacggggtagtattttgaaaggtttatgacctagaaactctgccaaacaaacatattgttttcactgcatagaattttacaactagaatttagtattcccatgcatcggaatcactactacaaaaatcgtttttctgtacgaggaggtcggtaggttccatgcgggccgcttgtggtggcgcctgcaaaaaccaccccccgggggcgggttgatttgccgcatgcgaagatccattatcgcatgcggctgcttaagacagccgcatgcgataataggtctattttcgcatgcggccgtcttaaggggccgcatgtattagggcatgcggctccttatatggaccgcatgcgaagatctattttcgcatgcggccgtcttaagtgaccgcatgcgaagatcgatcttcgcatgcggctgcgacggccgcatgcgcaaatggtgatatttgcagaccatttcgcgcatgcgggccggccaaccgcatgtgaagatcgattccgcccgtatgcaaaaacgctttctgtagtagtgaatgctgatcagtactgaagaagaagttgagaagttccaacgcccaactgtcttgtgaagttgaataatttctgctgacattgaaatggatacgctggacggctggaggtgttcaggttcaccaacctcactctaagattcttaggtacaatagcaagctataagccagctataaacatattttaaaaaaataaaggaagagagaaaagagcagcgggctacagatctatagccagctgtagcacggactccaagacgtaatgtgtgtatgacaggtgggaccaggtattaatagtatagtaagcaactattgtatgaattagcaattacatcggctatagattatttgaagctagcagtgtgctatactattaaacttgctctaaaccaacggtagaagagccagtggcaaagcacgggacaaccggacaattaagttgttggttatcgatgcctcgcataaataatcacaatacacgtcatcacttacgtttcacgcacgaccaacttgactgtagcaagctactccttgctaggacaagcggacacatcagctcgattggatcgggagggtgactcagcaccagtttaatttgcctctggacaagccaagcacgccgtctctgatcgctatctgctaatttagtcactacagcaagcaagctagtgactgacgaaacgcagaaaaccttatcaaaattatctcccaaagctaatgtacatgcagaggtgaactgagctatcttgagcaagagatccccgccgtgcagtcgtgatctatcaacatgtaaatatttggaactgaataaaataagattcggagaggagaaatggagggagaaatgcaggagaggtagatagaagttcagtttaatttggtgacgatcatcgcgtcgccatctcgacatcgtacaagctcaatcagtgatttaagatcgtcgaaatactcgaatgcatcaaccaaccaaccaacaacaataccagctggttagtagtacttcactagtactagcattgataaatatataattaaggttcatatcagatgattaagcagcgtagtgtttcccttaaaaatgattactgaagtgagttctttaacatcgtcttcagaaggtgcttacagagaaccaacaaccttgactgcaggagacaacaccatcgccggccgtcgtagtcaggattgccccacgacgaggtgtccggggacctcaatcagtcgatccatcaatctccatgataaggcaataggataagcagccaatagacgtttccagaaaggagcaaatggcacactcagccaatgttttaagtactgaaactctcaaagcttacataaatgaaaaggcagttttttttttggtgaaaagaggataaatgaaaaggcagtactatctgacgatgaatcgatgataactccctgaactgaaaggttaactcagtgattaatttagttgtgttttcctatcagacatgaaaagatggcgacctactatgctataaagaacatcgttactacatgatacctacatgatacagcacatctctcttgcaaaggtaaacaagttgtcttttcgtcatgaacagcaatgggttgttcattcgactgatcggacttcgttgggagcagtttcttgacctgcgacacagttagccagttttgtagctagctggagcagaagttcagaacagttcattttgtttccttttttccccccttcttcttcatttgcgattaagcagagccgttcattcacgagggcccgtgaacaactttgctagtgcgttagttttgtccatactgtgtgctgtgctagggacgctaattggcagctattgaagctgaaatttactactcctaccagtaagaaaccttggatcaactgattattaccaggttgtactgatcttcttttgaaagaaaatggcaggaggttactaaccagtaagaaaacggtaggattaccaggctgtagtgatcgtgtttgttgataggattaccaggttgtagtgatcttttttttttttgtagaaagaaaatggcaggaggttactaaccagtaagaaaatggtatatgattaccaggttgtagtgatcttttttgttgataggattaccaggttgtaatgatcttttttgttgaaagaaaatggtaggagattactaaccagtaagaaaatggtaggtttacctggtttagttttttttttttgaaagaaactggcaggattaccaggtggtagtgatctatcaatatacaaggatttgagggggtgtgaatgcgtgatcatgcaacatggtacaaattgggtataatcagacatgcttttgtaaaagctcagcgagagcgattttaccgatttatcactggacttcatctctttgaacgtacctccagtaatatgtacccataaatatgtaaatgggcgttatcaaatgaaaaagaaaaatactccctccgtcccataatataaaggattttgatggacgccccataatataagtgattttactcaccaaaatcccttatattatgggacatggtgtgtagctgagagaacttgtaggtgagcctctcgacactaagaccctccacgtctcacactagcctggttgagtaggtgataagaatatggccctgtttggtgcagcttgctgcaccagctgcaactacaccaacaataccagtgtgtagaaacaatatagtcaccgtagcagctgcagctgcgcaggtacacaaaagttacaacgaatagaccctacaaaaaaactaagttttctaatttctgacttatacgcattcgttttaaaatatagaaatctagtaccggattaaatatatctttatcctgatattagatttgagacggagatagtagtttattttttaaattttataactacaaattttgagaatatgaactattttggagcagattcttcagctgctagtctcattctcacgagggatttagatttaccactcgaagtctatcatatgtggacctcatgtgagtccaggataacaaatccttaatttcattaattattcccattctgacacgcgcccaaaggagggaagggcaagctcgtcatttcaccctttcttcctccctgccaggctgccaccctgccaccccccgtctatttataggcgcggccatggcctccagtggcatcaaccacttcacacgcgcgcgccgcccgccgggaaggaagccaacgccgacgccgacatgcagcgcctcgcctcctcccggaggctcctccaggcggcgctcgcccctgtccgtgcccagtccagcctctccgccgcggcggccgccgccgcgcccgcgccggagaatgccttcgccgccgccccgaagatgccgccgttcgactacacgccgccgccgtacgacgggccgcgggcggaggagatctcccggaagcgggccgagttcctcagcccctccctcttccacttctacgaccgccctgtacgttacgccacgatcttttcaccgctcccatttctttggaacgatttggggggaaaacactgtagtattacagatcggattcttgattgtttataccttaaattagaaagaaatactgcaattttgtctctataacaagacgcatttttccattttacatccaaatgctgccacaaatgcatcggcgttcggcgatgttcagagatgatcaggctcgtagcttaaacaaatctccttaatttgtttgcaaaggctgttgttttctctgtttttttatgatctcttgctggtggcttattagtgtatcttgttacaagaaaaggcagcccttttggaagtgcaacgtctttttctgtcgctattggataggtttggttggaatgccattttacctgttcttacttcttactctgagcatttcttacttcttaccgtttggagtgggcttaccgccacccgcggtttggcagttatcgcgattatcacaaggtatcccgtggttttaaaaactgaaaagattaccgtatactgtttggtaaacctcacaagatgctctgcagaatctccaagatagtcgtactactaattgtagtatggggaattgtgaatctagtacaaaaatgtagttgtcttttctctttcccataacatagatgttctgttctgcttagtaaaaacgtcagcctctatgttcttgtctgcaaatatgcatagttaagaagaaataatttttttttatcttgtgaatagtagtaggtcagtttgctcaactacgtcttgtgctagtagtctgctagatctcaaacatatgtggctgcgccaataacatatgcatatgtctctctctaaaatagcttcataactgacacctttccattttaaaattgcacatgcattgccaagtactctataaacaatgttaaagattggattcctgaaggaggatatagcaccaaccaaactgtgcacctaacattgtgtcttgctgactcctctcatcactggagatcatgcacattgctaaactcctcgtgaaccatctgaaaaatactttttgacagggacgtttatctggttgataaaattggtaggaagaaaaagaaaacaacaatagctctttgagatcaccttgaattctttagaagagggttattaaaaattttctaaaaagggaaaattctcgttctaaaacatatcaatatgtgataaagatatggtttttggagatttcaagttccaaaaactgaccatttagtatgtaacaaacatttcagttgaacatagtcgatgggaaaatgcagtacctgttcgacgaggatggccgccgttacctggatgcttttggtggcattgcaaccgtttgttgcgggcactgccatccggatgttgttgaggcgatggtcaaccaagcaaagaggatacaacactccacagttctttacctgaatcatgctattgcagattttgccgaggcattggcagccaaaatgcctggtgatctgaaggtagcttgagaaaactggactttctctatccgaatattgctaattgtttagaaatacatgaagattgttttgcctgttga

SEQ ID NO: 16138 - DNA, 12393 bp, Oryza sativa
  unsure (1)..(12393): unsure at all n locations
cctccgcgacaccgtcaagtccccgcctactcctcccccaccactgatcttgcttgaaccaccatccgcaatgagcttactcatgtcgcgtaggataaggagagagaagttttggaaaagataatttttaggtggattttagttcaaactataatctaaacataattatagggcgttagcgtagatgttatctttcttaaaaatattgtgttctaaatgtctaaatattaatcttgccttcgcttttcaattctttgttttaacttacatttatgtgtgtttattttcatatgttttattgatgtgtgttatttcctctattcaaaacatgcccttaagtgattttgggaggaatcctaattggcgcgtacgcgccggcccacacgatccaataggcagattttttccatatatgtgtaaactttcaacctatatttgaaaactttcaactccgacttgaaaactttcaaattcgaatgaaaaatttcaactcatatttgaaaactttcaacttagatttaaaaattttcaactcgagattcaaaaactttcaactcgagatttgaaaactttcaagtacaaatttgaaaatttttaagttaagatttgaaaaaaatatgaaaacttttgactcagatttaaaaactttcgacttcgattcgaaaactttcgactcgagatttgaaaactttcaactcaaattcgaaaactttcaactcaagatttaaatactttcaaatcagatttaaaaatttttaagttaagatttaaaaactttcaactcaaaacattttttaaaaaataagtgtgctaaagattaaggaaatactgagaaaaaaggaaaaaaatgctaaaaaacaaaagaaaaaatcgtgaataaaagagaaaaaaaaggccgataggctttgtgagccgggggacagctggcgcgcgcacgccagttagtaacaccctgattttggttatgtgcttagagaagtagccaaaatccattatatttttggagggagagtaacttgctatgatcaattattttgaataggctctatatattataatgtgcaccatatccattacttaaaaaacacaaacacgaatgtggaattaaaggtcactagtgtctagtagagcaatatgagtcatcacacagggcttcgtacagcccgtacttgctcccatgaagaagatattgcaatctttgcatgtggtgtttatcaagtgggttcagcacaaaaacttcatcagaggaaagagctagcagaagtagagcactagagcgcatctcctatgtgacgcttgtcagctgacgattaccagaggcggagctgtgcacaaacacgggcatcattgggagcaccactggtagtagttgctgcttgtaccgctccaattctccatgttggataaatcggattataatgtcattttctgctgaaaagggtgagataaaataaaaacagcacgcgccattgacattgaggcatgctagaaactgtggcgtgttaggttttcaatgcagattctactggccagcccgcataacgcagggtggaaatgggtttccttttctcggtcgcgcaggtcgcaccttcagaaaacgaaagctcggaggctttcccggattcaggttgatacaccaccttatcaggccctgctggaaactccttgtgagtgagtgttactggttcttatccgtcttaatctcactgtcatgattctggccaaactgtttgaactttaaacgctaaaggaagctaattctgctattgctgaacattgctctttccaaattagttatggtttttatgagctattttagaaaagagcccaggttttgcaccactgaatactgatagaaagctcttgtgattagcatttaagaacacaaagagaatatatgagttccgagtatatattgtgtgataaagtttggcactaaattgagtgtataatttgtgggactgagtagtaataagtgtgacatgtcatagttaataatgaatcaagcactagataataaaatatgatgtgcataaggtttggcaaggctgactctagctatcaaaccaacataccctatctttctcagacaagcaatattaattaatattggtcatgtttagaaagtttctggtagctatagtttcttttaaaatatccagctcctaaaaattgttcagatctcattcaatttctagtttcttactagaatttgaagcttcccaagcaggagcaaaagcagaggagctactgccgcgacgctttttcccttggatgatttccaaccgtcgtatcaagaaagaacagctgcccatattatgtcacaacagataccgcaagtagggattatccgtttctctgacgatatcatctgccagtgcgcgctccttgatacggttcctggacaagaaggattcccaatgtggtcagtgctgctagctgcctagctgcttggtggagtgtcgagtgacaagtgtgcgcgcgtggagtcgtgtcgcgtccacccggccatccccatgcatgcacacatggctctgccccccaacccagtggtgccgcaacctcgtcgcgcccgctggattatcagctccgccgccgctcgaatccacacatttccacccggcgtctgtggacgggccgcgacactccatcattccgccgtggaaaagggcacgccggcggctaaataaaagatccctccttctcccttcgcccggtgtggccgctggggtcaaccgaacaacggagtgcgtgcgtgtcgtcgtgcctgcgtccgtgcgttcctgtcactcgacccgtcgatttgcctgcgccgttcggcacgacgacgggcgatgcattcgcgggggggccatctgcccatctcggcgatctcgcgaatccggctcgcgagcgtgacaggcggacagcatctgtgccgcgcactgctgcacgatggctaattttaggagacggcataaaggcagcagcagcgtatctctggtgtttcgttttcccggcggagcaaatcgggtgctgtgtactagcggtagaggaggggccagggggaccccgggaatttcttccctcatcagcagcacatctctcttttttaaggttcagtcggtcagacttcggagcggcagcctttgtgatgagagcatctgcagacgaatcgaaactttccgagatttcggttgttgttggctcacatcgcccacgctaaaagtcatcacaccactgtttttgaacacaagacatggctgtttaattatagtgatttaaatcggtccatcaaatgtacagcgtgtgtagtgtatagttgtctacactacacggtatccacaccaagaaaaatgggaaaaaaagacttactagttactaacagatacagatgcaattatgcacgtatccgtgatccaggccaagtccactgtccaccggctcgcgcacacgtacaccacacagactgtatgggttctcgtggatagataggggcgcacacatgctttttgccgcagttcgtggaaaaagaaaatccgagtgccaccgtgattgatccagccaccgtcttggcgtctttatcgacggcgagaaagaccacagctgcatgcaacgtacaacacagctagtgccgttgggcagtgattctgcctgtctgtgcatgcaccgcatccgccgctcgatcgaggaggctctggccgcgggtatagatggccataaggcccgcccggcacggcccggcccaggcacggataggcacggcccgagagcgatcgggccggcacggcccgattggaatttcgtgccgtgccgtgtctgcccatgggccgcacgtcaggcccaggcacggcccagtagcaatcgggtcgtgccgggccgacacgaaggcacgatcagcccattgggcctgggctagcccaggcacggcttaggaccagtggatcagtggaccagtaattcagtggattgacaaattcaatggatcaatggattgaacatgcaaaatttaaatttaaacatgccttagttaacaaattcaaatttcacaacttacttgacaaattcaaatttgaacatgccttagttaacaaatttaaattacacaacttagttgacaaatataaatttgaacatgccttggttaacaaattcaaataacacaacttacacaacttagttgacaaattcaaatttgaacatgccttagttgaattcacagttctagattcacatatcacctttacaaaaattcacagatcacagatcaaagattcacagatcacattgacaaaaattcatagatcacttgactaagatcacatatcacatggacaattcacagaagagtttcaaaaatcacagactcacagttgtagattcaaaaatttcaccaagtcaaattacccaaaatcacaaattttcacccaaactttcacccaaaaaacttgacttagatcacagatgacatggacaattcacagaaatcacagttctaagattcaaaagtttcactaagtcaaaaattacccaaaatcataaactttcacccaaaaacttgacacgagtatttcaatgaataaagtagctgtgtagtgcaatggctgcctcgttaaaaacctttctaggtaaaaactcacacctcgtgagaaaaccctagaaaggaaaaaagagtgcagcccacagcattaatcaaatattcataataaagtccaagtccaatacaatcatccagtcccaatggcagtggttacttcatcaagaaacaaattgtcaaaagagtttataagctctaaattctccatggtatgttgcatctttgcatctgcttgctcccaatctttgattagtgccaaagcttgcaccatgtcaggagctagacgccgtcgtcgctcctcgatgatcctgccagttaagctaaaagcagattccgatgatatagtagaaacaggaacagtcaaaacatccctagctaatatggaaagaataggataggtgtggttgtgctcatgccaccagttaaggatattgaagtcatcatcgtattggttgacagtgtcactgtcaagataggcaaacaactcagatgcactcagagtagttacggatctgatcgaatagagaaaataaactaaaaaaaaagcttgtacctgcgcatccggagcaccggagttgccgttgatgatagagatccacagatctacgagaagacaagaggagagactagatttggggggtggatgagtggatctgagtatctgacgaagagaaacgatgagggttgcaaaaaaaagtacagaatggagaggaaatcgacaatgcgaccgtcgatccggtgaccggagaggcggagacgaagagctcacggtcacagatcagccaaagagatgaaagaaaaggatagagaagagacgaccctcaagcccccagcgggagcccgctgaccctcggtgctagatccggcgaggcatccatcggagacgccgacgaagagggatggaggcgtggagggctgaggggtcggagcctggaggtggaggcggagcgggcgagcggcggatcggtcgagactccagactgatgtggctagggttagggtttgtcggtttgatgcggtttggggtatttatacccacccggcataacaggcctcggtcgggccgtgcctgccgttggaccgtgccgggccgtgccggcccaccgtgccgacctctttcgtgccgggccgtgccggcccaccgtgccgagggagcggcccaagcacggcccggttgttgggccgggccggcacgggcacgaccccagtcgggccgtgccgtgcctgggccgggccaatttgtcgtgccttgggccgggccgtcgggccccgggccttatggccatctatagccgcgggtcgatcgggggccgacgatggcgacgggccgcacgcgcgcgacggccgatgatgcggacgaggcgtgcgtgtcacgaccagatccagacggcgtagtaggcgagcgccgcgtgcttgagctggcgcagcatcagcaggaagcagtgcgtctgcgcgaatcccagcgcgaacccgagcgccgcgcccaccgcgtcccccgccgaccggacaccctcccccggcacggcccagaacagcgccccccacgaccacccgcacccgcccgacgccgcgcacgccacgaagaacgtcgccgccgccgcngngtacgcgccgcctcccccgtgcatctccatggccaccgggatcaccacctggtggcggtacagcaacgtgcatataacgccttagtcgaacacgtcgtaatataaggacacgtacacagatactccagtagctagttcacctggcagaacacgatgagcacgccgccgatgacgcacatgacctcgcggccgtacgtcctcgcggcgagcgccgacccgaggacgccgccggcgttcgccagcaccagcacggcgtgtccggccagcgccgccttgccgcagcctgtcgcctgggacagcatgggcaggaaaagcgtggtgacgttggccccggtcaggcgcaggaacagctgcagcgtcgccaccaccacggcgtacgttacgcaccactcgtacttcctcgccaccatgatccaccagaacgagcggccgaggccgtcccgccgactcggccgcttttccccggagacgtcatgcccctgcttcgcatgggcctccccacgtccacaaccgccgctgctgcaaacgcaccccagcaccaggacggcgtaaatccggtcgctgtcgaggaaatccggcgtcggagaatgctgccagtagtcgccgaggtcgcagttcgtgccgttgacgacgagctgttcaccgcaactagccctgtgaatcgcactggagttgtagagatcgtatacggaagagcagacagtatccaagaacggcgacgtgctacgccaggagaagtggagtgccatggcacggcaaatcaatttactctgccaaattgtacacttttttcagtttgtcttcatgaacataaatcaaatcgatacgttcattgatcatttcaacagagaaaaggaaacaggtagatatgatatgcaatcatgcatgcagtaatccaaaattcgactccaaagtcttccattaacaccgagagattcgcgttcattcataatgtgtgagagcaacaaacctggacaacatcaaacatgtgcagcatccagcacgcgacgagaattccatagttgatggcaataattgggatcgccccaccaataatgggaacggcgcggccaatcagcacgagaggcgcacgccccatcgcgtgggtgacgtggcagctcgtgcgcgcgatgcccgctgacctggacgccacgtgtgcgagcaccctgtacaagcgatgcatctctctcaccatgttggccttccaacgtttgagtatgttgttgcagactcctttgcagaagaaatcacgaacgcatcttttttttttttaacggaaaacagcactagattgccttttcattgaatagagcaggagaaaatacaaatccttaggggtaagaggaaaacggagaaccactatagctgtacactatacagagtgcgggattaactcacgcaaccgcttagctcctgctaaagcccaaaggctcgcctcctctttgattttcattagtaggaagttcgttgccacctctttgtgatcaaaaatccgccgattcctctctttccaaatttcctagacgactaacaacatgagcgatcgaagtccttttttcaggacactaggcgtgtttacaatgttctcccgccactgtttgactgactaggcttcctcccattccgttgggtccatctgctgatagcccacccatgcagagatgaggtgccagatcctcttggtgtatctacaagtggcaacgaggtgcaatgccgtctcagtctcgcggcggcaaagagggcaacaaccattgttctgccatcccctggtcgcaagccggtctgaagtccagactctattctgaatgatgagccaagcatgaaatttgcatttccccggcgcccaggctttccaaatcaaggaattgaagtttgtgctcggcaccccgcagcactgtgcatggtaagccgaggaggccgtgtagtgcccgttgtttgtgaacttccaagtaatctgatccggttctccaacgtctaagtgcacatttcggaccgcttcccacagtgcgactagctgttcgacgagatcgactgtgatagatgattgtgaatcaagcttcaaatcttgcacccaggcgtcgtcctcctttccttgccgaagggattttcctctgttttttgagatcgtatagacaagcggcatgaggtctttgggtcttcgcccaccaatccacgcggactcccaaaatcgcaccgtgtttccgtcccctattgttatgtttgttgaggcggcgaagaggttcctatctatttcatcacatggcgtctccagccccacccaaggtttggtctggtccttccattcatgccacagccatctcaacctcaaggccctcgtgaatttgtccagatttaggacccccaatcctccttggctggtcggcatgcacgtctttgtcaaattgaccttgcatttccctccggtaatatcacccgtgcctgcccagaggaagcggcgccgctgcttgtctagctgctcgagggattcctatgtgattttcagagcggtcagaaggtagattagttgcgccgttagcacagattttacgagcatagttcttccagccgctgccatgttttttactctccagcttgctacccttccgaaaattttgtcaaagacaggttgcaagtccaccttccgcagtcttcccagagctagggggaggcccaagtacttgatggggaaatttaccctcaccacagggacgccctcaagaacctcattcaactcgatgccgccgcatctgatggccgccatttgggatttctgaaaattggtgacgagcccagttgcagcgccgaagcgctacaggatgtccgtgaaggccgagaaggcaatttgcaaggtatcacaagtcatttgtgcaatggatatagtttgtgccgacgaatatatccaaaacgcaagtgctaaaatgaatccactgcttttttatccaaaaagatagcctacttttaacaagttatcgtttccaatagattcagtgttaagatactggtgattggacagtgataaggtgcttgtgtggttggttggctcaatttgctctggtgagatctgtatcaaatgcccctacctaatcaaacaagatgtacttggtagcattaagaaaaggatgaccacatctatctcagtagtatgtggcatctagcaagaaagttcacttgtctcattcgttaaagaaagttcactaatctcgccatgacaccataccttacctgacatgatctgagctgaagtgctgtggccatcaataatggcccaggaaaacagttactattaaactcagaattcacttaacaccagatctcttctatctaaattcttaatcctgacaattcgatcgtttactgagtattcctctgttttcatttcctgacaagatattgttcagtcttcagtgaaaaaaagcacacaagatagagctatatttgcggggaagctctgagaaactctgaaccgagtactaggccccgcttccatcaccaaactccacaatctagcctactcagaaaaattcaggcgcacgaattctatcgattcagaaaatacatactctgcttctgtatctacctactccaacaacgtttgcggagtaacttcggccaacaccaccaccagggggcatcaagcacatccagttcgctcacttaattgcagacagaaacacatgaacaacagaacaagtaactgtcactcaccgtagcggctcactccgtcggttcggccctgctccacgaacacgccggcgagacgtcggcggcggcgagcttgctcttctctaactgcagctcgcctgctgatcactcgagcagtccatcgctgtggtttgctgcatataaaaactgtacgaaacaccatcgccgtcaggacgtagactggattttctaatccacagtgcacatttcacgtgccaaattgatcacatggaggaggttgctcgatgaagccacctgctactcctacgtcccaaaatatatagacattttcaatattgacacggatattaaaaattagatgagaataattgaaaaatggttgtgattggttgggataaggtaggtggagaaatagtttcattttgagataatgtactgtgctagaaatagttagctactccatccgtctcaaaatataacaatttcagcccttatgatttgttccaaaatataacaatttctccaccaaatttctcttaccaaccaatgacaactctccaccattcatttttcctacataacttcactactcattcaatcacaatcctacactactcacttttacctattttcttaataaccgtatccaaactctaaaacttgttatattctggatggatggagtatattttgaagcggatgtagtacggactgttcaatcgacagatactccaaatttcgttgtggcccagtgctcgcaagatacaaaactgcgaaaagccccggtgatgcgacgcgatgtactccttcatgtacatgacgcgatcgaccgatcggcatgtgtgaggttgggtagcccatgcctccatttgataacgatcgaggccccgcaagcgttgaatgttcttccagctgctgtagaacacacgtgtccgtcagacagtggtgaacgcatccatcatacagtatcatacacactgcatttgagcagtttttgttatcagagtaggggagttccttttcttccccatatttaacttcgagagattttttcctgtctctctcgatcaatataagttcagtgcagaatattagttggacaggctagtgaccttgtaacaagtcaaacaggtgtagcacatgacatcatcttcatagtacattcatactctacatgactgaagttgtgtgtcactacggtaggtatcagaaactcaggatgaataacgtggcaagacttacaaattactagcaaaataattttgagcatgaagaaaatgaactatgtatcgatcggtggctaggtgatgcgctgtgcacccacttcggtggggttaaagttaaaatccttaaccatcgcactcatgttcatgtccaccaattttagcaaagatgcatgccaaatattcaatttttgtcttaaggtccaactgtcaaactcaatatctttgaacttgacgtttctcttacttagattttaaactacgaatcgtttattttaattttgattcatatttcaggtgtgcatttttacttccttttgcttgtctttgaactcagaaaattttggacatcccttcttttgtgatttgttatttcacttgcgacggatttttgagcttatatctttcacttttttatccatagaatcttccatcatgatttgtgttcttgtatatatccattacactcagttacataacacttatacttagttatagtgcatttcactacaattagaatttttttaacaattttttctctagttttacgtatttgacatgcttattttttttatttaatttaaaacaggctatatctattggttaaaaattatgtaagattcaaaactttaataggtagtctttttttttctagttttgttttctgaaagctctggtgggctgaggcctccactctggagccttgcccagtacagatagtacatgttaaaggaaaaagtccactttgactcccttaaaaatataccgaatctaatttgtacccttcaaccagaaaaccggatagaacgactctctgaactatagaaaccagtgcaatttgactccccaacggttttagaggacggttttgctaacgtggcggtgttgacctggtcttagtcccatgtggtgcttatgttgtattagaattaaaaaatatttgtgagacccgtctctcattcacacacacataattcatggggcccacatgacatcctctctctccaacttttctttatgtcgacggtccagtggcagcccgagccctgcgccgacgccggcgccggcgatggaggatgcgagcaaacactgggcgccgcgcggcgcggtgctgacggcgttcgtcgtcgggatcaacttgctcatggtcctcctcgtgttcttctacttctggcggttcttctccggtaagcgtgggccaccgtcgtcgtcgtccatggccggcggccccgatgacgaggaggcgtcgtcgtcggacatgtcgccagcggcctctccgagggcgtcgtggcggcggctgcggaagtggccggcggggctgcaggaa

SEQ ID NO: 16139 - DNA, 5001 bp, Oryza sativa
gttggggcccgcgtccgcaggtggtacgcgcactgggaggtgcacgcgccacgctggagctcgcgcagcgtcaggccttcgtggagcgcgtgttccacgtcgccgaggaggacaacgagcgcttgtcaagaagctccgcgcccccattgaccggtaaaaaaaaaaaaaaaccgaaccaacaaccacccgatcgagtgaaaatggccatggatggcacggctcgagtccggccagtgattgactagatgcgacgtgtccgacgacgacgcctcctcgtcatcggcgccgccggccatggacgacgacgacggtggcccacgcttaccggagaagaaccgccagaagtagaagaacacgaggaggaccatgagcaagttgatcccgacgacgaacgccgtcagcaccgcgccgtgcggcgcccagtgtttgttcgcatcctccaccgcggcgccggcgttggcgcagggctcgggctgccgctctggaccgtcgacataaagaagacttggagagagagagaggggatgacatgtaggccccacatgttagtgggtcctacactatatttttgtgtgtgtgaatgacagatggatcccacaaatattttcttaattctaatgccacataagcgccacatgggagtaagactaggtcaacacagccacatcagtgccacgtcagcaaaaccgtcctccaaaaccactggggagttaaattgtactggtttcaatagttcggagagtcgttctatccggtttcctggttgaggggtacatattagattcggtctactttaaggaagtcaaagtggagttttttcaacaaaaaaaagaaacctccatgacatagatgcacaagcccaataaatactttggtggtggctacaaaggaataagttcacttcacatcccttaatttgtcgacgaatctaaaattcgtccctaaaccgtaatgcatccctcagtttttaaaactagcgcaagtaaagtcccaatgttagagataatataatcacgtataaacaggataagagaaaaaccgaactagatagagataaggttgttgttgttacatgtaaatagggattcggttttcctctacctgtgcacacagctatatgtattactcccgcacgtttgagtgcgctaattaacacggatcgtcgtatcaacgacgttaacctagattagtttcttttcatggtatcagagccttcctagcatggctagctcatcttcttccacctcctccaatccagtctgcggcttcaccatcatggagaagctgaccaaactaaaccatgcagtctgggcggcacagatgctcgcggccatccgcggcgcacgccttgtggggcacatcgacggcaagaccgcggccccaagcaccaaagtcaatcaagagcaggcggacaagacggtgaagaaggtcccaaatccggtgtatgaagaatggtatgctgcagatcaacagctcctcggctacatcttctcctctctatcacgagagatcctcaaccaagtcgctgattcaaggacggcggcacaggcatggcgtgcgattgggaagctgttctgctcccagacgcgcacgcgctccctcaacaaccgcctcgctctccagacaaccctaaaaggtgccatgtccattactgaatattttgggaagatgaaggtgctctctgatgacatagctgcaacgggaaagcctctagatgaggaagatttgattgcttatattctgaacggcctagatggtgattatgattctgttgtttctgcaatcggcatgaaatctgaaccaatctctgttatggaagtatactctcagctgttaaattttgagaacagacttcagctcaaacaggaagggatcgctgctgcccatgcagcgagtcgcggccgcggtgggtttatcccacgcagcggcggcaatggtggtggcagcggcggctctgggcgtggtcgtagtgcaccgccagccaacaatggtggccgtggccgtggcaatatgccgcgcggccgcggacagcagcagcaacgcacagaccctcggccgatatgccaagtctgctataagcgggggcatgtcgcggctgagtgttggcaccgttttgatgaaaactatgtgccggatgacagacatgtagctgctgctgcccaagcttcctcctacgccattgacacaaattggtacattgactccggagcaaccaatcacatcacgagtgaacttgacaagcttgcagtccgggagaaatacaaggggcctgaatagatccacaccgcaaatggtgcaggtatgcgaattaaacatattggtcatgctttagttcatacccctcgtacattgcatcttaaaaatgtccttcatgttccacaagccaccaaaaacttagtttcagcatctcgtcttgccgaagataattatgcttttcttgagatttactctaagtattttttggttaaggatcttgcaacgaaggacataattcttaaagggcgatgccgcaaggggctctatcctctctctcctggaacctccaagcatgtctacagtgttgcgccgtcttttgcaagatggcacagtcgtctcggtcatccatctactcctattgtgtcaagggtagttagcaagaataaattgccatgtcaatcaaagtctcctagtgagtcgatttgtgatgcttgtcaaaaggctaaaagccatcaattaccatattctaagtctgttagtgtgtcctctcatcctttgaaacttattttttcagatgtttgggctccacctcctagttctgttggaggaaataaattctatgttagttttattgatgatttcagcaaatttacttggatatattcccttaaacacaaatatgatgtttttcaaaagttccatgagtttcaagctcttgttgagaggctccttggttataaaataattgctatgcaaactgactggggtggagaatatcagaaactccattcttttttttttactaaaataggcatctcgcactatgtttcttgtcctcatgcacatcaacagaacggctctgctgaacaaaaacatcgccatattgttgaggtcggccttgctcttttagctcatgcatctatgcccttaaaattttgggatgaagctttttatacagcatcctacctcattaatcgcactcctagcaaagtaatcaactttgaaacccccttggaacgattgtttcatcagccgcctaattactcctttcttcgggtgttcggatgtgcatgttggcctaatcttcgcccctataataaacataagatgcaattccggtccacacaatgtgtgttccttggctatagccaccttcactaaggcttcaagtgccttgatgtgcctactggccgtgtttacatctctcgagatgtcacatttgatgaaaatgtgtttccctttgctcaactacactgcaatgctgaagcacacctccgcaatgagatatccctcttaccctcctctctactgccaatcacttattcagggggagaacaaagtattacctctatgtttaattctgtaccaaatgctactaatttatcttgacggagcgtggggctcctcaccgggagaccgcgtaggcccccctttgccggttcggccgggggcgctgagtgagtttcttcaccctcgatctgtggaacgttcgcgagagagcaaatgcacaagacacgggcaatgtatacaggttcgggctgctgagaagcgtaataccctactcctgtgttctggtggatttgtgtgtgaaggaattacagagagccggagagcaagagagaagctggagaggaagagagttcaggctctagaaccctccttcctctttttcctcctctcctagttctcgttctggattttgatcttcttcccccccactctctttggtgggcaaggtcctccttttatatctcaaggggataccacatgcaccacttctacctactcttcttttaagtggggaccctccctattttgacccaaacttggcttgcttcttcacctggaaactaaatcacagcttgttcttgagtgaggcccagcgccatcactcgactgacacaggggatcaccctgtcattccttcattaatgggtggagatttgcaatggccgccgtccgaatgaccctccgatgggatgggtcatatctacctccactttgccggaagcagatgcaacgtgggggcacgttttgtctgccgatgacgtgaccggcgtcagaccagtcacagaccggtcattcttgtcctccacgtgtcagattagcatgcctcacgtctgtctttcttcatacaatgacttccttgcaatggttgcgatgaagcctgggatgtatctggccgggattggcgtgtcaactccaggagttaacacgccggctccggctagggacgagtgcctggaggctctcatcattccgatgggacggggcgaggcgcgtgacaggccgcctgttgccacctaacccgcgatctgaccggtctgtgaccggtcacatactgcgaccggtcacggaccggataagtgagcgcgctgcactgcattaaatgcggcgtggcgcgctcgtccaacccgcaataaacgcggttaggtgagccctgctgtgctcacctaactcacacacgtggtgccaacaccacagggggtcggggcgccccaaccctcggggccgaaacgggagtggcccgacccctcggggagacagagggaggggtggccacatcaccctcgggcccgacccccccagggggtcaaggcacgtgggtgagcgcggccgcccaagcctttagtcacgatactcccggtcccttgtcaccgacagtagcccccagcgttatgccagggcgatcgcccccctcgagggaagcgctcgggcgtaacgccactccttaggtctggtgacaggtggggccggtctctacaagcgggcagaaagccagcgatcgcaaatcgtgcacatcgg

SEQ ID NO: 16140 - DNA, 20143 bp, Oryza sativa
cccatctcggctgccacggctgcacatccgcctcgtgcgccgcaaacgggcgagcgggattagtggaggtgtgggcgcgagaaacgagggggcgagatagtgggcgcgggaaacgaggagtcgggcatagcgttggcaagggtataaagacgtcgaggaagagattcacttccttcctctcgccactattccccttgccttcgccacttgcgctctaactcttcgtttcttgtgccctaccctcgccgcacttgctcgctctcaagctcctcctccgccggcgtcatggcacagggctccgcaccgctcgacggtagcgtgctgccgccttcccgcatcgtgagcgagaggcaggccgggctgccgcgccgattcatgccggaatctgccaccggccgggaggtggtcgagctgggcgagggacgcccggcgccacactacccggggcggtccgtcttcttcctctctttcgcaatggcagggctggtcccgccattctcttctttcttcatggatgttctggagttttatgatctccagatggcgcacctcacccccaacgcggtaatgacgttggccatcttcgcgcacctgtgcgagatgtttatcggggtgcgcccatctcttcggctgttccggtggttcttcaccgtacagccggtgatgccgccgtcggtagttggtggctgctactttgtcacgcccggaaattcactaataatttccgaacttatttgtgcataaaatcctcgtccaggaatcagccgaggtacataaactgacaatttaatattcagattcatcaaattaactaaaacgataaatacttacttaagaggcacttagtcctcaccatgaagaaaactgcagcggaaaaataaaatctagcgaagctccggctccactcccacaggcagctcaactggggtataagccaaacgtcttctccttctggatccttttcttcaactgaggttgattgattattgcaagaatgagcatatgacatactcaacaagccacacagcaagtatgcaagtgcacaaggataccaaaggatggcataatataggctcatttgcgaaagcagcatttagcaaagagttaagagtagtaaaacagtagagtaattaatcagaaattttaatcaacactgaacagcacacccatgctgtacaggcccaaccatcctgaacaaccatacccggctgaacagatctaactccaaaccaggagctaagcaaattattaccagttaatcatcaataattattgtgagaggtgtgagactaatcacgaaaaacattgctcaactcgcccataaccgcgggcacggctattcgaatagttttactctggccagaggtgtaccactgtacccacaagacacgattccacacatgttgccatgccccgaaataccaccacggcattgcaaagggggaaatcgtgacaataccctttgcacaacacaactcaaaacagtgcaccgttcccggatcatagtcacccctttataaacaaggcatgaactccccagcgacccccgtggacttctcgccacttctcagtctggcgcactataatgaatcacgctatacaaaggataaagccgttgcccatgctggcttgtggttggcacgataaatgtttcacaaccgtagctcgcgaaccggtccttaattgccatgagcacgaccttcaaaaccatgtgctcacaacccaccattaatcatattttaattaccaattaattatcataacacgattaaccatcgtgagctaccattaaatataaccttaaataataatgtagtatatatgattcatcccattagtgagctaatgtttctaagcattgctaagcaattatatatatacataacatttagctgaaccaaaccaatacataaggttcaagctaatcaattttattaccccaaggtatcaaggaatagggcattcaatgcaaattggccataacaaaggaataggttcacaccacccgatgacattcgaaaataaatgcacagttgaaacaaatagagaatttaaatataggatcaacatgctcaaaggattgtgtttaggatctgtgtgacttgccttgcaataatcggtcttcaattaatcttcttgatcacttccgacgcactcacgaaccttcgcaacgacggaaacgacaagctaacacgcaaaacgaagaaaaagactaataaaaaccaaataaacagtatataaaaaataaacaaacatgtagatcataattttagatgaattatgagacttgaacggcctcattctgacttcaaatgaatttattatgaattttacaagattaaatctaattaaagcccatttaaaaagaattaaataaatttaattcaacttatggataattttaatatgtagatctttattttagaaaaatttagcaacttgaaccacctgaaacggatctacggttatttagttatgattttccgaagatttaatctacgggaaaaagataaaccgatgacgtcatgctgacatcacccatggccgaaccaagatggcgacctcgccggagatagagcggccggctgcggaaaaggagggcatgtacacgtagaggacgacgagacgaacccgatggtactcaccaacgcgacgaacgacgacggatgacggccggcgacgaagaagcgacggcggcggcggcttgcacggtggcgacggctctacgggtcacgggagaggacgggagagggggcaaatgaaagaggaggactagggggtcctatttatagccttggattgaagagatcggactcctcccgcaagaaatcgatccgggaaaatcaaaactcggttttggagataaactcgaaaacgagtttaattcggataaaatacccaacgatttgctccgattcttgggggaaaagatagaggaggatgagaggatcaaaacccctcaaaaatccggaagaaacggggtcggattggagcggatttggaggcggaaaggcgacgcggcgcgcggctcgggctcagctaggcagccggctggaggttagggacgacactgtagcagggaggcaaactagacttttctgtgtggtttcctatgctaggcccgattgaaggagggaccacaaacagactttgacagagagagagaagagggcggctcggctgcagctgggccgattgggccggttcggccgcgcggagagagaaagagttgggccaaaatcggcccaacgacttagggaaggatttaaaaactttttccaattaaaataatcacttaaatgatctttcaattgttaaaaatacttccaatgctcaaataatttcaagaaaaatcctgaaaatacttggacactcaaagtacttaacaaaattataattagaccatttaatgattaatttaatatttaaataattgctgaactgctctttgtaagataaaaattaataattgagctccgaaaaatccgagaaaattccagagagtataattaaccatggagaatttaataaaaattaaatccatccatgctttatatttaagaaattttatttcccacatttaacttcacttgtaaattaatgaacatttaatataaattctattaataatttattaaataatttataaatcctgaaacaaaaatcaggatgtgacatactttcagccgcgggggccggtgctgagccgctacattccctgcgtcctccgcaagaaatgggacgactggaagagcgactggtgctacaccaccctcgctgacgaagcgcgcctccgacttccgagccagcccccggcgcaggcctccaactggcgggcaccggtagatctgggagacggctacgacgccgttcttgaccgcctggcgggtctgcgatcccaggggctcacgggggccatggtgtacggcgactaccttcgtcgccggattgcgccgctccagcggcgcgcccggggcgcctgggagtacactgggtccgaggattacatgaggacccaccaggggggcagatgggactgggcccctgaggacttcaagatggtggtccaacgggtgctgaatctcagctccgtggaggcatccctcatcccccaaggagtcctccccctctgcagcgatccagatcgtgccaacatcctgaccatcatgcaggcggtcggggcatcggaggagcgggctcctcgaggccacgatggcgcgggcgggagccgcaggggaaaacaatctaccccgggagggggtcacgcttctgggccccgcgacgggggcccggggggcagccgccctgccgacgcccgggggaagaggaagcaggagggcacgcctcccccatctcctccccgagggggcggggcagtgcgtgccagcagcaagcgcccggagggtgccgtgccgacgccgcagcccgagggggagcgaaaaaagaagcggctccgcaaaatgggggggaccgagccatgccgggggaacctcatctcgcccccgcggtggtcatttagccgacctccccgcaggttcgtctctgcgcccaccgcggccgtgttcattctcccatctcccaagacgagttttcactcacccgtttctttttgtcctctggtttttcttctgccttagcgagatcccgtcacgcccctcccgccattccaagtccggccggtccgaggccgaggagacggcgaccgcggaggcccggaggcgggaggctgaccggcaagaagccgcagaccgcctccgggaagccgaggaagctgctcaggaggccgtccgggttcgccaggctgaggaagccgctcgggaggaggccagactccgccgggccgaggagtccgtccgggaggcggaggtggcgcgcgcacgctaggcggcctgccaagcccccgacctaactccgcccgaggcgacgacgacttccgaggccacccacgacgaggccgcgggcgcaccgctcgggctcgacccctcgagcgacgtttgggacgagccagcttcgagggacgcccctgggtccggcacgtcgatcagcgggccaagccgcgtggcgcccataccgaggcggttctcccctctgccttccgctgccccactgaacgcggagcccctcctgcaggccttagccgccgcgaacaccacggtgctggacgggctaagtgcccagatggaggtcctgcaggcagagcgggcggagctcgacgcggcgtgggcgcgcgtagaggaggggcggcgctcggtggaggccatggtggaggcgggccgcaaggcacaccaccggcacgcctccgagctcgaggcccatcgtaggaacctggcggagatcgcccgggaggtggaggaggagcgggagactgccctcatcgccaccgccgtgcttgacgaggtgcgggacgacctccacctccaatacgggagccgggcggcggagctagagaagaagctcgacgccgcccggggaatccttgacgccgccgctgcccgggaacggcgggcggctgaaatcgaggcggcgtcccggaaacgcgaagaggcccttgaggctcgcgccacggcgctggaggaacgcgcccgcgcgaaggagagggacctggcggatcgtgaggccgccgtcgctattcgggaggcaacactagcggcgcacgaggccgcctgcgccgaagaggagtccgcactccgcctccgcgaggatgcgctcgccgagcgggagcgagctctcaaggaggccgaggccgcggcgcagcggctggcggacagcctgttcctccgcgagacagcgcaggaggagcaggcgcgccgcaatctggagggcgcccgcgccgagagggccgcgctggatcagcgggccgctgagctcgaggcgcgggcgaaggagctggacgcgagagcgcacagcggcggggcggccgcgggccacggcgacctagtcgcccgcctgcagccgccgaacacaccatcgccgagatgcagggcgcgctggactcgtccgccggggaggtcgaggccctccgcctggcgaacaaggtagggcccggcatgcttcgggacgccgtctcccgtctagaccgtgccgggcggcaggcgggcctctggggcgagcggaccgcgaagtacgccgccaaccggggggcctcgcccagcgcttctcagagatggccgggaccctccagcggctccccgaggagctcgaggagacgatcaagtcatcctcgagggaccttgctcggggggcggtggagcttgtactggcaagctaccaagccagggaccctgacttctccccgtgggcagcgctggacgagttccctcccggagggacgagttccctcccggaaccgaggacggcgcgcgtgggtaggtccgggacgccgccgaccacatcgtccacagcttcgagggtacaacccctcggctcgcgttcgccctcgacgccgacgaggagggcggtgacgacggtgcggacgacaacgacgacgaggctggggacccgggcgcgtcggaatgagcccccaggcccctgccaatcttatatagttttttctttcttcttccgaggccttcgggcccccttcttgtatagactaacttaatctgcaatcaaataaagaggaaatttctgtgtcaattctatttgttgtgtgtatgagacgaggatggtctgtggcgcggtccttctgtgtcttggcttgaacaagggctcgtgcccgggtcccagcctcaaacggcgcgggtcggagctagtgcctggggagatccacatgtcgagactgaccaggccgggagcgtggtgaccgagggttatggatgacccgattgtgggcctttgccgattcccccccggagttcaccacgccccggggcacggctcggttctgggccccttttggcgattttagccggcccgggccaccgaggacaggatcgagcacgagcatgctaattcaagccaagattcttcaaaagaaaacaatggcacaaacacagtccttaggaaatcgaaaatgcttttattgaaatacggaagagaaaaaagacaattatctgtatgtggtatcccctggccaaccctgcacgcccggggggggtgcggggttggcccgagctcgagacctgacacccgacccccactaggggtagaagcgacgaaggtgttcgatgttccacgggttaggcagctctgtgccgtcgcccgtggccagccgaacggagcccggccgggggacgccgatcactcgatatggaccctcccacattggtgagagcttgctcagtccagcacgcgtttggacgcggcgtaggacgaggtcgtcgacgcagagtgatcgggtccggacgtggcgctgatggtagcgccgcaggctctgctggtagcacgcggctcggagggccgcgcgccgccttcgctcttccaagtagtcgaggtcgtctctgcgaagctgattttgatcagcctcgcaatacatggtggcccgaggggacctcagggtgagctcagatgggagaaccgcttccgcgccgtagacgaggaagaaaggcgtttccccagttgctcggcttggcgtggttcggtttgcccagagcaccgctggcagctcctcgatccacgagtcgccgtgcttcttgaggatgttgaaggtcttggttttaaggcccttgaggatttccgcattggcgcgctccacttggccattgcttctggggtgggcgggggaggcgaagcagagcttgatgcccatgtcttcgcagtagtcaccgaagagctcactagtgaactgggtgccgttatccgtaatgatacggttaggcaccccaaaccgagcagtgatgcccctgatgaatttaagcgcggagtacttatcgatcttgacgaccggataagcctcgggccacttagtgaacttgtcgatagcgacatatagatactcgaacccgcccggggcccgcctgaacggacccaggatatcgagcccccagacagcaaacggccacgaaagaggtatgatctgcagggcctgggccagctggtgggtttgcctggcgtggaactggcacgccctgcaccgccggaccaagtcgaccgcatcgttgagagccgtcggccaatagaaaccctggcgaaaggccttgccaaccaaggtgcgtgaggcggagtgggctccgtactcaccttcatggatatcggcgagaagcttgacgccttgttcccaagaaatgcacttcaggaggactccgttagccgcgcgccgatagagggtcccttccaccagcacgtagcgcttggagatgcgctggacgcgttcactcccttcgcggtcctcgggtagagtcttatctgtgaggtacgcctggatctcagcgatccaagcgatcaatctaagggagctgggagcgctcccctcgggtcccgaggcctggactccgacgggcctcgggggccgttcaggcgcgtccgtctcccctagggggtcgggtcgtgccgacggctgggcaagcctttcttcaaaggcgcccgggggggtctgggctcgcgaggaagcgagccttgagagctcgtcggcgaccgcgttatcccgtctgggcacgtgccgaagctctatcccgtcgaaatggcgctccatacgccgcacctggcgcacgtaagcgtccatctgcgggtcagagcaccggtactccttacagacctggttaacgaccagttgggagtcgcctaacaccaggaggcggaggatccccagtccagctgccaccctgagtcccgcaaggagtccctcgtactctgccatattgttggtcgcccgaaagtcgaggcggactaggtatctgaggacgtctccgctcggcgaggtcaatgtgacccccgcaccggccccctgaagagacagggacccgtcgaactgcatcacccagtaggcggtgtgaggcagatgcgaggggcccgagctggcctcggggacggagatgggctcgggagctggggtccactctgccacaaagtcggcgagggcctggctcttgatcgcgtggcgtggttcaaagtgcaaatcgaactcagagagttcgattgcccatttcaccacccgtccagtaccctctcggttatgcaagatttggccgagggggtaagacgtaaccactgtgacccgatgcgcctggaaataatggcgcaacttccttgaagccatcagaatagcgtaaagcatcttctgggcctgagggtatcgggtcttggcgtcccggagggcctcactaacgaagtagacgggccgctgcacctttcggcggggccgatcctcttcgccagccgcatctccagggcgcttttcgtccgagaggccgcgcggggcgcactcggcttctgtgtcgacgacctcggggtcggagggcgacaggcgtggccttcccgcagtgaccctggggccatcctgggggtcggggacgcctggcaccttcggactagcgggcagagggccagctccggtcgtcgggggcctcgggccgccgttcggctcgggggcctctcctccctgctctctcccgggtcgagtcgacacagggtgctcttcgtccgagaggccgcgcggggcgcactcggcttctgtgccgacgacatcggggtcagagggcgacaagcgcgaccttcccgtagtggccccggggccatcctgggggtcgggggcgcctggcaccgtcggacaagcgggcagagggccagctccggccgtcgggggcctcgggccgccgttcggctcgggggcctctcctccctgctctctcccgggtcgagtcgacacagagtgggggtgcgcggagcgagggttgtcctcgtcgcgctccacgaccaacgccgcgctgaccacctgcggggttgccgccaggtaaagtagcaacggttcatctggtttcggggcgaccaggaccgggggagaactgaggtacgccttcaactgagtgagggcccgttcagcctcctccgtccaggtaaacggcccggaacgtttgaggagcttaaataggggtagcgccttctctcccagcctcgatatgaaccgacttagggcggccatgcagccggtgacgcattgcacatccctaagtttgctgggggggcgcatccgctctatagctcgtatcttctcggggttggcctcgatgcctcgggcagtgaccaagaacccgagaagcttgcccgcaggcacgccgaatgtcacgcccggaatttctatccaaaattccaaacgcttacatgtgtgttaaaccctcgtccaggaatcaaccgaggcacacaataacaaattgataatagagtacaaataaataactatttaatgttcgcaaataataaattactacagaggtagatagttcctctcaaagaataaccttctacgcagcggaaatataaaactataacaaactacggaacagctatggcgactccactccataggcatcttaaccagaacaagctcaatccttcagatcatcaccttcgctgaaatactcctcttctgatgattaaatattgcaagaatgagcatatgacatactcaacaagccacacagcaaatatgcaagtgcacaggataacaaaggatggcataatatagctcatttgcataacagcatttaacaaatatttaagagaatagtaaaacagttgtataattaatcaatattaaataaacaccatacaacacacccatgttgcataggcccaaccatcctgaacaaccatacccggctgtacagatttaactccaaaccaggaactaagcaaattattaccaggtataacatctataattattgtgagaggtgtgagactaatcacgaaaaacattgctcaactcacccataaccgcgggtacggctattcgaatagattaaactctgatcagaggtgtaccactgtacccacaagacacaatcccacaacatgttaccatgcgccttagtaccaccacgatacctcgaaaaggaattgtgacaataccccttgcacaacacaactcaccacagtgcaccgttcctggatcataatctccccctcaaaaccagaggcaatggactccccagcgacccccacggacttctcgccgcttcacagtctggcgcactataatgaatcatgctatacaaaagataaagccgttgcccacgctggcttgtggttggcacgataaatgtttcacaacagtagctcgcgaaccggtccttaattgtcatgagcacaaccatcaaaaccatatgctcacaacccaccttaaccaggttttaattatcaattaattaacatcacacgattaaccatcgtgagctaccatttaatgtaaccataattaaaataataatgtaacatagtttataattaatccctttagttagctaatgtttctaagcatggctaagcaaacttacatatggcatttagctgaaccaatccaacatataaggttcatgctaatcaaattataacccataggaaaataagatcatcttcagccattaatcaattgggaaaggttcaccacccgatgacattcgaaaacaatgcatagttgaaattaaataatagctttaaatgggttcaacatgctcaaagggttgtttgggatctgtgtgacttgccttgggcttccgcaaacgcttcggaaccttcctcaatggaaacgctctcctccggaacgtcggaaactaaagcaattaaacaaaaattaacaaaacagtacaaaaacaagcataaacagtacatgtggatatttttaacatgtagatcttgattttagaaaaatttagcaacttgaaccacctgaaacggatctacggttatttagttatgattttctgaagttttaatctattagaaaaacgggaaaaagaaaaaaaccgatgatgtcatgatgacatcatcaatggtggccgaaccacgatggcgacctcgccggagatagagcggccggctgcggattaggaggacaagaacacgtggaggacgacgagacgaacccaacggtactcaccctcgagccaaacgacgaacgacgacggccggtgacgaggggatggcggcggcggctcggcttgcgcggtggtggcgggctacggcggccagcggcggaaaggagagggtggccgagcttccctacggcgtggtgaagcccacgacggtggcgacgaccgacggcgacggcggaggaggcgcggcggcgcggctggagatcgccggcggcgacggcgaggctaggcggcgtcggcgacgagctacggggcacgggaggtgtcacgcccagaatttctatccaaaattccaaacgcttacatgtgtgtgaaccctcgtccaggaatcagccgaggcacacaataacaaattgataatagagtacaaatattactctaattaataagcgaataaaatgtcattacagaggtagatagttcctctcaatcaataaagatctaagcagcggaaaataaaataaacggcgcagacggctccactccacaggcaacttgaccaaggctacacctactcctccacaccatcagcttcactgaagaactcttcctctgatgaatgattgcaaggtgagtatatgacatactcagcaagtcacgcagcaattatgcaagtgcacaggataacaaaggatggcataatagggttccatttgcaaaagcagcatttagcaatcatttgagaatttaataaaacagttaagtattaattaaacaatattaatccaacactatacaacgtaccctgttgtataggcccaaccattctgaacaaccaccccggttgcacagttctatctccaaacaaggaatataccattccaaaccaggagctaatcaaattattaccaattaaagcatcttttactatgatgagaggtgtgagactaatcacgaaagacattgttagacccgcccataaccgcgggcacggctattcgaatagttttactctgatcagaggtgtaccactgtacccacaagacacaaccccacatcatgtcaccatgtgcctcaataccaccacggtacatcggaaaagagttgtgacaatacccctcatacaacacaatccactgcagtgcaccttcctggatcataatcacccccttataaacaaggcatggactccccagcgacccccgtgggcttatctccgccacttctcagtctggtgccccgcaatgaaccatgctatacaaaagataaagccgttgcccatgctggcttgtggttggcacggttaatgtttcacaaccgaaactcgtgaaccggtccttaattgtcatgagcacgaccatcaaaaccatgtgctcacaacccaccattaccaggttttagttggcacattaattaattaactaatcacgattgaccatcgtgaactatcattaagccatcattaaataatagtgagtcataagttatcccaatagtgagctaatgtttctaagcagggctaagcaattatatctaatttctagttgaaccaatataaataaagctcaactagtcaaattataataacccaaggtatcaaggaataaggtaatcaagaacaaaagggctataacaaacaataggttaattccacccaatgacattcgaaaataaatgcaatagttgaaaagaaacaatagctttaaacaggatcaacatgctcaaagggttgtttgggatctgtgtgacttgccttgctggccttggaactcttcaaactcttctccggcgaaaacggactctctggaaacgacggaatctaagcagaaaagagcaaaatcactaaaacagcacataacaagcatgaacagtacatgtggatatttttaacatgtagatctcaattttagaaaaatttagagacttgaaccaactaaatcggagctaagatgaattagttatgaatttttgaagattaaatcggattaaaacacttatattgattttaattgaattatgacgcaataatgaattatttttgaaaaggaaaagaaggtttattgcgtcagcggctagggtttcggtggatcgggcgcacgggcggcggttcacgcgaacggacggccgagatcgacttgatccaaaacggacggccgagatcgaacggtccacgaccggctcacggcggacgaccccgatgacgtcggcaatgacgtcaccgacagcggcggcggctcggcggagcggacggctcgggcggcgcacgctcgccggcgaacggcggcactaggacgcaaacggaggccaccggcacgtagaggacaacgcggcgaacacaccggtgaccaaaacggcggcggaagaacaacggacgacgacggcgacgaggaggaaacggcggaaaccttcgggttgacgacgacgacgaagctccggcgatctccggcgatggcgaaggggcggacgaggacggcgacgcgacggcgaacactacggcggccttcccgagcgacggcgacggctgaaacgacggcggcgcacggctggagcggcggcggcgacggcaaagctagggcacacggcgctagagttcttccggcgacgagaggcgaaggcgagggtggctacgggtagaggagacaccggggaagcttttaaaggggctcggaggcggcggcgaaggcccacggcggcggcaacggcgaaggaaagctcgcggcttgaaggaaagaggccgatccgaatcgaactcgaatccatcgatttccgaaccgatctagccgaagcttccaaagaagaaaaggtagaggagatcccgaggatcatttcccctcttttgattcggccggagaaggaaaggagcggccgaatttggaaaggaacggcggcggtggcgcgctagggtttcggccgggcgacggcggctcggggaagacgaacctgacaagcgggacccacctgtcagcgacagcgagggcgcgcgcggctgcggactgggccgacttgggccgaggagagagagagcggttttgggccgactttcggcccaaagccaaaagaagacttttaaaacctttttcaatttaaattatttcttaaatgcaattccatttattaaaaatacttccttaggtcaaataaatcccagaaaaatctaggaattatagaattaagcaaagtatttaataaaattttatttggccccattttatattggaatttattaattaaaactagatcttctcttctaggcttttaaaataaattctaaaaattccatttaaacaacaatttatatatttatgattttcagggtgtgacaaacctaccccccttaaacagaatctcgtcctcgagattcggaagaactggcgaacagatgcggatgagctgacttcaattcatcttctcgttcccaagttgattcttcttccgagtgattactccactggactttacaaaaacagataactcgattcctggttcttctctcatttgtttccaagatacggattggtttctcaacataggtcagatcctcttggacttctgtcacgaccggaaataacccaacgggcgttcctgacgtgcgtgcattaatccttgtcccaggaggcaaggtacaccaaaagttgatacaattcagagtttaacaagcggaagcgtaaatagttaacttattacatgggcagcgaaggcccagcacacacaaagacaaacgggaaacagcggaagactagggcgacgaccacaggcgcttgacggcaggcacgagctagacaccaaagccttcatcttcaaggaactcctcttctggggttgggaaaaattgagcaagactgagtacaaccaccgtacttaacaagacacacccgcaactgcagaataaatgcaagggagtacaagggaattatactataaagggttagggttgcagtaaacagcatttaaagacatttagttgctcaaagctattttgtaaacacgattctagaactatacactattattcatcaaggccgtgaacccacacgaacctgccttaacccaaggcctacgatgattcagaccgaactggcaacccgaccctgggtcccagctcgtcccaagccaacccaggccaaccattccacattttagttgttaagcaggttttaagaattgaaacactaacttgggtacattgctcggcttgcccataaccgagggcgcggctattcgaatagattatactctgatcagaggtgtacatctttacccacaagacacatcttcctcacgtgcaaccacgtgccacataccaccacggtatacagacggaagacgtgacatagtttccaacccatcctagccatagacaagagtaccgacccaatcccacctacggccggaacccccgggacaggcaggcaggactgagcccccagcagcaggacaccggccctgtgccatgacatctcgactaccgggccgcagctcgtgtagccttcatttgccctggagaatgtccatcgacccccgacttcatccatctccatccgtgtacttttgtttataaccagactgagccacaaactaagccttacccactagacatgtggaagtacggtagtgctttgcaacagaggcccgaagaccggtccttatacggtccttttgtccgtctgtctgcggatgataagcagtactaaagttcagcttagaacccatctcttcctgaagtttcttccaaaaatttgaagtaaactgactgcctcgatcagacactattttcttagggacgccatgcaaacacacaatccttgccatatacaattccgctaagcgacttccggaataggttgtctttaccggaatgaaatgagctactttggtaagtctgtcgactatcacccaaatagagtcatgacctgatgacgttctgggtaaaccagtgataaaatccataccgatttcttcccacttccattcaggaatcttcaaaggctgcaacaaaccggcgggtttctgatgttctgccttgactcgctgacaaacgtcacatactgctacgtattctgcgatttcacgcttcatacttgcccaccaaaatctttccttgagatcctggtacatcttagtactaccagggtgaatggagtataaagtatcatgagcttctttcagaattgcatcttttaaatctttgttgtcggggacacagattctctcacccaaccatacagttccgtgctcatcctccaagaaaccgatagcttttcctcttctcatattcttcttgatttcttgaatatcaggatcattaatttgggcttctctaacttgatcaattagagtgggcttcgcttctaaggctgcaacgaaacctctactgacaattcccaaatttaatctttcaaattccttgcataattccaatggcaactgtcgtccttccgtagcattgcaatagcctttcctgctaagagcgtctgctacaacattagcctttcctgggtgataatgaattcccatgtataatccttaattagttccaaccatctcctttgtctcatgttcagatccggctgagtaaagatatactttaaactcttgtgatcggtatacacctctgtacgagtaccgaaaagataatgacgccaaattttcaacgcatgaaccactgcggccaattcaagatcatgagtagggtagttcttctcatgcggacgtaactgacgagatgcataggcaaccacctttccatcttgcatcagaacacaacctaacccaagttttgatgcatcgcaatacacttggaaacccttctttggatcaggcaaaatcaaaataggagctgatattaagcgacttttcaactcttgaaaactctgctcacattattctgaccacttgtacttcacatctttctgaagcagtcgtgtcatgggcttagcaatcttggaaaaattctctataaacctccgataatatcctgcgaggcctaggaatctgtgaatctctgaaaccgtctttggttgtttccagttggttacagattccacattactaggatcaacggcaactcctcctgctgagatgacgtgaccaaggaacttcacttcagacagccaaaattcacacttgctaaacttagcatacagttgatgttctcgtagcttctccaacgcaaggcgaagatgttcttcatgctcttctttggttcgagagtagataagaatgtcatcaataaagaccaccacaaacttgtctaggtattccataaacaccttattcatcaagttcatgaagaaagcgggggcattggtaagtccaaaagacataacagtacattcgaacaatccatacctagtggtaaaagttgtgttaggtatatcttcctctttgattctcaactggtgataccctgatcgaagatctatcttggagaaaacagtggcacctttaagctgatcaaacaaatcatcaattctgggtagcggatacttattcttgatagtcacatcatttagtgcacgataatccacacacattctctgggtatggtctttcttttccacaaaaataaccggagctccccatggtgacgaactcggtctgatgtatcctttctgaagcaaatcgtctacttgcctcttgacttctgccaactcattggctgccattctataaggtctcttatggatcggagttgttccaggtaccaaatctattctgaactctatatcccttttaggcggcataccaggtaaatcatctgggaacacatcggaatactcccggactataggaatctcttccaaagttatctggttcagtcttgaccttaaagactcagaagacaatgcatgaacagttacaactcgaccatcattgctggtgagagttacttttctgttggcacagtctatcacacctttatgtctggctaaccagtccatccctaggatgacatcaaggtctttggattctaacaagataagattggccagaaatggtactcctttaatttctattctgacagaggggctacgttgcaaagagagtgcttgattatttggggtactaaccatcaaaggacgtctaagatcttctacttccatcccatgatttcccgcaaaactcatagataagaatgaatgtgtagcaccagaatcgaaaagtactgttgcaggaactgagttaacaaggaacgtacccaaaatcacatctggagcatcttgagcttctgcagctgcaacatgattgacacgggccttcgatgctggtgcggtagagttgctctgggcagggacaaccttcacgcgtcggggcttcggacacttgtcagcataatgtcctgggtctccacagttgaagcacaccacgggcttgctgccttgctccctcttggcaggctgtttgtcgcgaccgagaaaattgcattttcccgaacgctagtgtattaatccccgtcccaggaaaagccggggtacaccatacaaacatgatataaaagacacatctttattatatcaataatatttacattattacaaaggcacttaaggcctgacaataaaaaataaacagcagcggactagcgggcctacggctccatcttcacaggcgctcaactggggtataagccaggactccacctaagacatcttctccaaagcttctcttactgaagaggggaaggattgagcaagaatgagtacaaccacagtactcagcaagccacaccggagatgcataattaatgcaagggagtacaaggggataataacataggggttaagttttgcagtaaacagcatttaaaagtcacttagttgcccaaagccattttataaagacgatcctagagctacacagtattattaatcaaggccgtgaacccacacgagcctgccttaacccaaggcctacgatgattcagaccgaactggcaacccgaccctgggtcccagctcgtcccaagccaacccaagccaactattccacattttagttgttaagcaggttttaagaattaaaacactaacttgggtacattgctcggcttgcccctaaccgagggcgcggctattcgaataggttatactctgatcagaggtgtacatcttttcccacaagacacatcttcctcacgtgtaaccacgtgccacataccaccacggcatttggacggg

SEQ ID NO: 16141 - DNA, 4013 bp, Oryza sativa
aatatcccaaagtctagagttgtaaaatcacctaatgttacctaattaaactgcgaagcatctacctaaaattaaactagtggtgccatgagtagagtgtccactagttgaggttttgtttattctagggtgaacaaggtaataataacaataacaataataataaggtcataacaaaggtaaataggcatggctagataaaacagtgatattgcgggaatttaaataaagcgataatgcaataatttaaatcaacataattttacaaactgggattcaatatgttcaaagatgatgtgacttgtcttgctcgctttcccaaacgtcggcttcaacttccacgaagagcggatcttccgaagctgcaacgtctacacgaccaacggaaaagaaaaggcttttactctaataaactccatataacaagcagaaacaaagcacaaaaatgggttcttgacttcttaagaaaaaattagagacttgaacggtccaattccgagttcaaatggccaagttatggccatttgaagtttatatgctctttaattgaatatttgcgaatttcttcatttaaattttaatttaaaatcggatttattgcgtcagccgaggggaggggcgcgcggaccgggtccacgggagtggggcccacgcggcagcctcacggtccgcggtggaccaggtgcacgcggcttgcgccggccggcgccgtgggtcccacgcgtcagccgcacccgcgggcgcgggcggctgacggccgggccccacctggcagccgcggggcgcgcccgaaggcggcctcgccggcacagccgacgggaggcggcgcacccgcgccccgatggtcgccgccggtgaccaccggcgcggcggagcggcgcccgagagaggggagggaagggggaaaggaggcgacggtccacggctcaccccggggcgacggcggcgacggaggaggcggccggagcggagggaggtggtggcgcggctcgggtcgacggggacgacggcgctccggcggtcggcgaccgaaacggagaggtggacgaggtcggcgaggatgcggcgaagccgaaggaggcggcgccgaggtgggaggcggtccggggtgacgacggcggcgggccggagcttggcggcgacggcggagagagagggcgacgtcgcgagctcaaatccggcgaggaggaagggcggcgagaggcggaaccggacggaggaggtgcggggagggtttaaatagagccggggcgagagagggtggccggggaagggaggaaaccggcgcgggaggtcggccgccatcaatggcgccggcgagatttgcgggggcaaatccgcccgtttgaacgcgggagagagagagaaacggggggaaagagagaggggatcacggggaataattccccccaccctaatgcgcgcggggacggcgggaggcggcgggattcacggcggcggcggcgctagggcgcgggcggggcggcgggagcgggggaggatagggatggcaggtgggccctacccgtcagcgagggtggcgggcgggcccgcccgtcagcggcgcgcgcgcggggagaggccgagtgggcccggggaggaggagagagagggaaggagatgggccgagccggcccaagagggggagggggggggaaaagactttttagggtttttctttttacaaaatcattttaactttgtttatttcttaataattattatttgtgctctgaaaattccactaaaatttgagggctccttttagaccaaggagaatttaacaaaaattctccgggccacatttgaatttttcttatacgcattttagtgtttgccaatttcttttcgaattttaattaattctattattccttttagaaaatgatttttatttcgggatgaatttatcaggacgtgacaaatccaccccccttacaagaatctcgtccccgagattcgaggaggctagcatgaagataggttgggcggtcttctcttcttgtctgacttcttccgctccgtcttctataacaaacttgcctaacaaaacttctccactctggactgcttggctcgatctcctgttgcaggtggaatcttcttttcacctgactcgaaccagggtgcacctttcagctgacgcagactaggttgcggtagtttaatgatgcttccgttccggaacttctcacgattcatatcttcggcgtcaacctcacacaagttatcaacttcatgtcatgtgtcgtaacctgcttgtcatcatgagaataccatgcttggcgtttccttccagcttaccaccatatgctttagactatgatatcccgcttactaaggataccatgattgacaacttgccattaactgtctcatattagctttcctggtctccggtgctaggtacttctgctattcgatgcgagggtcaaccactctaactataagttatgcttcccaagagaaccaacttatcccactggatatactttgacgtcttcccaactggctttactgctggatttgttattgtctaatcattatcctgccaaatctgaggcttcgttgttagatgtgattttaacctgacctctgtaggttatcttcgaacatatcacttgattcataactgggaatagctctcacgaacaagcaactcggattcactttctttatgttcagtttactttccactatcctctccatgttgtcatcatttagccttcaacgtattcctttgcacctttaaccttgatgtgttccttcccattggatcatctcccaagacatggcattgcctggtaaccggtgcttgcacttttcactccgtgtagcatctgataccgagttgaagatttcactccttgccttcatagaaacacttttacctaggtcatcttgcttacttaatgacaaggtgactgttgcggggcaattactatcaggggtcttccctgagcgatgcagagcatgtttctgtttatcaatcacctttcggcctacttctttcatgctagagaacatatttgccaatctcttttatcaatcttctttcggcctatctctaacaggtggtattctttaatgtggattgcggacgcttctggggacgatgaggtcctttggcttgctgcctttcagtgaaaccttgatgtggttcgtcaaaaagctgcactgactaccttcagggaaatacattgcttgctatctgtatctatgccactagggttttattgccgatgatcatctttagtgcttcctcgagatggggagcatccaaattgttcttctgccatatcacctttgacccttttctgatacctgatagactaattaccaaccatcgactactatgttctcaaatattgatgtctcctggatcttcttaactgtttgcaggtatatccgaacttatcaatgtagaggcatggcgggtacccttatgggtttcatccaacaatccttatcttgatctgtaaaaggcgtatccaaactcctatccccaactactgtctcattggctttttaacccaacacagtttaattggttttcttttccatcaacaggttggttattaactcgaggttagaatatagttcctctgacacaagaccctaggtctcctttgtcagtaaacaattatacacatgatcacatatccgcatcttccaaaagaatcctcttagaacttgtctgtattacacatttctcccttattacacgaacacaaggcactgccttaaacaaaaagggaaggtgcttatcatcggtacattgtatcctcaacattaatcatccataaacatagcaagctcactgtttatagacatgaatatatttatttattacatgattgctgcaaactttcgattacgcaatgataagtagcgaactgaaaaccacaagcgtggctgctcattttgattctggagagatatagctggcgttgttctagtgactgcatcatccttgattggttctgtgatgatgtgataggactgcacattgc

SEQ ID NO: 16142 - DNA, 640 bp, Oryza sativa
gtaaaactactgatattttgaccaaactattgtaaaactacatatttacgacggagtataaaaaaactacagatttaatgccgagtttaccacgaaactacagatttaaggtataatgtgtaaaactacatattgttaatcaaatcaaatcttaaattttcattcgaatggaatcatgtttggatcattttcaggtgataaacatgcataccagccagcatcaggatcttggttggaattgcagaaaccaagaccaccaagctcatttctgctagccttgcagctgacatggttgatttgtttctgccaaacagcaatgtcacccatctgctgcaccttggtccagcaaaggctcttggcaatggcctcaatggccgattgctcggagctcaagtcctccggcgtcctcttccaccccttgaaatgtctctcccagttcaccggcggtcctgacaggacccagtacccgccgggccggagaacccggtccacctcaatcatgtagagcccgtctgaaatgcaacaaccattgttgatattgccatgatcaatcaaagctacccctccgatcataaatattcgatgtttagaacaagatttaatcaaacttcgaaattcccgaccaaaaatctattatatt

SEQ ID NO: 16143 - DNA, 4755 bp, Oryza sativa
cggctgtgcttagatccaaagtttggatccaaacttcagtcattttccatcacatcaacctgtcatacacacacaacttttcagtcacattatcttcaattttaaccaaaatccaaactttgcgttgaactaaacacagcctacagagtactacatcaacaatggccttgtttggatcctccgaactattaaatagccctccggaatcttgctatttaggagtattaaacatagattaccgacaaaaccgattccataacccctaggctattttgcgagacgaatctaatgatatatattaatctatgattagtggctgattactgtagcatccctgtagcaaatcattgattaatatacctcgttagattcatctcgcaaaatagcctaggggttatagaatgggttttgtcagtaatttacgtttaatacttctaaatagcaagatttcggagggctatttaatagccctccggatccaaacagagccaatgataaaactaaacagttctgtgtcgtttgaattgtacagacaaattcaacaccagatgaccctcgtaggtcgtagccatggtccaggaccccctctctcaagtggagtgtctgtcggcctaccacctccactcatgaatcatgagcggccatcatcattgccccctcggtatgtttggtataatctggtaaatgaccgtcttctcttttaggtctctttgatttggagaaaaaacataaaaattttgaaggatttcaatcatataggaaaaattcctatgaatatctttgaatcaaatgattgaatcttttccattcctttgaaattattatggaatagacaatcttatagacagtgtttagcaaatgacaaagggaaatgattttccacccatctttaaattctaaccattcattatccctctaccatttaatcctaacccttcattcatttcccaatcccaatcccaccccccatttcccattatccaaatacacccatagagatttttgaggaaatttagcaagagctccaacctcttggaaaactttctttgagtctatctctctcatccgattcttgcgtttttcctgcggtccaatcaaacgataattcccgtgtttttcatgtgttttgcaatcctctgttttacacttcaattcctttgagaatcctgtgtttttcctattccgccattttttccaccctgcgattcaaaggggcccttagctcgtgagaatgtgagtataaggggaaaaattggatagaagattctgaagatgcaatacataaaagagttgtttttagacatgagaaagaatggatggaaaatttagggtacttttgaattgtgtcggtgatatgggccgggggtatcatgtttagagggaggaggctgccccccaaggccacgtggccctcccccgaggggagtgaggcccgaggtagggcggcggccactccttcccaaagactagtcggaggaggctgccccccaaggccacgtggccctcccccgaggggagcgaggcccgaggtagggcggcggccactccttcccaaagactagttggaggaggctgccccccaatgccacgtggccctcccccgaggggagtcaggcccgaggtagggtggcggccactcctacacagactagtcggaggaggctgcccctcaatgacacgcggccctcccctaaggggagttaggcccgaggtggggtggcggccactccctcccagagattggacggaggaggctgcccccaatgccacgtggccctctctcgagggggatcgggcccgaggtagggcggcggccactccctggccgagactagaggtagaaggctgccccaggccccacgtggcccttctccgaggggggatcgggcccgaggttgggcggcgaccgccccctcccgtgactagggatcgggctcccccgaccccctctctaggtcaccacgtacggtgggttaggtgtccgcctccaggtccccacctacccgcattaatggcgacccgagcggtcgcgccacgccacatttaatgcggtgtgcagtgcactcaaccgttctgtgaccggccgaatgactgatgggacccaggatgtcagacgcaccatcgcgtgtgtcaggcgatgtgcagcccgacatatcccatcaaataatgatggtgagagattctcatcctcttatcccagccggagtcagtcctcccgctctggtcaaagcaatgctcccgtttctcggtgtaataggagcccagaagtcttcacccattaaatggtgattgacaggggcaccccccgtgtcaggcggtaagatttgacaggccccatcatcaagacgacgtgcgcttagcttcccaagtcaagatacaagacatgcatttaatgcaaagattataatacttctctaccagagctaagttagattgttgggcccatgtggtaacctcttgaggtataaaaggaggtccaggcctagtggtggaggaggggggacttccgagcgaactggcgcttgagtctcgcagccccaggcacttgtgttctacactcgaccataatcccaaacacaggagtagggtattacgcttcttagcggcccgaacctatataaaccccttttgtctcatcgtctttgggggattgaaccccctcaagatcacacagcttcgctcaccgaatcctcgaatctcacccgctgcccccggccgaactcacaaaaaggggcctcacggttccctggtggaggagttcattctccgacatttggcgcaccaggtagggggtgtgttcgtgatttttgaggttctttcgagtgccggcgcgacgagcgtcgcaccgccgatgctggggaaggcgcagcctcctcgggagagccgcgccaccccaggcagggggctaggcctcccacttcctcactggaaaaggctagcggccaggcctttgtggcgagtcttcggaatgtccgatggcccctaaagtttcgacacagcctcaccgagaagtacgacggcggcgtcaacccctccgagtccctccagatctgcacgatgatcatagaggcggcgggggtgatgaccaggtcatggcgagcttcttccccatgaccctcaggggccaagcgcggggttggctcatgaacctgctgcctgcctcggtctactcttgggaggactcttgcagttgagctccgggtgccgtcgaagcccgggaccctctatgctggttcttccgtagcggctagctttggtcccgccggctggctatggtgcccggcccggctcaactaatcatcctttcaaccttcaagtattttcaatttttcaattcatcagcataatatagcttgaagtcttatatttcttttcccccattcttttctcatggccctgcgacgctcgcgtgttgcgcattcgtttgcttcctcggtggtaagagcccaacctctctctcatctacatgaacgtttcctcgccaagtatgggggctaagttttctagccgtattccagccttaagttgagctccgggtgccgtcgaagcgagggaccccctgtgctggctcttccgtagcggctagctttggccccgccggctggctacggcgctcggcccggctcaactgtagacagggatcgctggctctagagtttttcggctctcacactcgtgcgaaagtagtcgtccgtgtagaagggagagatattggaaggaggccaccgaaaggaaagagcaaacataatgtgtagcgtggggacacaggctcgtgggaacctgacctcgtttgctaagtgatcacaggcttcccaagatggttcggaacccatggtgggggctctcttcgagctaaaggtttaaaagatcgcgacatgcaagcaaggtttgtgttttcttcattcatacaagcaattctttgctataagtgtggggctacgattcctagctctatcctagccctgcgtcgagctctgggcgccgtcgacgcctagggccccctgtgctggctcttctgtagcggctggctttggccttgacggctggctacagcgcccagcttggcttgatcgtgggtgaagattgttggctatggaaaatttagtcctcgcactcgcgcgaagataatcgtttgcataaaattattattgcttatatttatctctcgcccatctctttctcgcggtcccgcggtacccacgtgtcgcacgctggcttgccttccttggtaacaaaaagtttatattcgcttcatctattcaaatgattctttgctaaaagtgtgggggctacgattcctagctctatcctagcactacgtcgagctctggtcgccgtcgacgcccggggccccctgtgctggctcttccgtagcagctagctttggcaccgccggctggctacggcgcccagtctggcttgatcacatgtaaagattgctggctatgggaagttcagtcctcacgctcacgcgaaaataatcatttgaatagatgaagtagaacaccaacagaggttaacaaaaggcaggggctagcgaggtacgcggcgtaaggtcacgggcccgagagaatctaacaacgtttgcagagtatatacaggaaataagttcacggcctaaggtacgtgctaaactcccaccgcccaactcccagaatgataggatagaagatcggacccacatgtcaactgactagaagattggcgtcaaccctgaccacctgggaaaggttttggtcagggctcacgccgggg

SEQ ID NO: 16144 - DNA, 3626 bp, Oryza sativa
ttctctaccagagctaagttagattgttgggcccatgtggtaacctcttgaggtataaaaggaggtccaggcctagtggtggaggaggggggacttccgagcgaactggcgcttgagtctcgcagccccaggcacttgtgttctacactcgaccataatcccaaacacaggagtagggtattatgcttcttagcggcccgaacctatataaaccccttttgtctcatcgtctttgggggattgaatcccctcaagatcacacagcttcgctcaccgaatcctcgaatctcacccgctgcccccggccgaactcacaaaggggggcctcacggttccctggtggaggagttcattctccgacagattgctacactaccaatttataggtagtgttaaattttaggtaagttttggcactaccaatattttggtagagatttctattgatttggcaagttttagcatccatccaaacatcacacaagtactatttagattaaaaagtttagtagggcaagatttggcactaccaaaaacagccattgatgctcgttgggggggggggggaattgtagcaaccgaactgatctgagtattgcacagtggagtagtaggcaaaaggccattttggattgaagccaaaatgtaaccttacctatttattggtagcttcaatagtgatagtgtatgtttggattgaagtcaaatcattaataatgtctattaacaatttggcactaatctagaactttcttctctatatcatcaatatttggctttacattggtagcaattcaaatatgtaccatacatctctaccctactaaaaaattactagtaccaaaacatgccaaaaatttggcactatcaaagatttggtaggtaaaggttggtttgctttgtagcctaaatagaccttaccaaattttgtcaataccaaattttggcaagttttggcatgactaattttggtaaggtaaagttgtgtttgattgaagccaaaatagcctaagttcactattgaaatagcctattttcttaggcatgccaaaatttggcttcaaaccaaatagacactaaacactattgaaattgccaaatattgataagcctaatttaggcctcaatcaaaaccagccctaaataaccaaacagccccaaagttctgtcatggcaaagatcatgaaaagcatgtgactcttcctcaagcatttgctataagcataccaattttgttgtttaagagttccgtttcgacgtttgccctctcctcttttggtgtttacatccgcagaatacatccgagtgaaattttagttgtttctagtatttgtcctgactttgaacatgtaacataatattggatttctcacggttatggtactgacatatactacgatgttccactaactaaagcgtgattaaatttggcatggttttcctaactaattttttactttgattttttcattactacgatgttcctagcaacaaaaccacaattatatgaaaataaattcaaatgtcaatataatgatattatttttgtaaaataaaacataatttataataaaatagtatttgttaaatatttagatagttgaattttaatacgtgcataccttattcagtgacacgggtggagtaatgtgttatgtatgatttatgaaaaatctcatttgtactctagataaactcgatactataagctatcgaccaagttttaacgatttttagccggcttgaaatgtgcatctccaactgtttgtttgaaattcgtcgattttcattcaaaatcaacgataaatcgatgacttgggtggagttcaaaatttgatttataaggaatcgagattatgtgcttgtttactttgtagccgctctcaaccttacctgtttttttttttcacatttttgtattactaggttttggtatactggatgtgtttaatttaaagccttatcaaaatttggtagaattttttaagtagaaactaatagaattactaaagtttaataaggtaatgttggtaagcatacgtttggtttatcttatcaaaatttaatactccatccgttaaaaaaaaatcaacttctagagtttgaattttgtcccaaaaaaccaacttctaccctcctacctactttcagcacgtaaaacgataagttttatcccttcaataccctttatctacctatcatttttactgtttttttcaatgattaagagcattttagtcattcaccatctccactaattccaccttgggatgctagtaatgcaatttttttggacggagggagtataagattcgaagtgagaatacaatgaaggagcctaacaagcatgatggcttgatatataagatccatccaacgcatgcgcgttttatccgataatatagggtctgttcactttgatgctattttcaaccatactattttttttaagctgtcaaaaaaatatctacgtttactttattgccaaatttggtaaatacataagaaatcctggtaaaattttggcaattttaccattttgcaaaaattttggcaatggcaaaattcgataaggtttattttagctacaatctgaacatgtccattgtactataatggtatgttagcttttatgttagcttttataacatgcatgtaaattgacacgataactgatagatagtactcttttttaagtattagagtggtcttatttctcagtctcttggtcaacacaacatccacctgtttctatcccaaccattcttaccaacaactaatggaacgtttacctcgcgataaacgtatccaaaatggtcaggaagctcaatttttttttacacggcatgaaattcacttgactgaccggactagagagagatccaaagagtagatcggggcgtggagaaaaaagaagtccagatagaccccggaccccacgagtccagtcaatcgcaaacagcgcccacccacgaccacgacgaacacaaacagtaagaaccaccaacgaaaccgatctaacccaagcgaactccccactccacccgcaagcaagggtagtagactagtagtaggcgaaagaaaaaaaaaatccccccaaacgagagaagcggcagcgacgacgacgacgacggcgacagcagcagcggcggcagaagcagcagaagcaaccccctcctccgccgctccgccccatcggatcgaggccgccctagggtttcccccaggctccgcccctccgcttcccccctctccgccgcgcgcgcgcggggagccaccaaaccctaggacggcaaacccggcgcgatcgcccacggtggaggcctcgtcggcgccgagaggagccgctccgggctcgggtcggggttccggtacctcaccggcgccgcctccgggtggtgggaccggtggatggtcatgggagccagcggctccaagctcgagaaggccctcggcgaccagttcccggaaggcgagcgctacttcggcctcgagaacttcggcaacacctgctactgcaacagtgtcctccaggtctctatccccctagccctcacgcctccgtagcttgtggattttctgtgactgaacgcgcggtatgctcggtgtgattctggggattgtga

SEQ ID NO: 16145 - DNA, 2685 bp, Oryza sativa
ttattgtgcgagaaacccacaggagacaattttagtgttcactatcttagtaccttcgctatagttgtagatctaccttatatttgtaaagttctgtgcataatattgtagttgtcatgaaatatgatgaacaagtttatattttattatatcttggtatgcaatagtcaaataatgttatcattcctgaaccatattaaattatggactatttctgtttggtaaatgttctgctgtaatctcttcttcacagtttgcaatcttacaacttgcactgcacagtcaattattttttatacaccttattatttacatgaaccttacaatgatacttgtgttccaggcactatatttctgcatcccgttcagggagaaattgctggaatattatgcaaataacaaaactcctggagatgcggaggagaaccttttgacttgtttggcggatcttttcatgcaggtaaagtggacaaagtataagtttcttacttgatgataatgatatgtaactgtgtttgagcatattgttgctttcaaaaactttgaatgggtaacagcttcttcataactgttcttcattgcattcagtggaactttcatctaccaagtattatatttctgattgttaaggacaatagtacgctgatgttttagttgaagtaggattgtaaccatgatgctagttggtaggccctatttgcttggggacttactccctccgtcccaaaaaaaaggcaaaccgtgggtttccgtgccaacgtttgactgtccgtcttatatgaattttttttataattagtattttcattattgttagatcataaaacatgattaatactttatgcgtgacttatctttttaatttttttcataattttttcaaataagacggacggtcaaacgttgggcacggaaaccagggtttgtctttttttgggacggagggagtattagcctgcttataatctaaatacctaaacctaagcaaacagaaagtttttttattcggctttttttaaaagccataagccactgttgcaccaacaagccaaatgctagatttgagtagcccttttggcttttgtgggttggtgttatccctccacccttatacttgtggattaaaagctatggccttgcagactacaaatttcaaatagctagattaagagcttatgctgaaaaaagtggtgggtcttaggctcattcctgggagaagaatatcagaatatggtaagtcctattctatattatgtaaaggccttaagttttagtaatgccttacagggtggcatcaagtgacttgtatctgctgtgcagcctttaaaatatctgttccctctcttcaggatgacacgatgctgtaactgtagtagacagaagcatgcaaagtatttttattttcattctaacagttctcaagaacaaatgtttttgttacgacaatttaagaacttatattgtcctattgattatgcttctgcaataaggggttatctgtaatggcatgttttagttgtagtggatgtcgtggtgttgtcatgccgatgacagggtgtcaagtcagttgaaagcaatcagtactcaatattattcccagaccattcaccctgagtccttgatttgaggtgagaagaccctttaaaggatagataatcacaaagaaataaacagttctagcagaggtctaggagatagggatctctgatctggcttctgtggtttctctctgtgctgctgcttaatctctgaggagaacctggtggacgtggaagaagttgtggaggcattagggggtagcagtatggcagaggaaagaaggataggtcataggtcaggaaagtagtgaagactgctacctggtgttggtgtgagtggaagcctggcaatatcaggacatgagattacgtaggtagtgaggtagctggccgtctcacatattatccccctcctgctatttgtgtgctccatgtgttgattagggtgccagcttttgtttagcaccctcatccattgaagtcatcatataatcgctgccagggtgaagtttcgtatgttgccagttaataaatctctattgcactgagtttgaaggttttacgtcatcgtgtgttgatcagagaattatgatggaagccacttgatagcactgtgcagctccatatgagatatatttgttgtctgtgtgctattttcttgtttgggtatcttgaggtgatttttctagtcttcagagagtgcactgtttattggaagccacttgatagcactatgcagatatatttgttgtctgtgtgctatttatttgtttgggttttcttggggtgatttttctagtcttcagagagtgcactgtttattggaagacttatatcaacttacttagagtaatgtacactgacctgctgttacaatcagcatatattctaaaatccatcacacaagttgattaccaaataagatatttggcttgatgtcgtacccacaaattcattgatctgtgtgcattatgtttactgctcggttttgtatggtctctgaaatttctgtcaggatattgtctctgtcagcaacttaatggatcataatatatattgcaggtaagccagtcaaagaaaaagactggcgttattgctccaaaacgctttgtccaaagagtaaagaaacagaatgaactatttcgca

SEQ ID NO: 16146 - DNA, 5351 bp, Oryza sativa
ataatatgagaaagggagtattcacttacaacttctgaattctaatcatgcctccctttgcagctcacatttgaggtgctgaccttcagaagcatgatgatgactcccgagtgcaatccccaagtcggattgaatcaatgatcttgcggccttaggcatctgaccatcctgttgtacgaaacgacaatcgttaactgcgttgtatctgcaatactgttacgacacgggttatggcatctgaccatcctggtgttcataacatactatcactacctgtgatgtatctggaatatcgatacgacagacaacgattctcctgcgcgtacagcatcaactgaaaatgccagtgttagttttgctatttctaacgatttgcggaaggattttaatacattgatattccattgccggcggagtggacaggcaacggaaaacagtagcaaacttggtccgaggacaaagcatctagttttaatttgagcaattttaccatacaacatttggtatctcgaggtatcacattttacatacaaaattttgatacctcgagctggttggtaaaattgtttttttttttcagtttatcagtggctttttatggcttgcgcatgaaggtcctctcggacatgaatttgggccgagtgaatacaaatatctcaataaagtgcgtgtcactggattcaaagggtccagaggacaacttgagtttcttttgcatctcatggaaaatgcacctggactagaagtcataactgtggatacagctgaaagaatatggaaggatgaatatcataagaacgaatatctctgttctctgcaagactgcaactttgctcgtcagaccgccaaacaacatccttcgtgaagcacttccaccggccgcaaagatttccgtcctttagcatggatttgtgtaattgtttagtagtgagttcatgtgatctctctatatatatagtgttacatacctatcgatgatttgaagtttgagcaatagatgaatgctcgatttaaaatactctttggctggtgcaagtgtcatgcattttattcactagtacgaggactaaagggaagtcgtcgttgactcctctatagttggtactagctgttaactccttccgttatacggagtactagtaaaaattaacaaagatgagatacatgttaatactataaatgaaatgtgagataagtatgtccatattcatatttatagtacgcaatgtttagattcgtaatacaataatacatcttattctatattagattactaattttttttcgggaatacacaaaaggattgcgtacttttgtattaagagaagtaaagaattacagctagattactatattttgatttagattcgtagtacgaagatgtatactttctcgtattagattacttatttactttacccacgagctgctcctcgtggtctacactctggcagtggcaagcattcgcgaccttgtagggggtgtgtgacagcggacaggatagcaggaagcgccatggcggcaggtgtcctcgacgccggcggcgctgtcccggccgcagcttacagcggggagctcacgctctccgtgcttgtcacatgcctcgtggcggcctccggcggcctcatctttggctacgacatcggcatctcaggtctttgttcttctcccagcttgtgcatccgcgtccacgatggattgcttggattctttggtcgattatgatctctctgatggtgctcgactgtttgttccaggcggcgtctctcagatgaagccgttcttggcaacgttcttccccaaggtgctgatgaggatggccgacgcgaagagggaccagtactgcgtcttcgacagccacgcgctcacggcgttcacgtcgtcgctctacgtcgccgggctcgtggcgtcgctggccgccggccgcgtcaccaggtggctgggccggcgcggcgtgatgctgatgggcggggcactgttcttcgccggcggcgccatgaccggcggcgcggtgaacgtcgccatgctcatcgtcgggcggatgctcctggggttcggcgtcgggttcacgaaccaggccgcgccgctgtacctcgccgagatggcgcccccgcggtttcgcgggtcgctcaccgtgggcttccagttcttcctctcgctggggatactcatcgccaacctgaccaactacggcaccgcgcgcgtcccgtggggatggcgcctctccctcggcctcgccggcgccccggccgtgttcatcgtcgtcggcgccttcttcctcaccgacaccccgagcagcttcgtgatgcgcgggaaggtggaccgcgcccgcgccgcgctcctccgcgtgcgcggccaccgcgccgacgtggacgccgagctcaaggccatcgtccacgccgtggaggccgcgcggggcagcgaggacgtcggcgcgttccggaggctggtcacctggcgggagtaccgcccgcacctgaccttcgcgctcgcgctgccgctgtgccaccagctcagcggcatgatggtcctgaccttcttctccccgctggtgttccgcgtcgccggcttcggcagcaacgcggcgctgatgggcgcggtcatcctcgccggcgtcaagttcgcgtcgctcatcctctccacgctggtcatcgaccgctacggccgcaaggtgctcgtcatcgccggcgccgccctcatgatcgtgtgccaggtaagtacgcgtacgtaccataccatgcatgcaaagtatgtaacgttcgttgcatccgtcgtttagaattattgctgttttgtgatcaaggtggcgaacgcttggatcatgggggcgaagtccgggaagcacggggaggtggcgatgccgagggcgtactcggtggcgctgctggtgctgacgtgcgtgcagggcgccgggttcgggatgtcgtgggcgccgctgatctgggtgatccccggcgagatcttcccggtggaggtgaggtcggcggggcaggcggtgagcgtgtcggtcacgctggggctcacgttcgtgcagacgcagacgttcctggcgctgctgtgccggctcaagtacgccacattcgcctactacgccggctgggtcgcggccatgacggccttcgtcctcgtgttcatgccggagaccaagggcgtcccgctcgagtccatgggcgccgtctgggcgggacactggtactggaggcggttcgtcggcggcggcgacggcaaaccggagcagcgccgttgacgaatcatctccgtggatctacacaagtaccacgactacacttacttactaataaagatgtgtgtgataagctttcgtgccggtcatgcatgctgaactagtcaattataagccttgtcactttgttcagagggtcacaaaattcttgggaccagttgacaacttgctcaaacaaatattgtgttatcggtgatgacttgcgcgcggtgactttgagatcattgatatagtaccacggatgggtaattatcaatactcaatcgtagaaagaacgtgcttccgctatatatcagtgtactactagtctactgctccatccgtctcaaaatataagcatttttatattttaacatgatcttcgaaatgttacttttaccaacgttatctataaaagtaaaatgttttaaataaaaagagttgcatattgtgatagtttgtttaatgataaatctagtagcatcaattttatatgattgatcttttttatttttttgctattaatagttaaagttacaaatatttgatttggtattatgttaaaaatacttatattttggtacagagggagtagtatactcaactctactttagtaaatctactttgaattttatatttctgatactcgaatttggttagctagtgcctagtggactagtaagtgaaagagaaagacacaacttgaccgtaatcgccttttttaatggagggagcaagagaaaggacagagatataccgaaacggatggctagagctgcaaattaaaagatataattaaaccattagaggctaattaaagatatataaaccattttcatcgtctaaaaagatggctctacggcggactatctaacagtatcctctgccgtacagtccataccgtaccaccaatatgtgtatgtatccctatatatgtactttagggtctatctctcagtacgacacgtacgtacggtagaaagatgtgcatcccggactattgagacggtttaggtatcatgactcatgcggggctatttggttgccaattttgcaccctgatagaggattttttctgcatttaatttgacaatcggacacttttcaaaaactaatttcacaaataaactgtagccaaaacttatttcaaaaataattctttttttcaacgccaaatcatatggtgctgaacttagacatatcaacgctaaatagcacgtcactgaatgcatgttggcacaccgactcagtctcccatccgtggtggcacatcattcagcatcagttgacgtggtgttgaggtatctaagttcaacgccgtatgatttgacgctgaacaaaagggtaatttttaaaataagttttggccacggttcatttacgaaattagttttcgaaaagggtcaaattatcaaattaaatgattttcctaggcggagacttcccagcgttggtttgcgtcctgagtggctgaagctttgcctcatctgagctgctcagacgacacaaaatcatccaacaagcatgaaataaaatcatctaacaagcatgaagataagtgcccacgcaaaacgagataaatcattagcacataattaattaaattttaattattaaaagcttgaaaaaatgatttatttgattttttttatagcaacttctatgtagaaagttttcgcacgaaacataccgtttagcagtttaaaaggtgtggtaacgaggaaaaatctgtatcttgttggagttatatgtatcatgtgagacgtgattcgtcattcgggcatgttactcgggttgccaaccattgttacccttgtaatgaccaaaattttgttcaacggccgatgtgagcctcaactattagaattttgtccgctgctctagaattttagtaaagttgcagtgttccatttccattaaagcgaattgaagacaaaatcttgggagagttgcttatgctattgtttagtttgatatatcaataaaaagtaccaaatcgtaatcgaagaagttttcaacaagagataaggtctaaaggtgtaagtggcgtatataaatgggaattaactaggaatggttagttatgtattagttgttgctcaaatttttatttcaatatgcaacttg

SEQ ID NO: 16147 - DNA, 18382 bp, Oryza sativa
cattggctataaaatcattgaaatacttagaatcataagaatattataaaatttgaatcctagaaatccttatattttgttttggcactgtggtgagcttgctattaccaaattttgtagtaaaacaaacagtaccattaaatggtaaaaaaatgtaagaatttgttaggcatcaattcaaataatcccttaatccaaaatggcttgatgatttttcgaaagttggcttgaacacaggaagacaagatagaatatacttgcttttgttgtgtcttatttaaagcatttgtcagatggttggaatggttgcacacgaaaggagcacttggtatcggtagcttaaataatcaaacaatggaaatttgtgataccttgaaccttgttacaaatagctatctgtctgatcctcaaattcaagctagtggggttaagagcgagttgacactccatatatatctttcatgtacacctctgaaacgtaagaaagctcatctgaccgcagtttagctccctcttagacagaggccagagggagaaagagagagagagagaggagaaggctgagactgaacattcaagatggccggaggtgtcatcgtggcgaacgacggtgatggctccgccgtggaccacggcggacggctgacgttctcggtggtcatcacctgcctcgtggcggcctccggcggcctcatcttcggctacgacgtcggcatctcaggtgcacgcgcgcatgcgcctctcgattagtctgatcttatcaaaggaattaactgacctgacctgcttctgcgtccatcaaggcggcgtctcgacgatggagccgttcctgcggcggttcttccccggcgtggtgaggaggatggcggaggcgaggcccgggaacgagtactgcgtctacgacagccaggcgctgacggcgttcacgtcgtcgctgtacgtcgccgggctggtggcgtcgctcgtggccagccgcgtcaccagggcgatggggcggcaggccgtcatggtcatgggcggcgcgctcttcttcgccggcggcgccgtcaccggcttcgccgtgaacatcgccatgctcatcgtcggccgcatgctgctcggcttcggcgtcggcttcaccaaccaggtcagtgtcacagtcacacctcttccatcatcttccaccatgctgtaaatgcgtctgaccgtcgattagtattgagcgacacccttaatcctgcgtcagcggattgtccaaagtctttggctgatagacacagagacggagccatcatcattgctcattggtgaacttatctgctatttgctttcagacagctatgttagtatctttatattatatcaggatatgcttcgaagcagccactgccatgatcccaagtgttttttttattatttttggcttaaatataagggcaggtgaatccgcacatacagagaaaaaacgagagccaatccattcgtcaaatgactcaaaccaatgcgatctccaagtagtagtatactagtattcttaattatctgtcagtccactcatgaaactctaagtgcgattaagctatgaagaacgttgcagttaattacagacagctagtagtatactgtagtacttaggtcgattaccacatggcctattccgacatttggtgcaactaatccaccgatggtggtggtggcctggtgcgctgacctgtacccgccgagatgccgcgccttggcctcggtggcgtcacgcatcactagtaccaaccacgtcccgcgccgcgagtatcacacgagtgcaccgggcgttgcagcacgacgggttcgatcgtgtcgtgtgggttcttgacgaacgaaatgggcaggcggctcctctcttcctcgccgagatggccccgacgcggtggcgcggctcgctcacggccgggttccagttcttcctcgccgtcggcgtcgtcatcgccaccgtcaccaactacttcgcgtcgcgcgtcccctgggggtggcgcctctccctcggcctcgcgggggcgcccgccgtcgtcatcttcctgggcgcgctcttcctcaccgacacgcccagcagcctcgtcatgcgcggcgacacggcccgcgcgcgcgccgcgctgctccgggtgcgcggggctggcgccgacgtggaggcggagctgaagggcatcgtgcgcgccgtggaggtggcgcgccagggggaggacggcgcgttccggcggatggcggcgaggcgggagtaccgcccttacctggtgttcgccgtggccatgcccatgttcttccagctcacgggcgtcatcgtgatctccttcttctccccgctggtgttccgcaccgtcgggttcggcagcaacgccgcgctgatgggcaacgtcatcctcggcgccgtcaacctcgtctgcctcatgctctccaccctcgtcatcgaccgctacggccgcaaggtgctcttcatggtcggcggcgccatcatgatcatcgcccaggtaatcaattgcccaaaacgttcacttcatcagtagtactcgggcttgaactttttttttctcttgaaggttggggtggcgtggatcatgggggcgcaggtggggaagaacgggtcggaggcgatggcgaggccgtacgcggtggcggtggtggcgttcacgtgcctgcacacggcggggttcgggtggtcgtggggcccgctggggtgggtgatccccggcgagatattcccggtggacatccggtcggcggggcaggcgatgaacgtgtccatcggcctcggcctcaccttcgtgcagacgcagtcgttcctcgccatgctctgccggttcaggtacggcaccttcgcctactacgccgcgtgggtcgccgtcatgaccgtcttcatcgccgtcttcctgccggagaccaagggcgtcccgctcgagtccatggccaccgtctgggcgcgacactggtactggaagcggttcgcgcgggagcaaccaaagacgagcgccgacgaaccgaccgggacgtactgatgtttcacgatgtgtagatgtacttaattctgtggagtacatgtcttgtataacttttgaatcatggtacttggtcctagttcactcgtctgtttcaatcgaaatcaaatgtatagaactccaacatcggtcgctccgatcctacatagctcaagtgttgaaaaatcctcacgacactgttgcaagtgatttaggatttgaatagcccacgtgggtgtctagcgtggcaaaaaaaaaaaaaaatcgtcagcataacaaagttactgacaaagctctttaccctctacccctctctctccccccccctatagatggccatgtgggccaggccgtgccgtgcctgggccgaggcttgtcgggccggcacggcccgaccgacgcaccgggccatgccgtgccagcccacatgccgcactcacggcccaggcacggcccaacacgcctcgggccgtgccgggccggcccgaaggcacgatgggccatcgtgcttttcctcagaataagtctaaatttcctctctcctattgggctgtgacatatgtatagctaaaaaagtctattttacctccctcttctttgggctgtggtatataaatagctacgataaatctatttaaggtccctattctttagacaatgacatttatatgtctatttttagtccctatactttgtgtaccgggcctggcctgccggcccgaccgtgccgggtgtcacgccccgaattagtcctgaccggaactaacccgtgacgctccaaattaacctgttaatcgataccagtcccaggaaacagtgctggtatcacagggagacagaatatcacagcaacagaagtctcttcattatagagtagaagtacagtcatgttgggctgcggacagatcccgagctcacaactgcattacaaaaagaaagcggaagctaggacttggactaaacaatcacaggcgcgacttgggaactaggccgaaaccctaaaactcatcgtagccggcttgctcctggaaaaactcctcatcagcaggattcgcttcatcttcttcagcaactgaggggggggatatttatatagagcaagggtgagtacgggagtactcagcaagccaggggaaataagtgtttaatgcaggcttcaaggaatggctgttgtttttgcaattgattttatttgaactattttctaaaggcaactaagtgagtgcttctcaaacgacacggatgagacagtgcgtctcgtccgatcggagtatgtgcaatgtgtcagtctttagatcttgaaacaaggttggcacccggccaaaagctttttgaacggccacccgggccaacaacttttaaactgccacccgggcctagctgatcccatcagctgcaggttttccaaacatcgaacccagtttcacaacagcaatttcacaagcagtagtcaaacaaaactacgctaggaatcacctcacatccgcccgtgaccgtgggcacggctgttcgaacagtttaatgacctctgcagagggggtacactttacccacacgacattactaacccgggtcacccagcccgtggggatcagccacgtcgggagacctccaagctttcatgacaaggcatttcgaaagccgatgcaggtttaccatatgccgacgagaggggtcccagaccaacaacaggttaggtcccagaccatactgtgccaggaagcccaggggtcctccccgacaccaccccggcgaatccacatgtctctcggcatcaaggctcccctgataagctagttactcagccaggggtgtcccattccacccatgtggtcgtacttgtcttatgtttggatgaaattccaaggaatcggtccttaagtgcgagagcgggaaaccgtacacccggtacgttccccggtccgcggttttggaaattcatttagttcgcaagcaccgacccaagtgtcgggttttccaagtcttttggaaaactccagttttacccaagttgttactcagattttaagtttgaaggcgaccgtcggtactcgcacagagtgcgcgagtatcgaggcgcaactgggtggttacaaggggacatggtatagcaattaacaatggaaggatcaaatgcgacaatttaggtaagtccgccaatctgcttcgcagacgggacaacagattaagtgtgatcctatcaatgcataatattttgcaagcaacataattaaatttcaaatataggctcaaggtgttcaaaggtggcttgccttgctcgagatctggagcttgatcctcgaaatcctcgcactgcgggtcttcgggctccgaaactacacgcgaaacggggcaactcaacaaacagtgaaaataaagccctattaatgacctctgagcgtgccactagatagatctcgagatttgatgaattttggaagttgaacggagtcaaacggatttacggttgggaagatatagaatttctaagattattgaatttctaagattatttaattaaatccttttttggaaaagagaaagaaaaggaaggagggaggaaatttagactttcctcgggcggctagggtgcggcccaagggatctggggcggctcggccgagcttaatggtccggccggcccaaaacggcccaagcgcgcgcgcgcgcgggaggggagagagagtccggtggaccgggctcaccacgcgcggtcccgggtgggacccgcttgtcagcggctcggctcaccgtgcggagggagcacgcggcgcacgcgcgcgggcggggaggaacgcggtgcacgcgcgcggtccgctgcggacgcagatgcgacgggcccacgcgcagcctcacggcttgcggtggaacgcgcgcacggggagggaccgaccggggtcggctcgacccggtctaagctgagctggcgccgacgtggcgcctacgtggctgccacgcaggacggcgggaggtagacgacgacccggccgtgaatggacggcgggcggcggcggcgagcggcggagcgaactacggagatacgggcaaaagcgagcacaccgggcggttgttcgtgacagggggaggcgagccaacggctcggattcgccggaggtcgctcgacggcggcggattgcggcggcggcaaccggcggcggaagaagagggaaacggcgacgagagcatctacggcggtgagagcatctacgcggcttcgggaactcgacgctagcgtcggattgggcggaactacgccgagcgaggccggcgacgagcgggtgctacggagctcgggcggcgacggcggcgagcacacggcgagcgaaggcaacggttggggcggcgccggctagctacggggggtctattcgagctactaccgaaagctagggggaggagacggagcgaggagggggaacggagagagacatcaccgagaagaggaggggcgctgtgacgagaggccgacggcgcgggagtaatctctccggcctcgggccggggaaggggaaggagagggcgcggccgaagtccccttccgcgtcctcgaatgcaccggctctcccggcgctcggcgaaggacggcggaggtgagacagagcacggggcggcggctatggcgcggagacgaatggaagaggaggggtaaggggaggccgggggtttaaaggggacggcaatgtcggtttgagaaccgacttgcgcagtcaaggcgcgagctggcgctccggctagcggccaaattggcgacagggaggatgacgccggcggggaggaaaaggggaaaaggaagggggaaaaggggcttgcccctttgccgatttgggaaagaggaggaggggagcgggggcgacgcggcagagggagggggggcgctgcctccgtcccttggcggcttgcgcgcggagtggcgggggccgggcgatgacgacggcgatgacggcggcggtttggagcggagcggcgacactggcgacaggcgcgggcaggcgctgacgacggcggcgaccgagcggtcggccgcgcgcgcgggaaacagcgagaggcgcgggcgcgcgcgagcaacggcacgcggggagcggcagcgagggagagagacgctcggggtggctctcgacgcgcgagcagcgcgcgggcgaggctgagcgggggggggggaaggagcgcgccgggggaggggaagagagagagaaaaagagagcccgggagagagagagagatgggccgagcggaattcggcccatcgaaccccgggggaggcaaactaaactttgcggagggaatcgatttggaaggatttggattcggatttgaactcgacgatagatcggggattgagatcttgagagggcacggacactagacaacaatcaaagaaacaaatttcgcagatagggtttttaagagataattttcccgctaggcgccacgacggaacgggcgctacaccgggccggcccgaccgtgccgggccaacccagcgtgccggtggggaggcccaagcacgacctgacggtcgggccgtgccgtgcttgggccgggccaaaaaggcgtgccgtgggccgggcctttgggcctcgggccttatggccaactataccccccccccagaaattcccctctccccctctcaaatgagaattttcaaaatatgtcattctattcgtaccatcctcaggatttgccattcaattcataacactccgtccctccgaagccgcacaccgtcgcaagtccatgtcgcgccatccgtctgcctcatacgccgttgctcgcgagcttctccttcccacgcacgggcattttactagtatgttaatataagggctctaaaataaataatgaaaactgcaagagaatcagcgtcgaatacaacaatcacaatctttgttgtacgcataggaaattcatgtccgtggaggtggcgcgcccggggaaggatggcgcattccagcggatggcgacgaggcgggagtaccggccttattaccaggtgttcgccgtggccatgcccatgttcttccacctcatgggcatcatcgtgatttccttcctcccccccgctggtgttccgcaccgtcagccttgtccgcctcatgctctccaccctcgtcatcgaccgttacggcggtaaggctgcaaggtgctcttcctagtcggtggcgtcatcgtgatcattgcccaggtaattaagtgcacatgtccacttcgtaagtactccctccgtccaaaaaaaacttaacttctagagtttgaattttttctaaaaaaaaccaacttttatcattcttcctacccttagcacgtaaaacgagaaggcttattccttcaataccctttatctacctatcactcttactattttcttactgtttttttcaatgattaagaatattttattcattctcaccctccactattttcatcttaggatgataggaatggattttttgtgagacggagggattagttgtttgttccagcttgagtctcacatgtacggttttgagtttgagcttttcttgaaggttgggttggcaatgtggcatggatggtggtggcgcaggttgggaagaacgggtcggcggcgacggcgacggcgtacgcggtggcagtggtaggcgttcacgtgcctgcacacggcagggttcgtgtggtcatgagtgccactgcggtgggtggcgccgtgcgagggagatatttcccggtggacatccggtcggcggagcaggcgatgaccgtgtccatcgtgtccaggggcgatgagcgacgacgaaacgaaccaaccgaagtgactgatcgagattgatgtttcacgatgtgtaaatgcacgtacttagtcctagttcactcatctgtttcaatcgaaaaatcaaatgtatagctccatctttatatgctattgttagaagaaagactacttccattgctagtgtcaagaaaactgttccacttaatatttttttagaagagttttaattggttagaatattgtatattggctgctattgtacatattcagttgaatcatttctctgattattttagatggaattatcatcagaatattctgatagattctcggtgaggtcaatgcacctagctttaatcaataatggctatattgagaggaataagtgtatttggaagcttaagatgccacttaagattaagatctttacgtggtacttgcttaaaggggttgtactaaccgaggacgatttgataagacggaattggaatggtagtttaagatgttttttttatgaaaaatgagactattcaacatctttttatggactatcattatgcaaagtttatatggagagcagttcagttctcatttggttttaaccttcctactagcatatcctcatatttttgatgattggctattggggttgacaagaaaaagagtaaactgatatttgtaggagcatctgtcatatattgggctttgtggttgagcaggaatgatatggtttttaacaaatcaccatctatttcatatatgtaggtaatttttagggcaactcattggctctggttttgggcacaattacaaaagtgtgatgaagatggagagtttctaaaagttgcatgtcgtaatcttgagacgacggtcatgcaactgtttgccaactatggatggagattcacaaataagcttgaataaatgtgttctccttggtttggtttcttcatttttatggttggtgtgttcttctatttatggactacactctattctagggtgctactgtgctagtttgtaataattagctgtagctcttttgagcaaagacagggatgttatattacactagcaaaaatgctcatgcgttgccacggaaagaaaatacgagaaaattgaattaaaacatattaaattctaattaaatgaaatacaaattttctggaatatttgggtattttttaaataggtagatataaaattaaaccaatttacaagtaaactaagtgtgagaaataaaatgatatggatggatttaatttttattaaattcttcatattaactacaccattttaaattttcttggaatttacagagcttaattgctaattttgctaatacaaacatcatttcagcatttatttaaataaaaatccttcttttctctatgggccatttccagcccatgttcttcagcccgcaagcgacaaaagtctaaataatattcccatactcctctcacttgccgtgcggcctgtaacctcaaatgtgttggaccaacagcccgcgtgcggcccaagtggtccggtccgatgatgtaggccagcccagcgaacgatcgatgattggacggctcagtcgattccaaatcaatcaaaaccctaaccataaccctccccctcccccgatcggctcgccgtcccccatcccccctcttaccgccggccgcctcccccgccggacgccgcctatcgccctcccccatcggcgccggctctcccctctaccctccagcggcgccgcttcccctcccctcccctctcccttctagcagcgccgctccctctccccctctccctcccgtctcaccggcacggtgcggggaaggcggggtgcggcggagacggcgtccctccccctctccctctcctcgtcggcctcgacagccgtccctccctctcggtgacggcgccctctccaccctcaagatccagcagcgccttcccaacggcggcgtcgacagcgacgacagtgtcaaaggcgtctgcgggtggatccgtcggcgatggtggcgactgcaggcggatctggcagcggcagctccctccgccgcctctcttctcgatccctccgttggcggtggcaacggccgaggagatccgacggcgccccgtggatggatccggtggcgacaacggcgttggtggcttcctggtgatgtttttatttttcttcccattctttttctcaatttcgattggattttgtatctagtttttttttgctttatttgccttatgatgcactcggaagataagatagatagattgaatcggacttttttttttgttttcatgtttttttcgccttttttgttattgtgaatgacggaaacgtttttaatttttttaccgcttcacatataatcgaatccatgccacatataattggattcgattttttttcacccttttttcacggatggacgatgaaaacacctttaattttttaagtagtagagatacagatagagattatctaaattggctgctccgatcctagatagctagagacctgaagtcttgaaattctgaagtgagcgggccaccattttgcattcgaatcgaggacggcggcctcagatgggaagttacgttcaagactccgagtccaattcttgtgggccctaatgtcgtattgggccgaagaatccctacttcctacgcgtggccgtagcctaacgatttctgtgctgtgggcctgggcttctattcccactggactataagacattgtgcacgcgcgctctctctttcttcctgcgattacaccgaagatgtgcatgcacaccccccgctaatacagtcatacacaagagttgaagatcagtgttaaattcctaacatcactacatatttctataattctattcaaatatactcgtgtgtataatattcgtgagcaggaagatttaaacttctcagtggagtaatatactcacgatttcaccatcacacaaccactcttcccttctgtgttatatacaaattaaaactgcctccatgtgaaggtaaatggtggataaaatgttgggtgaaattacagcacaagccaaagctatggacaaacgtggggctgtacatcgaagaaagaaatggaaagataatatactgtaatatgggctttacctggttggcttgacccaaattatttgtgggccctgattacatgcccattgtatgcacaatttatatacgtactagtagctctcaggtcacatctcatactacactaatggcaacttgtatacccagaaagaaaaatggcaactagtataagactggatagagtagaccaccacttcattggatgggttcttttgtagatatatatcaccattcagttcattttacatgaccaactctgcatttatcgtttgcagatttctgtatcttcttttattcttttatacttcctggtggacgatagttaggcctgaactttgtagatagtacaaaataaacttctttactagtaattagaactagaactcgatcattgttgtgttgttataaataccccgtcgtattgctgcggaaaattaagctgtataatatttataaataagttgtaatatattttgtaaaccaaagcaaaatgatgtcttatgttttatataatttacgcatggttgcaaatataatgcaaggtgaaattgatacttcaaattttgagcttaaaaataattgagattgtatggttttatgagagaagaaaaaagaaactatgtgtatatagatctatcattcgcaggttagaaataattggaatgatgtggctttatgagataagtaaaaaataacattaactaaatttagtgggatgaactatataagtatatatgatagggtttaacagaacggtcaaaccaaaatattggttaatctggcattgccttaatgatgtggtttttaaccataaaaatatataacattatgcaggttatcttggtgtgttataactggttgtattcttgatgtatgatgctatcatagaaacaacataatactatgtgtaattatgctaattagtacacatttgaaattggtaaccaataagcttttgttctagtttggatgatgtaataccaacagaatttcatattagaatctgtgtgattttaaaaacgttatttcaactgattattttattggtgaaagttaaaggtttgtgacgtttgtcccatcacgttattttttttagttcttttctttttacttccgagatctttttggttgtctgtcctttggtaaggaccggagacgtaattcatttcctctgtctaaaaacatattagcatcaaacaataatcaataagaggctaaactgcagttactgtactttattcatgattatgcttattttttgaagcctcgatgtgttccaaaatcacactttgaattttctatgtgctcggtgatgcgtgcctttcaactttttgatgcggatgtgacgaactaaaatttgacctgagttaacatacaagagatgatgcgccttatgtacatatggacagtagatagttgccggacagccccgctaataatgtactagtcctttggaacttttttgttaccagcacgctctcaaagcggaagaactactccggtggcaaacacactcaagatacatcatacatgcatccatttcgctaattaatttgttcccttaattggcactttgaatctaagagtgtgcggtttgaacattgataaaacctgcacatcagcgtgaacttgatagagtttttttttaaaaaaaataattaggcggtgaacttgatagagttagatcaagccttcaactgccgtgacaggagaggctttgtctctgtgcatgtccacgtgttatcgctttcctcacaattcatcgcactctcgctcgttgatgtactgcctccccggctcccccgaagtcagaaatccacaggggatcggagcacagtgtgtgacgcgcgcggcctataaagagaccccgagacgctgcccctctttccccgtgtagagttcagaagctcctttgctgagacagatttccgagtagccggcgaacgctttgccttgctcgctgtgtagctagcggagggcttggagcgatcgagcgatcgagcgcgtttgcacggggctaagcgtggaggagaggccggtggtgagccagcagctgtgcaggcagccaggcaggcagcaagctagcggccggctagtcgatcgcgcgcggctccccgcgcaatggcggcagggacagaggcggcgcgggactacggcggcggcgtgacggccagcgtcgtggtgacctgcctcatcgccgcctcctgcggcctcatcttcggttacgacattggcgtctcaggtatagtagctgcctccctcttctcatcgtatattctctgcgaatccgagttgatcaactaggtagaaatcaacctcttgcgcgtctcacccgggctccggccggtaaaacactaaaattttcgaataatcaggtgcggttcggttgggtcgggggtagggcagtagcattttcttgtaatttcgatgaaaggggatgggtagcgctgtaattagttttggagcgaagctgcgaagcgatgtttttgccgctccatctcgatagtataattttttggagcgattcaccccgctccgctctattttttggtggatctatcgtttggcacagctccagctctagataagttggggctgggagctagacctatgttaaacggggcgttaatcaaaacacacaaaaaaaaaatcctcatgtttgactgctccagcagcatgtttgttgatcttcgaaagaaagacgcattcatcaagcatatatcttattcttcctcaccagctgccttgatttactgacacagtaccctgatatgctaatgggccagactaggttggttggttgggaccaccgaaccatcctaggcaagtactattctgttttgggatttgggttgtggaaaaagccagatttaattatgtggcgctaaaagaaatacttgcccttcacataattttggaggccgggtttgtggcattttgcctttaacgtactgtcatgaggttcattttatcagcatttgggttccaataattaaggccatgattccaaaccaacaaaggaattacttcttccccttccaaagttagtgggtgataatatggtgtcacgccccgaactagtcccgaccgggactagcccgtgacgctccaaattaacctgttaatcgataccagtcccagaaaacagtgctggtatcacaggaagacagaatatcacagcaacagaggtctctttattatagagtaggggtacagtcatgttgggctgcggacagatcccgagcttacaactgcattacaaaagggaagcggaagccaagacttggaccaaacatcacaggcgcgacttggggactaggccgaaaccctaaaactcatcgtagccggcttgctcctggaagaactcctcgtcagcgggatccgcttcatcttcttcagcaactgggggggttatttatatagagcaagggtgagtacaggagtactcagcaagccatgggaaataagtgtttaatgcaggcttcaaagaaagactattgtttttgcaattgattttatttgaactcttttctgaaacaacgaagtgagtgcttctcaaacgacacggatgagacagtgcgtctcgtccggtcggagtatgtgcaatgtttcagtcttttgaattgatcaagattggcatccggccaacagctttcaaacggccacccgggcctggctgatcccatcagccgcagattttccaaacatcaaacccattccacaacagcaaatttcacaaggcagtagtcaaacaaaactacgctaggaatcacctcacatccgcccatgaccgtgggcacggctgttcgaacagttttaataacctctgcagagggggtacactttacccacacgacattactaacccggatcatccagcccgtgcagaacggccacgactagagaccttaaggctttcatgacaaggcatttcgaaagccgacacaggttcaccatatgccaacgagaggggtcccagaccaacaccagattaggtcccagaccatactgtgccaggaagcccaggggtcctccccgataccaccccggcgaatccacatgtctcttagtatcaaggttcccccgataagctagttactcagccaggggtgtcccattccacccatgtggtcgtacttgtcttatgttcggaggagatggattgaggagggagaacggggagatgcgctatcgtgcggacggggcgcagtgacgatgggccgacggcacgggagtgatctctccggccttgggccagggaagaggaggaagacgagctcccggagtccccttccgcgtccacgaacgcaccggctctcccggtgcttggcgatggacggcggaggcgagatagaggggcggcaaaggcgcggtggcgcgagcgaaacgggaggaggaattgatgggagggcgccttggtttataggacgacgatgtcggtttggaaaccgaccttgggcggtcaaggcgcgagctggcgctcggcgctcgcggccaaaacggtgacagagacggatgacgccggcggggaggggaaaaggaaaaaaggaagggagaaagggagcttgccccttgcctctttggggaaaaggaggagggagcgagggcgacgcggcagagggaggaggagctctgcctccgtcccttggaggctagcgcgtggagtggcggaggccgggtcgtgacgacggcgatgacggccgggcggtttggagcggagcgacgacacgggcggcaggcgcggcaggcgctgacggcggcggcgactggccggtcggccaccatggcgcgcgcgcgcgggaagcaacgggcggcgcagcgatttgggcggcgtcggcgggaaacggcagcgagggcggagggcgctcggctcggcgcggctcacgcgcacgcgtgcgcagcgcacgggcagagcgggggagagggagagagagagagagagagagccggggagggagggggagatgggccaagaaggattcggcccattgaacccgagggaggcgaaatagacttttgtggagggatttgatttgggaaggatttggattcgggatgaactcgatgatagatcgaggatttgagatctgagatggcacggacactagacaacaagcaaagaaacagatttcgcaattaggatttttaagagatagttttcccgctaggcgtcacgacggaacgggcgctacatatgggtgggtttagttcacaccaaaattaaaagtttggttaaaattaaaacgatgtgatggaaaagttgaaagtttgaagaaaaattttggaactaaactcggccatgtagtgtaggtatcgaatacttctgttgtttgattggtcgatcaaaaggtagatactaggttacccagaattcttctgtcgcgttcgcgaaaaataaacccagaattcttttgtcagagatgggcacacagttctacgttttccttcgcgccacaggcagctttagaactcatttgatatagaggatttataggaatttttgcgtaaattgaactgcttcttgtgaaatttatgtaaaattttatccttccgaaaggtcgaaaggagcccttatattgaataccgtagatatttggattgaaatcaatttctatttaaaaccattttcgctcctagctagaaacatctccatcctcctaaatttagtagcgccgcctaaagttttatcaagatatatagagaataaacttatcctttcagttggccttttgttagttggaaaaattgctctctagttatatatgatgtagatgtcatcgctgacttggtggataaggtgctcaattgtttgttcttattaatagttccatttgatacagagtctgatgcaaggaatattgtattatcagagtcactacatagtacatatctgggaatcaaatttgacttagctttaaaaaatccacaccatatatattgtctacaagataaagcaagatttagctaaaatattgtacaggtcaaaaataatcttggacatattcattagcaatttttttaagatcacagattttttttaaaaaaaagaaattgttttgtcatggagagctccaagcctccaaaaactagctaggctgtccttgagaggctacgatgcttgccagctgagcctgagtacctgttattttcaccgttgctagtgatcgaccgatcgcttgatagctctagctctagctagaatcttattccaatcgaatttgatcgagtttcattatgttgcttaacacggaagctaacaaggatatgtcaaaagcaccaacacattttgccaaaaaagcatgtagggaatcagatctgcagcaatgcttcagggacgtaattaacaccacaaattattcactagattattgaagcagattatttgctgatcactcgttttaagtcatcttttaagtttgtttttttctaaaacatctaatttatcaagtaaataatccgtcacaataatccgctaaacaatccgaaaggaaaacgacctaagctaggcacttcacaattatattagcaaacgcag

SEQ ID NO: 16148 - DNA, 1210 bp, Oryza sativa
tctctctctctgttgcacaggtggtgtgacgcagatgcaatcgttcctgaccaagttcttcccggaggtggtgaaggggatgcgtggcgcgaagcgggacgcctactgcaggtacgacaaccaggtcctgacggcgttcacctcgtcgctgtacatcgccggcgcggtggcgtcgctggtggcgagccgggtgaccaggatggtgggccgccaggccatcatgctgaccggcggcgccctcttcctcgccggctccgccttcaacgctggcgccgtcaacatcgccatgctcatcatcggccgcattctgctcggcgtcggcgtcggcttcaccacgcaggtcgcggcccatttaaatttagcccaacaaatatatcaggcttagacttggcccaacccactaagataaacttattgaggcccaccatattaaatgggcccatttggaaaaaattgcttttgcgtcgcaggcggctccgctgtatctcgccgagacagcgccggcgaggtggcgcggggcgttcaccgccgcgtaccatatcttcctcgtcatcggcacggtggccgcgacggccgccaactacttcacggaccgaatcccgggctgggggtggcgcgtctcgctgggcctcgcggcggtgccggccacggtcatcgtggtgggcgcgctcttcgtcccggacacgcccgctagcctcgtcctgcgcgggcacacggagaaggcccgcgcgtcgctccagcgcgtccgcggcgcggacgccgacgtcgacgccgagttcaaggacatcatccgcgccgtcgaggaggcgcggcggaacgacgagggcgcgttccggaggctgcgtggccgtgggtaccggcactacctggtgatggtggtggccatcccgacattcttcgacctcaccggcatggtcgtcatcgccgtcttctcgccggtgctgttccggacgctcgggttcaacagccagagggccatccttgcctccatcgtacttaccctcgtcaacttgtgcgccgtcgtcgtgtcttccttcaccgtcgaccgcgtcggccgcaggttcttgttcctcgccggcggcaccgccatgctcctctgccaggtagtaccatgcaactcactctccattgttacgtcacaagtttcagatagttttaattaacttttaaaccgtgtgtgactaaaatcaatcaacgagtcggggcgggg

SEQ ID NO: 16149 - DNA, 3300 bp, Oryza sativa
ttcctgcagccccgcggaaaactttgctaaactctccacgagacatccctgtgtctatatggtatcaaaacagttatgaaaattttaacttgcatgcatgccatctaagaaacgagggacttttccaggagagtttagaagaattcagtgtgtgcgagctcatccatgtcttggttggcatgcagcttatgtgtcagtgtgacagtgtgtgacttcattgttctgctgaaatcttcaaactgtggtttcggttgacaagcatgcatgtggtaaacaatgtgtcaagttgtaaacagatatagcttatggccaactgaacatgtcggcgtgagttggcaataagagcgtccatggagtgtacaccaaccagctagatgcgtgtttgcatgtttttgttgattgattaatctgtaaagggaaagaaggagatgaatgttgttgattaaagattgctcaatgatcatgggttgtgtattgacttccatatttttttagggattaattagttgttctgttgacaccgtgcatcacgtgtgcatgcaccaaacaacaaaccagtttacttggatgacagcatatgagttgcaccgtgcataataaaataacctgtttaaaatggataatctatcgaggcgtttgttagtggtgctactccgagaaagatgagaaaaataaaacagagcaaataaaatgttttagagcagcactttaattttgtatttttaatagcggtttgagaggaaagtctaaaacgtagctaggcagcgatggaataacgacattaaaactaaaaccaagtacaagttagcgagcagccaatggagctacttgtgccaatattttttaaaaaaattacacagtacaacgcaaacactcacaacgcacgcacactcatccctatgaacacacgcacgcaaatcctacccctatgaacatctttgaagactgggccagtaaatccatcctaaagattgacgaagtcattacatgtgtctcgctgtcgagatagtaaccaatatatagtgaaaagaaaaacatgccacggtcgttgcataaatcataaacatgcatggtacgctagatatatctttcactagggttttatgggttaataatcatttaatttcaagtagttttagtcaagatttacaataaaatgatttttttttaaaaaaagaaaactatgcgtacgatgcactggttagttgcaacatttcaacatttttgtcacgaatttgtggatgttgaaaatacccttgaaagtcaagggatttgcattgcggggtaatcttacaaaacacaatttggtaaaaagaaatagatattgtttttagcaataatgagaccgtatccggatccaacatttcttttgtctcccccttagttcatttaggttgatgatttgctttgtgcatcaaaggtgtagtggctggatatacttattcatttatttaaaatgggaaataaatataataatatactctccccatcttaaaatataatacttcttgttcaaatacctatccatggattactatattttagaacaaagatggtactaaaatagcaagtatgttttacaaccatgacctttccacaatgccatgcactttccaatcttcatcctgtatttatgttggtttttgcaatgtgttttttaaccctgaaacagcagaagagatttctactgtaatttatgcaatgtgtcattaatggtttttctttttttcaaaactgttgtgaaggagagaaagtgaagtgcttactgactcaagtcttcctacacctatagttgtgacttgtgagataactagaaaattaaggcctcttttgggacatggaaattctatgggattttcactagaaatcactttaacgcaagcaatagttaataaaaagctttagaaatttctatcatatgttatcggtgaatgcttgggtctgcaaaataccatcaatggacatgagttttacattactatactatcaaacttcttcctttttgccatcgtcgttagagacatgttaacctttctccgttttggagttataaaaagtccaagttacccctattgtaacaggggccataaaagaccgcaatggtgcccctagtggtaagatggatattttacagtgtaaaagagaagacatgttcttaacgacgatagcaaaaatgaaaaaaaaacggaacgatggcatattatagtgcctgatattatgtaagaaggaagttgtcgatggcgtttttagaacgaagtctttgttgacagtatattgtctaatttctctaaatttttttgtgtgtcaaagaagattttggtacatgtggaatcacaaacttttgagaattcctctagctagaaactgaactatatcagttaatgaaacacatgttcttgatatgggctctaaaccgaaggtggagtcttccggcattatcggtaaaaaagaagtaaaaaataatctcaatgtcaacgccctgccagttatttgaagcattctgcaatgtcttcttgcaattaaatggcgatatttagccactatgagttattcacataaccacttgctatggacagctaggctgttcagatgctgcaacccgtgcatctaagcttgcatccctaatgagattaagatatcttgaaagatcgttgtgtagataccacagaaatatactagtataatctaggctcaagtggctcagaaacagaggcttcctgcactcttcaacggatccaaacagaggatgcaaagcacccggctaagctatatatactgatatacagcatccacgcacagtactaccttgcaagttccaaccattgttataggcaatctgatcagagcaagagagcacacgtttagaaatggccggaggaggatttgccgccgccggcggtggcagtgctcgcgactacggcggcggcatcactttctccgtcgtggtgaccagcctcatggccgcctcctgcggcctcattttcggctacgattctggcgtcacaggtgcgtactctactacagctacaggccatggctacagcttcttgagctgttcccagccctgttctatgatcatttctactagcttacaagcatgtggtcttcaaaaaaattctttcatgtttaaagcagaattgtttcttattacatcccctcaagggattaaaacagttttctcttttcgttacttattttacctggttccattatagctggtgtgagaaattaagcagtttgtcagaatgatttatttgggatgatattctgattttttccaagactggtcactagagaact

SEQ ID NO: 16150 - DNA, 12365 bp, Oryza sativa
tcatctcaatcaggccagatttgttaggatgcaggaaggcatctatatatcccgcctgaaagttacgggctccatcggttgcctacgggtgattataagttgtaacggtttataaataataaaaaattatttatagatgaaacttttacatatatatccttagccacttagaagtcaatgttgatgttgaaaaagcatcgaaatcaactttaaaattaagttttaaaatttaaggggctgttcagatcgtagccaagataaatcttaccaaattttggcaataccaaaattttggcaatttgacaatattgctaaaattttagcaggatttcttatgtatttactaaagtttggcaagaaactaaatggatgtacatattgggcaactctacccaaaaaatggtatcgtttgaaatggcatcaatttgaacaagctctaaattttaacaacggtttaaagcatagagtaaacaacgaggtccttggacttgtggcaatgctcaaaatttttttctataggagaattatatatatgcatacccatacattggggtattgtgtgagtgtgtttagaaaatttctccttccggttataaatattttttaataatgtccggttataaatatttgatattttagaatataatttctcaaaatctgaaactatggccatcaataatctctactacttaaaaaataagaggtgcttccatcgtacgtcaaaaaaaccagacgaagaaaaccgagcgaaaaaaatcgggcgaaaaaaaagagtccgatcaaaaaaggagaaaaagcgggagaaaaaaaatgaccgatcaaaaaaacggagcgaaaaaaaaaaccaaaagaccgggcgaaaaaaccgaggaaaaaaaccgggcttaaaaaagagtccgatccaaaaaaaaagggagaaaaaaaagaaaaaaaaatgtccgatccaacaaaccggaccgaaaaaaaattgtccgatccaaaaaaatacggggcaaaaaaaagaactaaacgaatcgtttaaaaaaagagcaaaaaaaatttaaaaaagtgtccgatttcaaagaaaaagaaattatatgtgatacggtgaaataaacgaccggacgaaaaaaataaaaaaaagggcgaaaaaaacaaatatgtacaataaaaaaggaaaaaaaatcaaaacgaatccgactccgtcgactcggtaataaaagggtgaaaaaaaataaaaaaagtctgattccaaataaaaagaaattatatgtgacgcagtaaataaaatggaatcctatttatatctagaaaggtccgacactataagaaagtggcgaaaaaaaccgttcgtaaaaaaatgcactacaaaaaaaaataaaaagggcggaaaaatgtctaatttctattcgtcgttttagtagtccgtttatatctcttctttatctctaatctaatctaatctaactattttaaaagagaagtttctaccgtatattaaaaaagaaataaatgcctgagaaaataaatacggtttaaaaaacgcgtgaggaaaaaatgtcagaaaaaagcgcaaaagaaaacgcgctagaaaaaagttccgtagtccgtaaaaaagcacacgagaaaaaaatatttccatcgtctatagaaaagaaaaaaaaagcatacatggaaaaaactattagaaagaagcgctaaatagatagacacttggtcggataggatccattgactttttttctatctcggggtacacgacttttgtttcgtcatctattctcctgtattggagaccctgcatatcttcgtaggcaattatcatactatttttgtgaagtatagctactattcttgataatatattatatgaaataatattagaaaataaacatattttaattgttatacagataagagtggacagtgactctattttgtgtagacttgatcatacgaggcaatgcaggacttgattggttgcaagaatgagattaaaagaatattttagattatatgcatgttgtcatatgaataatccaattattttaagtaaagcaagcatcgtaaggttgccatcatcgaggttgggctattacatttaagatgttccaattttctgattgtcatcgacatggttatgcatgaaaaacgtatattatcattacgttttttcacccgttgcaacgcacgggcatgtttgctagtttctattacatagcaaacatgcacacatacacaaacatgatgtgtagaaaacacacaagatattttcatgggtaccaaaaattgagtcctggtaggtggagttcgtgcaccaataactccaccatcacaccatcggtgtttctattacgagacaatccattatgtgcctttaactttgtcccaattctacaatatgccactgagtttaccaagttatacaatataccattgtattttgtttaacttctataatatatcattgtcgtctagttagccccattagtattgtacattcctaatgactgaaatacccctgaagagaaaatttccaaaatttggccgaaattccgaaatgtcatattgtaaactaccacggaaattgcccatatcaaactttggaagttttacaatctaatatttcatgattttttaccaaaatttggaagtttttatcccaagggtatttcggtcattaggataaaattgtatagtactaacggaggctaactggatgacgatgatatattattattatggaagctaagccaaatgcaatggcatattataaaactagacaaactctgtgacatattatagaacgggaacaaagtcagtgacacaatgtattctctcttctattatcctaatataaaattaatggttaaagtttgatagaggtactacctgatgcctccgaaaggcatacagagaagtaaaagtgtgggaaggttcaagttttgatgtgtaaaatggtgtaccaattttccgggtaaaaacttaggcatatactccaccttatttagagccaaatttaaatgtggtactgctcagagctaggtttgttgttccttttttttgggcacagttaagcatggccaagaaaaaagacgtataccattcaatcataggatgtgtttagttcacgttaaaattggaggtttggttgaaattagaataatgtgatggaaaagttgaaagcttgtatgttagaaaagttttaatgtaatagaaaagttgaaagttcgaagaaaaaatttagaagtaaactcggccatattattactccgtactagatactgtattaccgtgctacttgtcggtccatgactcctcgttgattacaggtggcgtgacgcagatggagtcattcctgagcaagttcttccccgaagtgctccgtgggatgaagagcgcgaggcgcgacgcctactgcaagtacgacaaccaatggctcaccgccttctcgtcgtcgctcttcatcgccggcacgctgtcctccctggtggcgagccgcgtcgccagggcggtgggccgccaggccatcatgctcctcggcggcgccatgttcctcaccggctccatcatcaacgccgccgccgtcaacatcgccatgctcatcatcggccgcatgctgctcggcttcggcctcggcttcaccctccaggtacaacgtggaacacaatatgatcagggtttatcataccgtacggttatatcacatgcggtaatcttttcagttttttgaaaccacggtgtactccacaataaccgcatggttaccgtggtaaccgcaaaccgcagggtgacggtaacaccatcccaaacggtttggtaaacccgtttggtttggtaacgctggatacgatacgatacacaaggcccagcaatctaggcccagttcatcaaatccagctcagttccaactcttcttttttatatttttccggaaaaaaaaagggttacatttttgttgctggtacagtcagctccggtgtatctgtctgagacggcgccggcgaggtggcgcggcgcgttcacgtcggcgtacaacgccttcgtcgtgatcgggatactgtcggcgaccatcaccaactacttcaccaaccgcatcccggggtgggggtggcgcgtctcgctcggcctcgcggccgtcccgggcaccatcatcgtcgcggggtcgctcttcatcccggacacgcccagcagcctcgtcctgcgcggccaccacgaccgcgcccgcgcggcgctgcagcgcatccgcggcgccggcgccgacgttgacgccgagctcaaggacatcgtccgcgccgtggacgaggcgcgccagaacgaggccggcgcgttccggcggctgttcagcaggcggtacaggcactgcctggcggtggggctcggcataccggtgttctacgagttcaccggcatgatcgtcatctccatcttctcgcccgtgctgttccgcacggtggggttcaacagccagaaggccatcctcggctccgtgatcaacagcatgaccaacctcgcctccacgctgctgtccacctccgtcatggaccgcaccggccgccggccgctgttcatcgtcggcggcgtcggcatgatgctctgcgaggtggccatctcgtggatcatggcggaccatctcgggaagcaccagggggtgacgatgccgcggagctacgcgaccggggtgctggtcctgatctgcctctgcacgttcagcttcggcttgtcgtgggcgccgctgaggtgggtggtgccgagcgagatctacccggttgaggtcaggtcggcgggccaggcgctgagcatctccgtcgcgctctgcctctccttcgtcgagctgcaggtgttcatcgcgctgctctgcgccatgaagtacggcgtgttcctcttctacgccggctggctcctgaccatgacgatcttcgtcgccgccttcctgccggagacgaaaggcatgccgatcgaggccatgcggtccgtgtgggagcggcactggtactggaaaaggttcgtcaacgacggcgaccaccacgacggccgtgtcgtcgccgacgagggtaccgattaaacatttatccggtgatttggtggtgtgatgaaccgtgtgatgtatgtgcagctgcacggctgtggccgttgagcatgatctaacatttcagtggcatacattgcccattcttgattaatttacccaaagtcgtccatcttagccttatactacgatcgagaacgcacacgctaactaaatttctgagatcaaagccaaacattccgcatcggcatatgcggtgcaaattttaggtcgacacgtcgccgaacttgtggtccttgacgaacctgccccagtaccagtggcgcgcgaagacgtggcccatggactcgagcggcacgcccttggtctccggcacgaaggcgacggcgaaggcggtcatgacgacgagccacgacgcgtagaagaggaaggtgccgtacttgaagcagcagagcatggcgaggaagcactgcgcctgcacgaagttgaggcccaggttgagcgccaccgccacgccctgccccgccgacctgacctccaccgggtagatctcgccggggatggcccagtacagcgccccccacgaccagctgaagctcgccgagaaggcgcacgtcatcaccagcaccgtcaccgcgtaccccttcgccatcttgctcccgtgccccagctgcgaccccacgatgctcgccattgccacctacgatacgcgtcggctcgacgtcactttcttgttgctgaaatgttgatgtgcgctctaggtgagtgtttgtttgcattgtttttacctggcaggtgaacatgagcgcgccgccgatcatgaagagcagcctccggccgtagcggtccatggcgaagcccgagccgacgatgccgaagatgttcatgaggccgagaatgacggcgcccatcagcgcggcatcgctctcgaacccgactgtgcggaacagtatcggggagaagaaggccgtgacggccacgccggtgaggttgaggaacaccgggaacgcgatggccatgaccaggtacggccggtactcgcgccgcaggatccgccggaacgcgccctcgtcgttcctgcggtcgtgctccacggcggcgaggatgtcgttgaactcggcgtcgacgtcgacgcccttgccgcgcacccgctggagcgcggcgcgggcgaggtcgtgcttcccgcgcaggaccaggctgctcggcgtgtccgggatgaacgccgcgccggccaccatgacggcggccgggaacgccgcgaggccgagcgacaggcgccatccccacacggggatccgcgacgtgccgtagttgatcaggttggcgatgaggtacccgacgctgatgaacagcgggaagccggagatgaacccgccgcgccaccgcggcggcgacatctcggcgaggtacaccggcgtggcctggcccgagaacccgagccccaggccaagcagcatcctcccgatgatgagcatggcaatgttgaccgcggcggcgttcacgagcgcgccgaccaggaacatgctgcccccgatcagcatgacggcctgccgtccggtccgccgggtgacgcggctcgccaccagcgtcccgaccatgccgaacgcgtacagcgacgaggtgaacgccgtgagcgcctggctgttgtagatgcagtacacgtccttgctcgcgtgcgccgtccccttcagcaagcccgggaagaacttctccaggaatgactccatctccgacacaccacctgatgttcgtcgcagacatgaacaagatttgtatctcaaacgtaacgaaggaaaccgatgataaattgatcacttgcagaacacgagcaacccaggcatcagttcaagtttcatctttgcgaccaactaaaactagaacatatgagagtgaataacttgtgtcacgtaatattttgtgttttacatacactttttctgccatgcaccaataatcatacatgctggagatagtggtttcgagggatctagattgtcttctactcttctatactgtagacaaccattaagctatgggggtaacagtaaattactgtagtgagtgacacgctgtagcgattactgtggtactttgatctcagttgggcattttcaaattccaatcagatggcaaagagaagtcataatgcaaattattgtctctttcaatggtaagccacatgctactacaaaggatccaattcaggtgctgtgtataataatagtaaggaacggcagaaaaagaaaagctttttacaaaacactatggatgcaccatggtcatttcattagaatttatttcttttcacgttgatagggattcctagtatttctatttgacgcattttagtcttgatcaatcatcacatcaacaacttatctccttagaaaaaaaattccgatcctgtcaaagcccacacaccatcactcaagacatgataaaaacccgattccccgatccaaagcaagatttctaccatcgagtggcctacaaatactactatactcgcctatatagcacatactaataatctcgacaagcaagctagccatgccactgaagaaaaagaagcaatcataatctctcctttcttttgttgcaggaaagcaactgagaccaaggattccaggaagatgcccgtgaattacagctcggggtttagcgcagaaaagccgcaccaaaactcgcggcaacaaaaggaggggcaaataagatatacgacgagacgccaccatgacatctggtctgaccgaagcagcagattgcacacagaacgtccaaagttgcaagtaactgtcgatgcacacctagcgacaagttgatgtactacgttccgagcgtaagatgtgggagcagctcacgtccttttcccacattccacatgagcctcatttaaaattcatttggaagatgaggtaaattttgaggtatataaaatctgtactcatttaggtctcgtttggaagatgagaaagttttacactattaagtgtgtgcttcatataggctcccatcggatggcccaataagccaaattttgaattttcaaacttaattttgagatattttcaacgtagttttttttagcattggcttttaagttacaaagagcacatatataaaagttttacttacaaatttatttttattccctaataagccgttttggcttattagaaaaaaaaaagccaaccgatggagcctataaaccctaaccgaattttaaattttagaagttaattttaaattaatataagtgtttttagtgttttttattgtttttgtttggtattggatttaaaccactaacagagctatatcaaattttgtctctatttttttttgcttcgctgacatgttttaaccgaaaaataaataaaagaacagaactatataaaaaactaattctaaaattttgcgtttcaaacgggcttaaaactttgaaatacagaaagtggtaattcccaagaagattactgctgctatgtgggaatagaaaaaaaaatgtgctgctcaaaataaaatctcactatcttccctaaaaaaaaaatctcactcatctaaaaatatctcaggtacccctcaattctaaaaatgactttgatttttggctcagtaaagctctgattctaaaattatgtttggttgtcagccacattttaccacagtttatcatgtctaagattagataagtttgatcataattgtggcaaaattcacttttaataaatcaagtcccacacgttaatgaatcaagaaagtgtgacaagattatcttagacttgttaatgtgggactcagaatttaattatctcaacttaaacaagtactaacaatatttaaaaacgtggtaaaatatagttaggaaccaatcacacttaacagcctcacgatggaaagagagtcaacggacatacttatgggctctaaaggtttaactgtaaccaacctgacgtgtctaatggcgctccacgagaagatgggtaggccgtacaccggccgctcgctggccccgccgccgcagtgtggccatccaattcgaccggattgtgtcgcctcacctggtcccgcccaagcaggtgaacgggcccacgtgtaaggatctgccaggtggggccccacctccgcctctatcccctcctggccgtccgatggctaacgcgcggctcggatcacgcttcctcgaaagatatctacttcctggattttcttctgtgatgtgcccggttaatcagcagctgctgtacgttcggtttgacgagagaacaagagctgcgtcctcttcggcctctctgggctttgatttgaatgaacgcggaaatatcacacgagaactaattgttctcccgtgaatcttctcaagaatagaaaaaaaatatcctcttcctctgttgtaaaattcaccagtttgattggattagatttgttcgctcgcgtgatgcttacacctgcgcgctgatttttttttagattattaaaaactgaggccagatttggactactccatgtgttgggaatctgccgtggaagaagcagaaacggaataaagaaaccaaggggggcacagggcagcagttgagatgcggctcggccatggccgcttcagatcaaagaaaatggtcttggcttgtagcgagtgacttgagagacccaggaatcaagtcctcaaagtgggctagccacaagccacaggagaatcgtatcgttgtcgtcgaggtcgtgatgaggggagatatgatggattgggagaatcaccgactaaaatgagtggtaaatcaaatcgaatcctacgcgatacgtgtgcagagatttcagaagaagaagaaaaaaagaaaaccacggaattaaacattcagaaaaattttcagaaaagagcacccccaaaccgcatgcaattgcaaagtaagcgatcgatcgaatccgatccatctccagcgcacctgagatgccaatgtcgtagccgaagatgaggccaccggaggccgccatgaggcaggtaaccacgaccgggaacgtgaggccgccgccgctgccgccaccgccgccgtagtccgccatgccgccgctattgaggagggagccgccgggcattctccgtcaccaatcttcagagcggccaaatgttgttgctgctgctgctgctgatgcctgatgatagtgttgggagtccaaagccctccaggggggagagtctttatagccactggcctgcctgcctgcctctgtcgctagctaccactcctactattcctactgccaggaccgtttaattctggcccctttcacatgaaggcgctgctctgctgtgccgttgcgttgcgcgacctgccttatctgcccccgccagcgccgcacagatcaggcggccgggccattatcccaggagggaagaatggacaaattcttcgtttcgtttcaccggcgcgcgcccgcgtgaagcggctgcctctctcgagtctcgactcgacacgtcgtgacaacagggggagtaacagtgtcccaaatgcggccgatatgatgtgttggtgcggttacaagattggcgccgagcgcgtaaaccggatcggtccgttttggtggcctacctactatgctgccccgattggatgctcgcgtcgcatataatggatggcacccgagcatatatgtatcgctattcgctacaagttcctgcagcttttgtgcatgcctctgtggcatatatgtgacatgtatagtcccgtcctgcacattatgaccggccggttgcacgctacttcagttccattggtctaacagatgtgtaatccaattgttccggtagctgatgaagaaaggtatacatggttcacactagcttgtagattaattcaccgtagcacatcctagtcgattcttcctcaatcccaaaacaaactttttttagtgtgaatctggacataccctaagcatattttatttttatatatgaaactgaaactgaaactgaaactgaaactagagggagaaaaggtgtgatggaaaaactgaacttgtactctctttttttaaaatgggaaagctttgctctcctagtatatatatatatatatgtatatatatgtatatatatatatatatatatatatgtatatgtatatatatatgtatatatgtatatatatgtatatatatatgtatatgtatatatatgtatatatatatgtatatgtatgtatatgtatatgtatgtatatgtatatgtatgtatatgtatatatgtatatgtatgtatatatatatatatatatatatatatatatatatatatatatatatatattaacacaacaagttcatctgtgcacgtataccacatgcgcgcaggtgtgttgttgttcttctgcgttgcgcctctctctctctgtatatatatatatatgtgtgtgtgaatctagacatacttaaaaatatatatgtccagattcatataaaaaagatgatttattttggatggatagagtatatcggtgtacggatgaacgtaaaccaacggtgatcggttcatccaagagctggcttaccaaatttaggttggaaactttgggatcatacgcacccagatgtggaggaagaaatcagcacccgttccaatcccctagcgcgctattctagctatgtacggatgcacctttgttgcacgtcagtcggaaggcaagaaaatagtacgacatcgacatatatacccagaagctagttcacgtatgcgccgatcaggcatcccgcggttgaaagcttaataaaaagtaggcaaaagcacttgccggaaggaggcgtactctgttgatatccatttccatttttctttcccagaatatatgaagaacttgtgcatcacggtatagaatttaagttgcggcagactaaaatttaaaactttaaactttaagctcgatgctttttcatcgtatttattttctaccgtaactcttaggtcaccaagaacatatataaatatatataaaaaaaactatatctataattttttatcactaataagtatttaaggtttataatcacttgtaaatgaatcaggctcatagttttgtatggtgttcgtctctaccgaagatgaagtttggacatggaaaataagaaaagtattagcgcatgactaattaagttttgattattattagcttaaaaatgtatttatttaatattttaaattaacttttatatagaatgtgttcgcacaaaacacaccatttaatcatttaaaaactagctaacaaaaaccaaaccaaggtagaatctatatcttaatcaattgtgaactgggctcaccagtatagccgccagtgcgaaggagcatataaggaacatgaggggctgcagg

SEQ ID NO: 16151 - DNA, 1213 bp, Oryza sativa
attatatctcagactaagatgatgctagggaaaacaactgctgtaaaaacttacaaagcatacaaattcaagagataaaccacttcagtaatgagcaatcaaaacaagcaacccaagatgagctgaagcctgaagtgtcactttccaaaagaaaagggcttttactggaaatacataacaaccaggaggttaaaaattcatgcagaacaatagcacatttttcccatagaaagaaaacataaacacagaaatatctgtggtggcaggaaactagaaaaacttacaacatcacccccatcattaacatactctatgaaagatccaacagccctgttccacagaagacaaaactcttactcacagctaagaatatcaaaccagaatggtcagaatagcatgattaaacttagcatactttaaggcagcaattctgacacgagagctagcctcgtcttgcaggcatttcagtaaaataggttgcaaatcattcagatgagattgaaaagtagttccgatagtttcagtaagggaactgaacagtatcaaagctacctgttaagaaaaaagtgagcgagtaagcattgacattatccaccaaaaaatgctgcaggttatagaactaggaaattggtccggatcatcagacttgtcaatatcaaatattgtactattagtatgttgctaaccaaaaaaaaatacaacttttatattcttatagcataaatcaagttcataaatttataaaaacagacaatgaaaatgtaaagcacaaaaggctcttcttatgtttaacaacaatatgattcaaattgccaattctcaggttgattctatggtcctagacaattacgtagtataagcatgcataactaaacataatatcggaagtaacacaagtttgataagaacactgaaactcgggatagacttacttctctatgatcttcctgtggactttggctgcattggaaaataaaaggtaacaactcaggccattctcctgcagggacagcgtacttagctataatactcacaacatttgcgctagctcgtcttacaagatggctgcataaaagtaagattcagtctctaacagaagtacatgtcaaaatacgatgtagtttgaattgtacaagtaaacagcatttgcaccaaatggaagggattctagcttgctaaggaggctcttttaaatttatctacttggttacat

SEQ ID NO: 16152 - DNA, 691 bp, Oryza sativa
cattgcattttattgtttctttttaaaaaatatctcttataagaatattaaaaactaactccaaggtgattctcagttactggcaaagccaacaaaaagaatgtattcatttccggcaaaaaaaaaattccatcaaagagtgattagatttgacatgcaatgatgacactcccaatcttgatatgtagaattaccagctaactttgtttattgtcggttaaattatcccatgactgctgtttcaaaatgaacccaaactctggcctatagcaatacagtgcaatgcttcttcgatacatgtatgataacacgtactattatcattggacatgctacacagctacgcaactggtgttaatggataaattgcatacctgcgaaagcttcttgtgctttcggatgcttgcatttatcaggatgaaccaacaaggacaactacagatggtacgaacaaacaacaattagatctaaaaaaaggattggaagaaaagaatcctttcagataaatggctcaataccttcctatattgcttcttcacctcatctgctgatgaatcaaatgacaacttaagatgctcgaaagggtttaacttgaagcaaccaagaatcctgataagttttgaatatgttaggaagtgcaggcagatgtatttttttttaaataaagtaaatcttatgtcaaattcattta

SEQ ID NO: 16153 - DNA, 20038 bp, Oryza sativa
tttgttgcagagtatactgtttaactaattagtactgggtaattgtaggtaaaaatatttcgggattttgttcctagtatcttgaatgtatcaaggcagtgccttgctaatggagaggaagatgttgcttccatcgcttttgaaatatttgatgaactaattgaatcccctgccccacttcttggggactctgtgagatcaattgtacaattttcgcttgaagtttgctcaaaccaagaactggaaataaatattaggcaacaggtttgatcagtcagccacatcctttatacatccgtctgattttacaaactgctaatatttcaaatgtgcactcattttttcaggctatacagataatctcatggcttgtaaaatttaaagcatctttcttgaaaaaacataagctggtaatacctattctacaagttatgtgccccttgcttacagaaacagctgatgaagatggagattctgatctagcagcagatcgttctgctgcagaagtcattgatacaatggctatcaatttaccgagacatgttttcccaccagttcttgagtttgcttctgtgagctttcgtcatattaatcccaagtatcgtgaggctgctgtaacatcattaggtgttgtctcagagggatgttgtgagcatttaaaagataagctagaggactgtctcaaagttgttttagaagctttaaaggaccaagagcaaatggttagaggtgctgcctcatttgcacttggtcaatttgctgaacacttgcagccagaaattttatctcactatgagagtgtccttccttgcatcttaaatgcacttgaagacccatcagatgaagtaaaggtgaaattgccaacttcatgttaaatcttgcatatggattgaagttgacgatattttctgtaataatgaactaatgtgatctgatcttgcaggagaatcatattatgcactggcagcattctgtgaggatatgggtgaaaacatcctaccatatctagatcccttgatgtgcagattagttatgtctttgcagggtagtccacggaacctacaagagacatgcatggtttgtatagtaatcattgctctaaaataatctctatatgttgtcaagtaggagattgacttgttctatgtaatcttttatttgacaaatgacaatgtttctctgcagtctgcaattggctctgtagcagctgctgcagagcaggcttttatgccatatgcagaaaaggttctagagatgatgaaaggctttatggtactcactaatgatgaagatttgtgtgcacgagctagggctactgaggttgttgggatagtggcaatggcagttggcagagcaagaatggaaaccatactgcctccttttattgaagctgctatttctgtgagtattagttgcattacttcaggcaattgaccaccttagtgcaaatatttatgttccttttatttgcagggttttgtattggattatagcgagcttagagaatatactcatggtttttttagtaatgttgctgagattttggatgatagtttcgcacaggtaacaagggaagtctgaagcttgttcaattcatgagtgctgtttatatttacggaagtggtttgttgtatattgcagtatcttcctcatgttgtacctcttgcattttcctcgtgcaacttggatgatggttctgctgtggacatagatgatgctgatagtgttgacaatggattcagtggtgtctcttctgatgatgatgtaaatgatgagccgagggttcgaaatatcagtgtaaggactggagtattagatgagaaagctgctgcaactcaagccattggattttttgcgctccacacaaagagtgcctatgctccgtatccttaaaatggtgctaatgtaatgttctggtcataatcattatcatccaaaacttccttgactggaactaggtacttggaggagtcattgaagatcttaattaggcacagtggatattttcatgaagatgtcaggctccaggcaattatttctttaaaacgtaatttcttacctggtcctctttaatgtgaaagtatgcagcagatgtttaatttctttgtttctgtaatgcccgcattattaaagttccattgtcaggtttagtgaatacaaacatacaaataactttatttcattgtaaaattgtaataggtagtttaaccttcaactccatataactatatcaaatgaagtgtgttaaaaacatacaccataaaaactatcactcaaagtgcaagttgaaagggggcagatatataacataattctccttaaaaccataaatctcaagatccattcatgaaagttttgattttatttatttattttgtgcctgtcataatttgatatctcattgaggtctgatggaaacatggaatactatatcatactgctactgcaatctgtgagtgcacaatatatagaaacaaaaattatacaaaaatgagttatggcagtgtggtctccagtatattttcactatgaatctagattgtatagccttaattaacttgaatcagttggttttctgaacttcaagctggtaaaagctagaacttagaagcttctttgatgttgttcaattgaagaattgatacttcgtggctattattaattcaagtggttgactattattgcagatatcctaactgcaataagagcaatacctcctgcacatgctgtgagtacttgtcttaaagaggcttgtattattccctctcattataccgatcattatgaaacatcaaaactctgatgcaaaatattcttttctaccatgcaggatgtattagagaagcagaaggatattcttggtagatgctaatatagcatgctatgtttttattttaagtcaattttgtcctgcatattgaaacaatactctatttctttccatttgcagatacagtaatgaacatttatatcaagaccatgagagaggatgatgacaaagaagtagttgctcaagcttgcacgagcttagcagacatcgtgagggattgtggatttgccataattgaaccttgtaagctgaacttatttaaagttggtatcctgtgaatgtttagggatgtgtgcctaaaatgtctctctgatgttgaaatttcagatattacacgacttgctgatgcaacactcattcttttgcgtcaagaatcttgttgccagcaagtagagtcggatggtgaagacgacggtgatattgatcatgatgaagtgctgatggatgcagtttcagatcttttgcccgcctttgcaaaagtgatgggatcttattttgatcctatctttacaaaattgtttgattcattgatgaaatttgctgtgagtaaactctacacatacacacaatctgaaacctatagaagtttctgagttactttagttaacaaatttctttctggtatgagtgcagaaatctcctcatcctccccaagataagactatggttgttgccactttagctgaggtcgctcagggaatgggagctccaatctctgcttatgttgatgtatgcttttatgttcttgaaaatcacttccttttcccatttttatgtccacttagtgctttgtcacatttgcatttacagaagataatgcccttggtgttgaaagaacttgcatcatctgaggcgacaaacaggagaaatgctgctttctgtgttggtgagatgtgcaagaatgggggtgctgcagcactgaagtacgtattcaaccacaagctgaaaatgtctctttctcgtaacaaacttttcgaatactattttcagaaggaaacatttttccttctataaggaagagtttagcatgaaacaagtttgaaagagggtcccttctttgtgcataccagaagtagtcttttaaaaaaatctgcaaacatcgaaatttgtttgcacatggatcttttgcaactgatgcttgcaaaggtttaatatttgtgaaagaataattttgcaccaaatacaattagatagtagcttttgaaggtaaggaaaactagtccaaataagatcaaggtatggggttggggatttcataatttggaaggcagagcataaatatgatctttggaatggtttaaaatctgaaaagaacagagaggacttttcagagagtgaaaaggctgaatataaaattactatttaatagcaatgaggggcaaattgggatgggatgtctctcaattaaatgctcagaagaaacttctttttttctgaggaggggttttcaggaagctttggataagggattttagaacactaactgtgggtgcaaggtgcaagggattttatgtcttgcttgaaactcctatctagtgccgtttctaggtatacttgatagttccaagtaggggtgttcaacaacagtttaaggcggtttagctggttaacccagcccagcacaaggttgtccggtttaggtggcttggtttcacgggttaaactgtttccccaatgcgagaaaaaagcagatcgagataatcaggcacattggcaagaaacaggcatggcattcgttccttgtgaggtcggcagcaccagatttcatggcggaactgcccaagaagcacggggaggcagagctaagttgcataaatcacgttgatgactgagtcgtcgaccacgcagtgacgcagctggccgcagagacgtggcgtgtcgagcactagatgaattgccgtttgccagggtatgttgccatgggcatggccatggccgacgcggggacgcagccgcagcataggcccatcgaagggttggggtcatggccgccgttggtgtttgtcaagtgcatggggatgcagccgccagggtgctcgtcgtgggcgggcgcacagtcgccggtgacctcgccgcatggggggcgataactggtgggggactcatcgcggcctcacgggtaaggggcacagccgtccgggggcttggccgccacctgagatggccctgctggagaaggaggcgactcatgggttgaacggggtggagtaaaccgaaccaaaccatgtacacaagcaaaagtgggttgtgttagtttgattcggtgggttcacgggttcgagcccaagattttggcacttcacaagtccaaatgctgcttatcccattttgcccccatggtttatatgcatttccttgtgatgtgtgtaatacttgatgacacaatcagatggagttaattattacggtgtatttatcagtcccctgtcagtgactagggtactctggatccattttttctttcatagtccaacttggacaactgtattttcaaaattctgctcgaaagaccaagaaatcaagctattgtttcttccagtgataatatgccaagagcattatccttaaactgaacccacctcgtcaactgaattgctaatgtatgtgactaagaattctgaagcgtactgaatagtctgctgtctagttgataatgaattggttttaacattgcattgctctttctatggagcttagagtgacttcccatgctgtaaattcagttcattgtttttgttaacgtgtactgtttgctggttcttattcatctttgtgcagatactacggggatatactccatggtctgcatcgtttgtttgctgattctgaacctgatgacgcagttagagataatgctgccggtgccattgctaggatgataatggtgcagcctcagtcaattccactcaaccaggttggcactctgcagtacataatattttgcataatttcagatttcaaacttcagagtgctggtctaatacgcattctgtgcttgattcttaggtacttccggtgtttatcaaagctttgccgctaaaagaagatcatgaagaatccatggttgtctatagctgtgtctgtaatttattattatcttcacatcctcaggtgattcttgttttaacctaccatttttcattcttggctttgctaatcatgtgagcaaagcccatgctcttttcatggattaaacatagccttttactgttgcagatccttcctctagtccctgatgtgataaatgcctttgcccaagtggtagtctccccaaatgagagtgatgaagtcaaaacagtagttgccaaggccgtttctcatttgatatctgtttatggtcagcaaatgcaacctatattgagtgctctgccacccgctcatgctaatgcattagcatcatttgccaataggagatgatcagcagaggaacatctatattcagttctttggcctactgggatgctttgtcagtggtttttactcactgaagaccatttgatttgccagatatttatagatctgccaaaaaccggtttggacatcttcattgggatatgaaagtggatgcaaatgctggaaaatgtgccagcagagttgtttgcgtcgtgattatgcgatatatttctgccttttgagttatagtgatcttttgttgggatggcttgtgcggtggttctggttgaaggaaatggccagcggtgagcttttgttggtcatcatcctggtttcgattttggttgcttgtgttgagtttacaattctttgctcgggtgtactaccattgctactattgtatataaacatatttctccatagaggtgtaattcttttgttctgaaagggagataattgtgatttttggaacctggttccttgtacagttgtacttagcatcagtggtggagccacttccttgtctaggggtggctgcccggcacgacacctacgtgtgccgtcgtttgttgcccaaaattcctggctgattgagaagccacttcgctgcctgagctccacgattacctttgctccgccgctgcttagcacgcataagcttaaatagtgcacacgcgataagattgccctgttttttcaggctgaaaggctggaggaatatacttgccctatcatttgagagaatttgaaggaggaaaaagaaaggcatcaaaatttcgagggggattgcctgattgaactagcgacgagaaccgattcaatcttttcgaaggaatacgatgttaacacaaaaccaaacgcccataccattattatgcccggggaaggatcataagcactagtgccctctgtaatatcatcgtcatatcattattgtgtcggggaaggatgataggctcaagtggccagtaatatctgcaaatatgttttttttcccacttactagcttaatgatatcagcatttggtcaatccggttcagggagaacttctgtttcttcttgacgaaggatttagcagggaccatgagtccatgactgtccctgcccgtgacgcacgttttgctctctccttttcgcgagtacttttggattaagatcagcaaaggcaattagctaaagccccgagcaactcacaaaacgtcccatcgattaatcaaatcattggctctgcaagcagcttttaaccaagaacaacaacacttgcaggttgcagctggctggatcataccgcacaacgtaaacactagccctctacccttttctgtaacataaatcagcttagagcaagtttaacagtatagccaactgctggtttcaaatcatctatagttaatctaatagtcaattcatataatagttaactataaaaatatattacaccattaatatccggtcccacctatcatacacacataacgtcttagaatccgtgttgtagctagctacaaatatatagcctgctttcttctctcttttttttcttctcgatacgtggttatagctggtttatagcatgctattgtaactgctcttaagttattttcctatctgtgctctgctgggtggccacgtagtccgtacgcgagcgtcaatcgcgaggcggggatcgatcggacggcggaggagggaggccagcccggggttgacacgtccaggggtagacagcagtggtacgtcgcgggggccggcacgatctcggcccggatcgcggccacctgctcgcccactacctcccaaaggctaggggcaccgccatttttggcatcccaacccggccgcgtcgccggccgctccacgcatgtgcgcgcgcgcgcgcggccggtgccttgcttcccccacgctaaactagctagcatttccctctcgtcccattggctgagtaagctactgcctagccgcatggatcatttggtacgcgtgctcagggactgatctgctatgggaacagagggggctcgagcggactatgatagtctcactgagcctcttctatgcatattgccagtgcgttgaaataataataataataataataataataataataataataataataataatattattattattattattattattattattattattattattttccgcatatatcgcccctcagtttatgtatatatttgctattaacatatacattgtcctattttcttctcacataaaataggaatttggtggtaggggtgattgacatgtaggtctatttctattaaagaaaaatgtagaaagttggtggtgcgggtggtggcaaattcgccattcatcaccaccatcactgttcccttttaaaactaaactagtatagaaatttaaaggatagaaggttgatgttttatgtaatttgttcaactcatctgttattttttttctagatccgtttcagcgcttgctagctagctagctttgaagttgtggcttactagcattgctaggtaagagtattactactagctataggtaggtatagtagtagacagtatatagtaatagtagggagggttacgtatttacgtattcctttcttggtgctttgcgtgccacgttggacggtatgcttctagctactgcacactttgtcgttctctcgtacgacgctgtatctcgccttttgctacggtccttttagtttctttctttctttgggggtaaagaactgatcggatcaacatattactttgtactttacagcctaaaaactacgacgacttgatggtattgtatctaatccaactccggcacagctagctaggttcctttttactcgctagcatgaaccgcgcaacgctaattacatgtgaacacagtgacatatagctattcataacagaatgacagaatcatacccctgcaggtcgttccctttttcgtgaccagcttgcccatgctggtacgctccacgccactacactatacacaggctctgaactaattctgaccatgcatggagatgtcaaatagatctctgataccgatcaaacctaatgtccacggggtattcgatcgtacatgtcctagtccacaagttcgacccagcagccatatatgtgccgtcacagtgaaatattccaaactatgacatgcgtggtacgtacgaacatattgtgtaacgtgctatcattgtacgaacaaacaagtgcaattctagctttgtacgtcttctctgtcttactcaattttttttatctaaaattctaggagaatgtgtttaggaatgtaagcgggcaatctcactatccatacaaaaccagtttactagtcttttttcacatgatagtataaaattttgaagaaaaaaaactagtagtagaataaacgggcaaaaagacttgcttgccggtcccacctacatccctattacatatgtatcctttatataattttaggtaaaaatgttaaaaattcaacccaccctattttaggctcggtcctcgaattttgaaactaacaagtacggagtaggtttgtaggttcattaccactcctagcagagagcaattatagctaagcatgcagagcaatggagatgagaagagagggatatgaaacaaaagctatgagatctagatgatttttttccctcgtaaattacttattccatctatcatcagattataacgttacattagttatgataatttttttttcaaaaagatttcatgtaattatattctaacggcagacatgtatatatttcgactgttgaaatttgatgttttgtatgcgatagcaaattgtttcaacatgcattttagtttgctttacaaaggcaaatattgcaatgactatttttttcaccatggtataactccatgtttcaactatggtcaactatagcgttggaccgcccgaattttcacgatcgatatgtatccgaaattttggcttactctccatctccatttgtattacaagagtctgtaacttacaataagctacatttggtgtttatcttacaatggcgtaatttatccgtctgctacaaaactgatcgacaacggcaaccttgcggacctactacttctgtttttaaataaatctgacttttatacgtaaatttgaatataatatgtttaaaagttcatttaggttaggacggatggagtatatgagtagctatacatgagagtagaacgatcgatggatcactgcttttggtagctagctgtagcggatagatgatggcagtagtacgattttgacagaagcagatgcgatggccccaggatcgggcctgtcctggtaatggcacgcaagattcgatggctttcaatccaagagggattctgatggcacctgccttggatttctttccggtcctcttgctgtgcaccagcaccgctgcgctagagatagggaatccatccacacgatcaagcgatcgatctcacctttttcccttttttttttctcaaacaatgtacagtgaaaaacaaagcagtagcaaccaaattcaccggtcaccacacgtccacacatgcccacagtacttctcttttcacacaaacaccagcaccacacagcaaactatactagcatagcaatgcaattccttttaattatcagagggaacaggaacactatgctaggtgaatatatattactgtggaaatctgaacatatatgcttgttgagcacatatcaggtgggagtgagaacagaaatgcatatatgcttgctctgttagctagcgttgtcatgcttaacaagctgtaagctcgaccatcagctggcttaggcctgaagagaccaatgctgctacgtctaagtgatcatattcttccagtagagctgaaggggacgtgaatacgactcgtgcatgctcggaatacggtacacttcgacgaacgatcactcactcactccacttccgtttgttcgctcgtctcccatcccttgctagtgtttgggctttggaggcgacacttggcgagatagctgccccacgcatcactgaacgctcctccaagaaacgtcctctgatctgcatgcccggatgatgttggttgggaatgcaaattgtggatcgctctgcgcctgtgattcctgtatatgcgcaagaaaaagtggtccaattattgtaactgctcggtgaaaggtatactaggtcatttctcctacaagaaccatcaataccagaacaaattggagcctaacaagtgtaggaagaatccactgtccatatatgttttttcaaataagtgagtgaaaaaaaattgaaatctctacatagaaaagtttgttcgttaagaaaaactccaaagctacacactttctttcgtgccgtgtaactgtcaaagctgttgtggactaccactcggcctatctgacaacaacctttttgttttcagactcctcgtacgtacattaagctttcacatctctcgggggtaaaaattctcctaattgttcagaagaaatgtacggaggatactaaacatgacgttgaacttatcaaaagctaccgcagtaccgctcgtggcacttcagatatctggtcggtgctgctttaggcccatcaatccatttttcgtggaaaaaagaattaacaggagttttagctgcaatttacatgcttctttctaaaataaattcattttctaggggccttttgatttggaggaaaaatataagaattttagaagattcaattctataggaaaattttctataaagatttttgaaacaaatgattgaatcctatcctacattgaaattcctatggaatgattgataaatcctataaagattttggagaaaatttagcaagagctcgaacctcttgaaaattttcttttgagtctatctctctcatattttttttcctactatccaatcaaacagtcatttccgtgttttgtaattctatgttttgcacttatattcctaacataatactgtgtttttctattcctatttttccattccgacgatttaaggagagcccttagcctctataatttatcccaaaataagttccattttacttccttacataatcctagcacgaggagttgtatttttttaataccctttatatctacccttccagtaatactattttcttatgaataagaagtattatgatcttttacccttctattctaatctcaactccgctggttagaaatgaagttatttagagaagggaatatatatattatctatcataagaaagagggttaaaaggagctatatatgatgttcgctatgaagattattgtgtacggtgttaattcagaatgagaaaattaaacaagcaccatttcatcgtggcgagtaatccatattatcagtatagattgcacggtatatttgtatattaaattgattttatttatgaagcataagtgttgttatcaaatttaagagtaaattttactttgggtcaccttttactactggtgttttgctttggaccaccctttaactaatattttcactttgaaccgaaaaatcttacttttgtgtcactttggagcacactcaaatcttttatctatctacgtcaaacttgtcatctgtcaaataaattgccgggtataaagtggtgggagttcatcgatgaatcggagccggcgtactcgaaatcgttcatatgcttgagaagagagttagggtagtccaaaacgcaacaaatgtaagattatctgatccaaagtgaatacgttgattaaaaggtggtcgaaagcaaaacaccggtaataaaaagtggtccaaaataaaatttactccaaatttaatttaattttaaagtccagctccaataaaattgattgtatttatgaaacataagggcatgctcagtggtagattctagtataaggtctcagacacttgatatgactaaggatgtaaccattaactaaaaatattttttattactattcttttttaaccattatgtaattgtgttcacattttatattttttacagaggctgagtctatattgagctattgttaaccatagtacactattttatctctcctctttctatctctcctatgtcagaaaatattcctaattaataaggttattaaaagttttctatcatagtacatgccttgacagtaaagaatggcgatatggcaaatgaaacagtaggcaagtccccgagaaaagagcggcgtcacctcccgcttaacatcctgacgttgccatgctacatgcgcaaatgcgcgccaattcttcatggccctctccagcgctgacacgtccacccctgcaaacgttacattccgccgtatatacaacactacgctacccacatgaagcaacagagcatcaacggctttccctcccacgatcccataaaaatccacagatgcgccggtgcgcagcaaaggcgagcagatcccgctgccgcttccgggctgacggtgcgccgcgcgcatatcgcgatccgctcgtaaccgccgatgtaaatgtttgggtcgcacaggtggggtttgacgagcggcgagagcaacgggcgcatgcagattacggcaacatgccccgttttacagagccctctgctctagtagtgttactgggatcggcaaagtttctttgcccaacacggggagtggggagtgggcgcaatcggcgactgtccctgtcagcagcgctttttgccgtaccgttttgggcagcgagatggaaagagcagaggcgtactactctgcatggggccatgggggggggggggggggtatgtgtcgaacgaacacgagctatcaatcagtcgaaatgtgaaaaattttgagctacgaaggaccgagcagagcaccgcgcgacggctgcccggctgggcgggccgtcgtgtggcgcgcgcgcgcatggacgagcggcaccggggcgaggcacgtcgcgcgatgcgggacacgattcccctgcgcggctgtgggcgcgagatgtcgggacccgagccgagcgcccgggccgggcgcgtgtacgtgcaatccgatcggcagagaccggaaaattttaagcagcgccgcaggcctcagagcgcgcagtggtgggctggtggcgcttttagccgtgccagcgcgaccacaccccccaccaaactccctgtcctaagtttgtgtcctcgttgtccgtgactcccgtcccatctgtgtcactcgcggcgcgccgacgtgtcgtcgtctcggcgaggcacgccacggacctgccgccgtcgaacccgcggatgcacagcacaaacgctagtagctcgtcatcgaggatataggcgccatgcatgcattgcggtcacgcgttcgccgggggatcgatcgcaattggcgtcgcgctgcgtgtggccgtgtgggaactgggacgggaccgggaaagatgctaatccgcgtatggtgctgtagcatttgggcggttgggccctctcctcgccctgttctgcgcgctaatcgggcatttgtcctgcatgcacacatcgtgaagagacacggagagggacgctttatgtgtgatcagatcaccgaaactctggaagggtgcagcttgcaacttgtgccatggatcagagcatcttgattcttgatttgaggaagaaaataattttgggcggaataatggcattgcaaaaagccgaacagcgtgcaacttttgcatgatcagtagtcttgtccagaccaaaaaaaaggaggtgtgattattttggaatttgggttggatatttccatagttattacctccaacataatgggaaaaacgttgaacctagcgatgctctaacgtagtgtatctgtgtatgcgcaattgcgcatgcacagcacagggtacggccgtactgcatgaacttccaagattggattttaaagaaggaaaaatgtaaagggtcaccgacacagtaagcataataagctcttggaacttgcaagcatctcgaccatacgccttctgttcgaagtcagaaaacgcagctaagcattttggtgcttttcttttatgttttctttttctttcttcactgtagcatgtatgacatttcttgtatagttgtatataaatatcatgtaaagccatcacatcatatttgaatagcaatatatgctacaatgataactctaataatttgtatcttgtcggtcaaaagaaatccatacaacataggcctggtttagttactaaatttttttctcaaaaacatcacatcgaatctttggacacatgtatggagcattaaatatagataaaatcaaaaactaatttaacagtttgcatggaaatcatgagacaaatttttttgagcctaattagtccatgattaaccataagtgatacagtaacccacgtatggaaatgatggattaattaggcttaataaattcgtttcacggtttccaggtaagttatggaattagttttttcattcgtgtccgaaaaccccttccgacatccggtcaaatgtccgatgtgacacccaaaaattttcttttcgcgaactaaacacggcgatactcgacaggatcaacctctcaatagttattttaataagtaatagaagtaaatctcaaactctatactaattttttttgttgtgtgtccacggacagagaccagagatgtaggggatgtttggttgcttactaactttgccaaaccacatattaggtaaggtgtggctgccacaaaatgtgtggctagcaaaatgctagccacaatttagctaaagttagccaaacatacaagtgtatgacatgtggggccatatagagaaaaggtgtggctagccatagttgagtcatcaaccaaacgagtgactaagaaattttggcatgactcactttaggtgtggcaaattgtgacctgcaaccaaacaacccctactaatccattttcattatgttaataaaaaactctataccaaattaggatgcactactcgatcattacactgtgatcagctgaaatgcttatttcaatcaaaataaataaaaaaaaataaagacaaacaagcagatataactagcgaactagcctaaacgaatagtgtcaccactcaccatggagaacattaattactagtagcaacttagtacgacagctacacaatgaaaagttgttaaagcttctagttctgtgcttttcaacttatttgcccgattattgaaacacctctacaacaatttttttttctcacagaactttttttattagatcacttgttttaaactatttactaatttattaattttaatattaaatttatttatataatcaaattgataatccacaataataatttgctcgacaatctatgtcaaacatggctagtctctgaagcaacagactctcttgagaaatgagatgtgaagcaactcgcattgttgacagtagatagtaccaaggcaacaccttcaaaaaaagaagatccaacgaataaaatgcaaataaaatatttttccctggaaaggttaccaaagttctaaaagaatgcccagcacaatccattgttgaatccagccggaggccaaatcactagcaaaatcattcatccattactaatctctactacttaaaaaataagtggtgcttccatcgtccgtaaaaaaaaccgagcgaaaaaaccaagcgaaaaaagtccgataaaaaaacggagtgaataaaaaatcgggagaaaacaatgtccgatcaaaaacggagcgaaaaaaaaactgtccgacccaaaaattacgaaccgggcgaaaaaaacatgcgaaaaaaacgagcgaaaaaaacccggtgaaaaaaagtccaatccaaaaaattcggaggaaaaaaacgggagaaaaaaatgtccgctccaaaaaatacggggcaaaaaaaaacgaaaagagacagtaaaaaaagggcgaaaaaaattatccaattccgaattatatgtgacacggtaaaaaaatcgaccgggcgtaaaaaaatgcagcgaaaaaaaacaaatctgtccgataaaaaaaaggaaaaaagggaagaaaaatcgaaacgaacccgactccgttgacacggtaaaaaaagggcgaaaaaaataaataaaatgtctgattccaaagaaaaaagaattatatgtgacgcggtaaaaaaatcaaatcctattatatctagaaaggtccgacactataataaagtagtaaaaaaaccgttcgtaaaaaaatgcatgagaaaaaaattaaaatggcagaaaaaagcgcggcggaaaaagtctaatttctattcgtcgttttagtagttcgtttatatctcttctttatctctaatctaatctaatctaactatttaaacagagaagtttctaccgtatattaaaaaaagatgcatgagaaaataaaaacggtttaaaaaaacacgtgaggaaaaaatatcagaaaaaagcgcaaaagaaaacgcgctagaaaaaaagttccatagtccgaaaaaaaacacgcgagaaaaaaatatttccatcgtctgtaaagaaagcaaaaaaaaaaaagcatacgaggaaaaaaactgttaagaaaaaacactaaattgataattgatagacacctggttggataggctccatccacttttttccatctcctacatgacttttgtttcgtcatctattctcatatagtggagaccctgcacatatttgtagacaattatcatactatttttatgaagtataactattattcttgataacatattatatggaaataatcttagaaaataaatatattctaattgttatttagagaagagtgcatagtgactctattttgtgtagacttgaccatacgaggcagtgtaggatttgattggttgcaagaatgagattaaaagaacattttagattatatgcatattgttatatgaataattcaattattttaggtaaagcaaacatcataaagttgtcatcatcaaggttgggctattacatttaagatgttccaattttttgattttctaattgtcatcgacatggttatgcatgaaaaacgtatattatcattatgttttttcacccattgcaacgcacgggcatgtttgctagtaacgcacgggcatgtttgctagtaagtattaaaatatgagcttgcttgttacaggtacacttgagaagtaatgttttttatttatatactagatgatatacttcatacgatgctgcgggagtttggtcagcttaacttttgatgacttggtctcacctgtgagtttttttaagaataattctagttagtaattaagttgtaattatgtcgaatagaggatatatcctacataccagttcttctaatcattacaattcttattgatttttatgatcaatgagcaggctacatatctcttatgtaagataggatcgttgcgttctttgtgatcaatgcgagaaaacaattgatcatgcgagaaataatcgggtcttcaaccagaagagcagaacatgggcggagattataagggttatgatgggtgatgcagagctttggcggctggctatagccgcaatccctcttatggtagtccctgtgaatggagaagggtcaccaaatttatttggagattaggcttttttttttcgttttccctcttgtatcttgttctctttgtttttttacccgctttgtacatacatttattccttcttaatacaatgatgcgccgcgtattaaaaaaagataattctcctcatcacccacttttgaatcctaatcctagtgggcacatcttaaaactagatgctttgtaccatcataaacgctcctaactagtataattttatttatatattttgtattcgtccggaactatatgttgtactatacgtgatttatatttttatcttataaaacatagttaaccgtggcattcatcctagacttacaacgatacattgcatcgtgtgtcctactgattatactttctgttttactatttggttgtgtctgtctcagcttttattattattatttttgtgtctgtctcagcttatagctaacatatatacaactgtaaaaggcagaacattaagtttattattattcattctttctatcaccatcgaagcaagcagcaacttaaaaacattttgctgtcaaggacgtactcgtgtgtaaattagtgaccttcacttgcgaagtcattgtgcttacgcgtcatacatcattccatccggtttgcatccttgtgcttgttccaacaaaaatccaaagaactaagtcattttcaacgaaaagaacatcgcggcgattcagacgaaattcatctactacgttacaatggttcaacttagacctgtggctgtgtacaaaactgagtttgcaataagacaaaatatagtgtaagcactaaaatatattccatgagaaaaaaaaagggggaggtgggtatcttttctaatagtagttttgtttattccctaatctttagccgtaggacaacaattccagaactgctacgctatgcacatctctatcacgattcttttcttcgattaaaaacatttctttttaactgctttgctaaaattatgtcgacatatttctggactaaatacagtcaaatacagtcagtttgacgatctgccatctaatcttcttcatgattcgtgcaaagtacatctgataagctgatcgaacaacttgctcctaagttcgcgactcctttttgctttgcatgacacgtgtttgtcatcaactaatgtaattactctatttacacagtaattacacatgtataatttaggacttagatatataattttggtacttacattgtaaatacactaaaattac

SEQ ID NO: 16154 - DNA, 5039 bp, Oryza sativa
ttttttgaaaaatatggcgtcataaatatagctactcccccttttaaaacctaatcttcctattctgcccttgtccttctcctcctcctcctaacagtagtttgggttgggttgtcccagaaaataaaatacatttgcaccatgcaattttccaagctgaaacgttgaaatggcgagaacatgcccgttttgtactggagagcgtgttacccccagctagatggaaatgggcacacaccttcccaaaatttcccaatggaataagcatatgtcatggagggtcccccacgggcggcaaaagtatttgttccctctattctagtggggtgcgtgctgagccgagccggagcacgaaagcacacaccccacaacccccccgtccgctccctacaaataccccccgctctcccgttcctcctcttatcatcggtgtgcgctcccatctgaactgaagcctcttgccatctcccccagccgagtgagtgatctctcctctccatctcttagccgccaaagcagaagtcgtcgttgtgaggcttacagctagctgcatgcgctcgcgtgtgtagaagatagcagccaccaccatcaccagacaccagcaaaaacaagagaaaaattccaccggcgaaacacggaacaaaaccgagacgcgcgttagagtctaccaagcttatctccccaaccccaccccgccgcgcagcccagcctctcgttcgtttccacagcttctcccgtcaaaccgcgcacatccgcctatatatcgcgcgcgcgtgtgatctcccggtttttgtttggttttgctccccgttctcccgttgccgtcccacgaggtaaaaactaaaccaaatacatatataaaaaaaacgcggtgctgcgacgaggacaacgtagcggctagcgccatcactcgtggtgttactgctttgccactgtactgtgtactgtggtgtgtgtgtggggggttgtgacttgtgtgacgctacctgcgacaagaggaccaagggagacatggcagtgacagtgttcgagaccgccgagcagcgactgccgtgccacgccgccgctgccgagctgggcgccgacggcgggaagaaggtggcggtggatgatgatgcgagcggcggcgggcccgggcaggccgtgctgctgctgcaggagaccgatcacggcggcgacgacgacgaccggccggagagggacgacgtgtggaacatgatccagtcgcagaggccgccggtggcggcggggaagcagcagcaggcggcggcgccgtacgtgcacccgctcgtgcggaggtcgtcgagcctgctcagccagaagagcctggagatttgcaccgagagcctcggctccgagaccggctccgacggcttctccgacgccgatgggtccaccgaccgctcgtgccccgcgtcggacgatgactccgacgggggcgcggaggaggtggccgcgcgcgccagcccgccacgcgcgttcccgccgccgctgccgtcgctggcgcggcgcacggtgggggcggtgcagatgacgcaggaccgccgcgacggccgcctcgtcgtcaaggccgtccccgtgccgtccgccacgctgttccgcgcgcagcgctgcggcgggcgcctgctcctctccttcgccgacaccgccgctccctcctcggacgaggacgacgagaacaatgaccaagaagaacccgagcagcaggccgacgaggtcgcgcacgacgaggaggaggaggaggacgacgaggatgacgaggaggaggtcgaggtcgtggacaggggcaccatcgtcgaggtcaaggtcagcacgcagccgcaggcgcgcagcaacggcggcggcagtgttgggccgcgggtgcaccgctcctcgctcgtcatcaacaagttcgtcaacgccgagccggccatcgccgcctccgacatcagcgacaccgccgccaccgcacccaatcccccgagacgcccgaccgggtccaccaccacggcggccgcagctctcgtcgcagcctcatctctgagcgcgacctcggctccgtcgggcagtgacaaccccggcggcgagagcaagctgctgatgacgacctgccggcgccggcggagcaaggaggagctcatgaaccacatgcgccgatgcgggcagctcagcggcaagctcttcatatgggagccacgcatcgccacctcctcctgagccgacgagcctcgccgccgcctcctctgctcgcttgtgccacgagtgctctgctctgctctgtttgttcgtagccgttgtaacgtaaacgtgcgtaatatttgtgttagtagcaaggtgatcgccacgtgattggcttagccctcttgtctgtgtctccttccgtgagtgagagggagggagctagatttgctttcgtttatctccatccgtccccgtgtctcgttgcatgctgtatctactacgaatttgcatgcattgcgtaccagtggttgctgctcgctaattgattttagattgtgccatgtgtctgatccgattacgatgtgtagtaataatgttatggcacaagttatggataatgctggttcatcagttcatgcgaacaaaaccaaatcgctactagatgcacgacaaccttgtgatcatcgctcaggcagagcatctatccgaagaaaaacagagtcaatccaagatgaggaactgtccaaaaaatgattagtattcttggcaccagcctaaacgtacgtcggtggctgttctgttgataaccttcggaaattctcagtgaacacagcatagattggcatgtttatactgaattaaacggataattaccctgcaactcaaagtctcaagattggcatatctccatcggtccaagttcggttaattgcattgaacaaatttagtttactcgtacatgttaggtgcgtaccagcatttgtttccagttgtgaaacatttttaggactagtcaaactcaagtttctcaatcacaatgcgtagtgttgtctatgtaaaagtcccatcaattccttcattcctcgtatgagcaataatatagatcaaatgatccgttataaaattttggtgaataaccccaaaaattaactaagccattgtgcatttgcttcgaaagcatgtgtcgttgtgatctatattattgtttattaagaggaatgaataataatatagaacatatagtagaagtcttttaaaaaatatatatttctcaaaaagagcgtatggtttacacgacttattttaagctatttgttaaatttattattaaaataattagtttactcctataatcaaattaataatatgcaacaacaatccgccatcaccaacagattctttaaacatatccaatcataaaattatgagattttagctgaaaatcgtgccttgtttggtagagctctaactccaaaatttagctataggggttaggtctggagtagaattgtggaggagccaaaacgcaactccacatctctaattcattttgtaagagcactccacccagctccgttcctattttaggtggaactgaaactgtttggctgagctggagctgtgtcaaacagagcccaagtctcaaaaatttggtagtcctatttctgatttttcgctctccacaagttggaagcgcgcaaccactcccaatctccaatcagagcagaggggtggaggggagttgaaggtgggtacatgttctgttttaggaagctaattttaagcaatctattgcaaagattcctaaaacgattttcttttttatttggaatttggggaactgttggtcagctattaataatatatttcaaactaagcctaagaaaacactagaaatgcgggtagttaaaatcctgcctatcattatgtatagtcgagtacactaccaataagggtttagtgattttaataaggacttagcgagattaacagatttaaaattaggtatctatatctggaacgtgtgttctgatgatttatctcttgaaacatgtgttaaatgaggtggggttatgggggcacgagcgtagtgtgtatgtgtgcatcttcactataatcgaaaaaggcttaattgaaagaaatcagatgctagaaaataaaatatgacaaaaaaaactccaaaattatatttaaaatttatcatagctgcttataagttgaaaggtagacgttgtgttttaaaactagataaacatgtctgtccattgcaacacgatctaaaataataaaataatatggaataatagttttataaggtttagtttttttatccactttcattagtcggttaattttggaaagggtggtagggtaggagaggtgggccagttcgttttttatagattttttttgcgcacacaggtgggagaaggacaactaccacttttataaggtagtagatatttccgatggtatttttatgataactggtattttttttctaataagtggtatttataatcttgtctcagtggactcaaatagtagatatagtttgaaccatgaagtttgtttactttgtgccttttttttaacgaaccagtatatgatgtgccaatttcattaaatataaaaaggagtaaaagttacttgtacaagtacgaagaaactgtacaaaagaggtaaggcataaggaactaagagttccaggtgctttgctcctgccaaggtctaagttttagcttcctctttgatttttactcctagctcctagggaagtgacagactaatttagactaagttactttgtgcctaatcaacttatcacactataaactcaaagttttgcttttattggtaggtgtcggtgacatgggaccgggagtatcacgactagaggcttgaggcagacacaatcgcccacgtggcctggcaccctcgggggacgtcgggcccgagggtgatgtgtgcgcccacctcttggtctccccgaagggggggggggtcggaccactcctgcctcgcccccgagggccaaggcgccccgacccctcgcgggttctactccgcgtgtatgggttaggtgagcacagcggggc

SEQ ID NO: 16155 - DNA, 16386 bp, Oryza sativa
ttcagccagatggccgagcaagcaaaggcgcacgaccactctccgagtgtgagtggcgacgacggggagccgaacccacgccgtcgagctcgtactccaccgccccctccacgccaaagtcctaagcggggggaggcgctcgagagggtcgaaagatccgcgacttcaccgatcgcggatgatggaaaagaacggcgagatggggagcgtcgcctcctcgtctacggcgacggcagcacgccccagggcgcgctccaagctgcgggcgcgctcttacgccacccgcctgtcgtccctgacccggagtctccagcccaacgatggctggacgacgtggccaaattggtcatgacggcgcggcagcgcctagatgctggtgggcggtcctccgccaccaaggcctctggtgctgctaccaccggctccgcgtcgtcaagacggagggcacgacgagcagcagccgctgttcgccgttcggctgccactccttcgtcgactccttcgacccgggaagatcagcgtggggagcaggacgcccgcaccagcatcgagcgccggcgtaatgaccgaagtgctacccacgcaacggagggcgcttcctcgtccagagtgtcacctcgacacggacgtgggaatcagccctccgtgcccccggttggtggtgtcggctgtagagcctttgtggcgagtcttcggaatgtccgttggcccccaaggttccggcccaccatcgccgaaaaatatgatggcagcgtcaaccccgccgagtttctccaggtctacacgaccgggattgaggccgccgggggtgacgacagggtcatggcgaatttctttcccatggccctgaaggggcaggcgcggggttggctaatgaacttgccacctgcatctgtccactcttgggaggatttgtgccaacagttcaccatgaacttccaaggcacatatccgcgccccggtgaggaagcggacttgcacgccgtacagcgaagggacgatgagtcacttcgatcgtacattcagcggttctgtcaagtccgcaataccataccatgcatccttgcacacgcggtaatctacgcgttcagggggggcgtgcggcacaaccgcatgctcgaaaagatcgcctccaaagagccccagactaccgcagagctttttcagctcgcagaccgagtggctcgcaaggaggaggcctggacttggaacccctccggttccggtgtggcagcttcggccgcccccggatccgccgctcagacagggcggcgtgacaggaggaggaagaagaggtcagtccgttccgacgacgagggtcatgtcctcgccgtcgagggcgcttcgcgggccacccgaaaggggaggcctgcgagcgacaaaaagaaggaggccagcgctcccagcagggagcgtcccaccggcaagtggtgcaccgtccacaatacctccctccatgaccttgcggactgtcgcgcagtcaaaaacttggttgagcggacaaggaagtgggaggaggagaggaggcaggagcgccgggaaggcaagtccccggcggttccttccggccatcggcgaagtgaggccaagcagaaggcccccgccgaggacatcgatgatggcgatgatgacctaggtttccaagagcctggggccaccattgccactgtcgatggaggagcgtgtgcgcacgtttctcgccggagcctcaaggccatgaagcgagagcttctggccgcggcccctactcatgaggcgacgcgccgggcgcggtggtcggaggttgccctcactttcgaccagaccgaccacccaccgtgcgttgcccggggagggcagattgcgatggtggtttctcccaccgtttgcaacgtgaagttggggcgtgtcctcattgatggaggagcagccctcaacatcctttcccccgcagcctttgatgccatcaaggccccggggatgatgctccggccgtcccagccaatcatcggcgtgacgccggggcacacttggcagctaggtcatatcgacctcccggtcaccttcggtggacccgccaatttccgcacggagcgggtgaacttcgatgtggcggacctcagtctgccctacaacgcggtcctggggaggcccgcgttggtgaagttcatggcggcggtccactacgcctacctccagatgaagatgccgggccccgatggccccatctctgtccatggcgacctcaaagtcgcgctcgcttgtatggagcagcgcgcggaccgcctcgccgtcgtgtccaagcccgagggtggcgacgagaggcttggcacatccgcccccgccgccccgaggcagcggatagtcacgtgcgatgaggtcccggtcaaggaggttgtcctgggcgacggcccgtccaagaccacacggatcggtggtctcttggatggcaaataggaagacgcgctcgtctctttcctgcgggcaaacgctgacgtcttcgcatggagaccggcggatatgcccggggtccccagggaggtgattgagcaccgtctcgccgtacggccgggcgcaaggccggtccggcagaaagtgcggcgccaggccccggaacgtcaagccttcatccgcgaggaggtggcgcgacttctggaggccggattcatccgcgaggtcatccatccggagtggctggcgaacccggtggtcgttcccaaggcgaacggcaagcttcggatgtgcatcgactacaccgaccttaacaaggcatgtcctaaggatccttaccccctgcctcgcatagatcagattgtcgactccacagcggggtgcgaccttttgtgttttctagatgcatactctggttaccatcagattcgcatggctagggaggatgaggaaaaaactgcgttcattacccccataggaacttattgttatacgacaatgcccttcgggttaaagaatgcaggtcctacttttcaacgtactactcgaatttctttgggtagccaaatatgacgtaatgttgaggcttatgtcgatgacttggttgtaaagacgcacaaccaagagactttactctcagatctagccgaaacttttgaaagtctccgctccgcccgcataaaactgaaccccgataagtgcgtattcggtgtacctgcgggcaaacttctcgggttcttggtctctgcccgaggcatcgaggccaaccccgagaagatacgagctatagagcggatgcgcccccccagcaaacttagggatgtgcaatgcgtcaccggttgcatggccgccctaagtcgtttcatatcgaggctgggagagaaggcgctacccctgtttaagctcctcaaacgctctgggccgtttgcttggacggaggaagctgaacatgccctcactcgattgaaggcatatctcagctctccaccggtcctggtcgccccggagccagatgagcccctgctactctacttagcggcgaccccccaagtagttagtgcagcgttggttgtggagcgcgatgaggacaaccctcattccgcgcacctccaccctgtgctgacttagcccgggagcgagcagggaggagaggcccccgagccgaacggtggcctaaggcccctgacgaccggagtcggccctcagcccgctcgtcagacggtgctgggtgcccccgaccctcaggaaggccccgaggccactgcgggaaagccgcatctatcgccctttgaccccgaggctaaccctgtgcggactcgacccgggggagagcagggaggagaggcccccgagccgaacggaggcctaaggcccctgacgaccggagttggccttttgcccgcttgtccgacgatgccaggagggcccgacccccaggacggccccgaggccactgtgggaaggccgcccctgtcatcctccgaccccgaggtcatcggcacagaagacgagtgcgccccgagaggccacttggacgaagagcgccccggggatatggcccctagcgaagagaatcggccccgccgaaaggtgcagcggcctgtctactttgttagcgaggccctccgggacgccaagacccgataccctcaggcccagaagatgctttacgctattctgatggcctcgaggaaactgcgccattatttccaggcgcatcgggtcactgtggttacgtcttaccccctcggtcaaatcttgcataatcgagagggtacaggacgggtggtaaaatgggcaatcgagctttctgagttcgatttgcactttgaaccaagccacgctatcaagagccaggccctcgccgattttgtggcagagtggaccccggctccaaagaccgtttcagtctctgaggccagctcggacccctcgcagctgcctcacaccgcccactgggtgatgcagttcgacggctccctgtctcttcagggtgccggtgcgggggtcacgataacttctccgagcggagacgtcctcaaatacttggtccgtctcgactttcgagcgaccaataatatggcagagtacgagggactccttgccggactcagagtggcagctggactggggatccgccgcctcttggtgttaggcgactctcagctggttgttaaccaagtctgtaaggagtaccggtgctctgacccgcagatggacgcctacgtgcgccaagtatggcgcatggagcgccattttgacgggatagagcttcggcacgtgcccagacgagataatatgatagccgacgaactatcacgactcgcgtccttgcgagcccagaccccaccgggcgtctttgaagaaaggcttgcccagccgtcggcgcgacccgaccccttaggggagacggacgcgcctgatcggcccccgaggcccgtcggagcccaggcctcgggacccgaggggagcactcctagctcccttagattgattgcttggatctctgagatccaagcatacctcacagataagactctacctgaggaccgcgaagggagtgaacgcgtccaacgcatttccaaacgctacgtgctggtagaagggatcctctatcggcgcgcggctaacggaatcctcctgaagtgcattcctcaggaacaaggcgttgagcttcttgccgatatccatgaaggcgagtgcggagcccattccgcctcgcgcaccttggttggcaaggcctttcgtcaaggattctattggccgacagctctcaatgacgcggtcgatctggtccggcgatgcagagcgtgtcagttccacgccaagcaagtccgccagccggcccaggccctgcagatcataccactttcatggccatttgctgtctggggactcgatatcctgggaccgtttaggcgggtcccgggcgggtttgagtacctgtatgtcgcgatcgacaagttcactaagtggcccgaggcttatccggtcatcaagatcgataagcactccgcacttaaattcattaagggcatcacggcccggtttggagtgcctaaccgtattattacggataacggcacccaattcactagtgaactcttcggcgactactccgaagacatgggcatcaagctctgtttcgcctcgcctgcccaccccagaagcaatggtcaagtggagcgcgccaatgcagaaatcctcaaaggccttaaaaccaagaccttcaatgttctcaagaagcacggcgattcatggatcgaggagttgccagcggtgctctgggcgaaccgaaccacaccaagccgagcaaccggggaaacgcctttcttcctcgtctacggcgcagaagcggttctcccatccgagctcaccctgaggtctcctcgggccaccatgtactgcgaggctgatcaagatcagcttcgcagagatgacctcgactacttggaagaacgaaggcggcgcgcggccctccgagccgcgcgttaccagcagagcctgcggcgctaccatcagcgccaagtccgggcccgatcactctgcgtcgacgaccttgtcctacgccgcgtccaaacgcgtgctggattgagcaagctctcaccaatgtgggagggtccgtatcgagtgatcggtgtcccccggccgggttccgtgcggctggccacgggcgacggcactgagctgcctaacccgtggaacatcgaacaccttcgtcgcttctacccctgagaagggggggggggtcgggtctcaggtttcgggctcgggccaaccccgcacccccccctcgggtgtgcagggctggccgggggctaccacacatgcacattctcatttctcttatttcagtatttcaataaaagcagtttcaatttcctaagggctgtatctgtgccgttttttcctttttgaagaattttgacttgaaataaggtcactcgtgctcaaccttgccctcgggggctcggttcggtcagctaaaatcgccaaacggggcccagaaccgagccgtgccctggggcgtggtgaactccgggggggaatcggcaaaaacccacaatcgggtcacccataaccctcggtcaccacgttcccggcctggccagcctcgacatgtggatctccccaggcactagccccgacccgcgcctttcgaggactgggacttgggcacgagtccttaaatcaagctaagacacaaaaggaccacggcacggatcatcctcatctcatttgtatagcagagtaaaattaacacaaaaattttcatcatttttgattgcagattaagttgagctatacaaaaaagagacctgaaggccttagaagaaagaaaaagaaaaaactgaaggggggctcaatccgatgcgcccgggtcgccggcctcgtcgtcactgtcgtctgcaccgctggcgtcgccctcctcgtcggagttgggggcgaacgcgagccgaggggccgagccctcgaagctgtggacgatgtggtcggcggcatcccggacctgcgcgcgcgcgctgtcttcagtcccaggagggaactcatccagcgccatccacggagagaagttggggtccctggcctggtagctcgccaggacgagctccaccgctccttgggcgaggtccctcgaggatgacttaattgtcctctcgagctcctcggggagctgctggagagccccggccatcttcgagaggcgctgggcaaggcctccctggttggcggcagactttattgtctgccctctccaaaggcccacccgccgacctgcacggtctaggcgggagactgcatcccaaagcatgccgggccctatctcgcccgccaagcggagggcctcggcttccccggtggatgagtctagcgcgcgctgcatgtcggcgatggtgagttcggcagctgcgaggcgggtggctaagtcactttcgcccgcagccgccccaccgctgcgtgccctcgagtccagctccttctcccgcgcctcgaggtcagcggcccgctggtccagtgcggccctctcggcgcggacacattctagattgcggcgtgcctgctccgccagcgctgcctcacggagggacaggctgtccgccaaccgttgcgccgcggcctcggcctcttcgagagctcgctcccgctcggtaagcgcgtcctcgcggaggcggagtgcggactcctcttcggcgcaggcagactcgtgcgccgccagcgttgcctctcgggtggtgacggcggcctcgcggtctgccaggtccttctccgcgacgcaggcgcgctcttccagcgccatggcgcgcgcctcgagggcctcttcgcgccgccggagcgccgcttcggtctccgttgctcgctgctctcgggcagcggcggcatcaaggaccccctgggcggcgtcgagctttttctttagctccgcctcccagctcccgtattgaaggcggagggtgtcctgcgcctcgttcatcacggtggtggcgatgagggcagccccccgctcctcctccacctctcgagcgatctccgccagtgccgtcttacgggcttcaagatctgagacatgccggcggtgtgccttgcggcccgcttccaccatggcctccaccgagcgccgcccctcctcgacacgcgcccacgcggcgtcgagctccgcacgctccgcctgcagggcctccacctgggcacttaacccatccaacaccgcggtgtttgcggcggctaaggcctgcagaaggggctcggcgctcagcggggcgacggaaggcgtggggaagagctgccttggtgaagatgccgcgcggctcggcccgccaatggacgtgccggactcggggatgtcccccggacctgtttggtcctgggcgtcgcccgaaggagtaggcccaagcgatgcgcccgcggcctcgtcgcgagccaccccagaagctgtcgcctgaacgtcgcccgaggaggtgggcccaagcgacgcgcccgcggcctcgtcgcgagctgcctcggaagtcgccatcgcctcagcctggcgagcccgggcggcctcctcccgagcggcttcttcggcttggcgagcccgtgcggcctcctcccgagcggtatcctcagcctggcgagcccgggcggcctcttcagcttcccgtaggcgatctgcggcctctcgccggtcagattctcgcctccgtgcctctgcggccgccagatcttcggcctcgcactggccggacttgggatggcgggaggaacgcgacgggacatcactgaagcggaaggaaaaaccagaagataaacaagatgggtaagagaaaacttgcttttgggatagaagaaagacggtcgcaatgagcgtgggacgaacctgcgagggggtcggttaaatgaccaccttggaggggaaatcaggtttccccgggatggttctgtctcccccatcttgcggagccgcttcttcttgcgctccccctcgggctacgatgttggcgcggccccctccgggcgcctgctgctggcacgcaccgccccgccccctcggggaggagatgggagaggtgttcctcccagcttcctcttcccccgggcgtcggtagggcggttgctccccgagcccccaacgcggggcccagaagcacgaccccctcctggggtagattgttcccctcggcggctcccgcctgcgccgtcatggcccttaggagcctgctcctctgaggccccaaccgccgtcataatggtcaagatggaggcgcggtctggatcgctgcagagggggaggattccgtggggaatgagggacgcctcaacggagttgagattcagcacccgttggaccaatatcttgaagtcctcgggagcccaatcccatctgactccctggtgggtccgcatgtagtcttcggacccggtgtactcccaggcgccccgagcgcgccgctggagtggcgcaatccgacgacggagatagtcgccatacaccatggcccctgtgagcccttgggatcgcaggcccgccaggcggtcgaggacggcgtcatagccatcccccagatctaccggcgcccgccagctggaggcctgcgccgggggctggctcggaagtcggaggcgcgcttcgtcggcgaggggggtgtagaaccagtcgctcttccagtcatcccacttcttgcggaggacgcaggggatgtagcggttcaacaccggcccccgcggcaggaagtagcacccaccgaccaccgacggtggcgataccgactgcacggtgaagaaccaccggaacagccgaagagatgggcgcaccccaatgaacatctcacacaggtgcgcgaagatggctaatgtcatcactgcgttgggggtgaggtgcgccatctggagatcgtagaactccaggacatccatgaagaaagaagaaaatggcggaaccagccctgccattgcaaaggggagaaagaagacggaccgccccgggtagtctggcgccgggcgtccctcgcccagcatgactatctcacggccggtggcagattccggcatgaagcggcgcggcaacccagcctgcttctcgctcacgatgcgggaaggcggtagcacgctaccatcaagcagtgcggagccccgtgccatggcgccggacgaagagaagatggagagcgagcgcgtgtggcgaaagaagggcgcagggaagaaggagttagggcgcaagcggcgaagacaaggggaatgatggcgaaaggaaggaaacaaatcccttccccagtgcctttatacccttgccaatgctgtgcccggctcctcgtttctcgcgcccattatttcgccccctcgtttctcgcgcccacgcttccactaatcccattcgcccgcttgcggcgcatgaggtggatatgcggttgtggcggtcgaggtagatcatatcgtgtgcgcgttgattacgctcgccgaccgaagcgccatcacctatctcctggcaaagcgaatcggctcgtccagattcgtgtactactcgagtaatgtgacagtctggaagagaccgctcattactgacagccgagttaccattgccgatgtgcgtagtttgtgaccgttgggtttctgcctgtttgtagaagccggtcctacttgtcaccaggctttaggggtggcgtcacgcccgaccgcttcccttgaaaagggagatcgccctggcataacgccgggggctactgtcggtgacatgggaccgggagtatcacgactagaggcttgaggcagacacaatcgcccacgtggcctggcaccctcgggggacgtcgggcccgagggtgatgtgtgcgcccacctcttggtctccccgaaggggggggtcggaccactcctgcctcgcccccgagggccaaggcgccccgacccctcgcgggttctactccgcgtgtatgggttaggtgagcacagcggggctcacctaaccgcatttattgcggctcggctaaatgtgtcacgccgcacgaaatacagtgcagtgcactcgtttgtccggtctgtggccagtcacagaccggtcagatcgcaggttaggaggcgacagtcggtctgacgcacgcttcgccccatcccgtcaagacgagagcttctaggcactcgtccccagctggagctagcgtgttacctcccagagatggcacgttagccccggtcggatatatgccaggcttcatcctaaccattacaagcaagatgttgtgtgaagaagggcaaacatgcacgttgctaagctgacgcgtggtggacaagaatgaccgatttgtgaccggtctgacactgatcatgtcatcggcagacagccacgttcccacgacgcgcctgcccccggcagaagtggaggtaggtatgtgccgtcccgtcagaaggatgttcggagggcaaccgtgcaaatctccgtccatttatgaagagaagaaaagtccagtttggaaagagaggggtgcatgtggtatccccttgagatataaaaggaggaccttgcccattgagaagggggggatttttggttttttccagagtcggaacctagaacaagggggaggttggctcacactttgtagctccttcatacacagatccaccaaaacacaggagtagggcattacgcttcttagcggcccgaacctgtatacatcgcttgtgtctcatgctctttcgataggtcgcgatctttccacatacagagagagcttgggatttcaccctgagcccccggccgaaccggcaaaggggggcctgtgcggtctcccggtgaggagccccgcgctccgtcatctggcgcgccaggtagggggctcagcgtgtgtcctctgagctctcgcactctgccctgtgcgccaagcttttcctgttcagccagatggccgagcaagcaaaggcgcacgaccactctccgagtgtgagtggcgacgacggggagccgaacccacgccgtcgagctcgtactccaccgccccctccacgccaaagtcctaagcggggggaggcgctcgagagggtcgaaagatccgcgacttcaccgatcgcggatgatggaaaagaacggcgagatggggagcgtcgcctcctcgtctacggcgacggcagcacgccccagggcgcgctccaagctgcgggcgcgctcttacgccacccgcctgtcgtccctgacccggagtctccagcccaacgatggctggacgacgtggccaaattggtcatgacggcgcggcagcgcctagatgctggtgggcggtcctccgccaccaaggcctctggtgctgctaccaccggctccgcgtcgtcaagacggaggaccttgcccattgagaagggggggatttttggttttttccagagtcggaacctagaacaagggggaggttggctcacactttgtagctccttcatacacagatccaccaaaacacaggagtagggcattacgcttcttagcggcccgaacctgtatacatcgcttgtgtctcatgctctttcgataggtcgcgatctttccacatacagagagagcttgggatttcatcctgagcccccggccgaaccggcaaaggggggcctgtgcggtctcccggtgaggagccccgcgctccgtcagtaggaaaatccattttaatgcatgggctatttatttttgccggaatgaccgaaggaggtcattcaatataattaagataggaagaaaatgttacaagaaaagttttacatcgacagctggttgtcgagaaagtatgtgcactagagcacacgcctcaaaccatataccaaccgcccaaacacatgcttcagaaagggaagccaagcaccggccatcgctatgcgagaccgatcgccaccaggccaacaacaccactacgacacgaatactctaaaacgacgctctcacgagggttgcgacgatgcatgggctattttgctaatcattacaaaatctcaaaattcatcactaaagaaattatatccggctctagtgttaccgcagcaagcacaaagtgagagtaataattaatcatcatcctgtctctctagccaagcgaagacaaaaacagaaaggcaaagacgaaggggatcacatcctgtctttccagcctcaactgttccaccccattacatgaaaactgtccatcaacacgcacaaaacaaaacaattcccccagaattaaacaggaaaacccaatgtgtttccagcacacggttttcagttcagtggatgtccaactccaaagcaacgccattcagcagagtgcagagagaagcagggcgatcgaaggaatcagaatcggaatccgaatgtaggagcggcccgcccccggagtggaacgggacggaatgtcccccgcaggtgccacccctacgaaccgtccaaaaccatcgcgagattaagctgctcctccctgataaaagtcgcgaaatccggggaccattgccggaaagccgagcttggaataaaggcctagctagtacgtgatgagagacagacagggagagatctttctcacgtcaattacatccagccagtcaggcagaacagtagttctcgatcggtagtgagaggtgacgcactggcgctaatcttctcctcgagcttgctttgctggctgcaggctcgaccgtgccgtgcggtgccttgtgttatgttgtgtttgtgtggctcgcgcttagctagctagggcgggctagtgcatgcaagcttcgtgcgagattccgacggcgatggcaatggttatcttgaacagcttcgacggctggcgctgccggccggctgcccaatctttccgccggaaatgacaccatgacagggaaaaatctgaaattcagatgcttcacgaggctgtcactcgcactgcccccagtgatggcactgtttctcctctgcgtgagtgaggtttacacggcgatggggttgtgatatactcgagttgatcggcggtagacgtacgccaatccttgtttatccctgtccgtttcaggcatttctaaagcatgttccaagatgtgcaaatatgccggcatgtacaacttgcggcagcagtgccgctttcgaatttttgatccgaagcaggaaaggtcccgagtgagtgagtgacatgcaagccaagcgattcagagaatgtgtgttagtcacagtaattaattaattagatctctatggatagcctttggattttagaagcattatattagctgtgctcgtttacaggtcaaaggttcactgctcatgcgaggcactcagatataattactctttttttttttcttatgtacatcgactatggccagtctaggcaacagtctcatcagggaaaaggctaatgcatgatacacataaaaaccttcactttgcaacgctaattggaggagaatataactgaaagagatggcgagacaaacaggagagattgcgtaagggctaagtgactgctgctttcgacgacaagagcttttggaagagagagcaacatggccgtgatgatcagtagcgataacgaactcgttttccttgctacagagcagaagcaggaggcttcaaagctatagttgttttggcaaacaaaagcgtgaacattggacatcagcaagcactgcatgcacagctggttttccagtggttacagatcaagactccagaggatgccctagctctatccagaaaagggcctcaactgattgcatatcaaaagtgaaaaaagtagaggatctaagaggagatttgtcctgtactaaaaacgtctttacttgaagaatagtgcggaattgattacaaaccagcctgaactgtcagtaattcaacctgaaagcaaaaatttctggactcagcgaggattttcatttttagcatcaattatctgaatcttgaaaatagcctttcaatcttcttcaacaggcccaaagatggttatataatgttctttgtgagaaaataataatgcactagaagctagggcgggtttgtgagaatctgcctaggagcaatatttagtagtgcatgccccatcaacttgcaatggtattagtaattacatgtatgaggcaaaattagtactacatgaaaaggcaaagaccaaaaggaggcccaaaagaagaaatatggaggatgcaaagcaaagcagaacaaaaaggaaaaaaggtttatgctaatgacaggaaaaggaggaaccatatgcttctgatgctaggtagtccctacttttgcctatttaaccgaataagcagtgttctgctacgaaggataaagaaccagtatttcagtagaattcctacttcagcacttcagcagcacttcctatagtcttacatcaggattgctagcctttgtcgggttaatttaagaatagccgtatcatgatgcaaattcacccatatttaattgggattctttgatatgcaagtggaaataaaagcatatgaagaatgttttttttttttctgctaccctagttatcttgtctaacggtaggctgtctgaaatgaaattttgtatctcatcaactagggcaacatgttgctttatgtccacttgtaataagtgattttctttttctgtatttcctggtatagaggacaggatatttattccattatcttaaaaagaaaactaatcttatcacaccaatacatgtccaactcaagatgtagtatgtctctaacactattgggcagaaacattaccaacagaccagaacatataccattctaatatgtgatttgtgaatgaaatacacagtacatgccattttgttttttcgagatagtgattacagatgttttttttatttttttttattaaatgtggattttctgatggatacttaatgacagaggcaacatataagtattaattcatttcttccaccattttatgttgagccccactacggtgctctctctggtagtatagaaagtaatctgaactgttgatctcatttgattgaagggtacatatctatttatactaccaccccaaataactgtagtagaaacatggtggagtattattgagaaaaaaataggtacaaagaggtataatcgttatttagtacctttttttctcctttgtttggcttatttcgatggaatatgagcgatgacagcgtaatggatgaacacatatcgatctagtcaaatatatatatatatatatatatatatatataaatgccaattacccctaatcgatatattagtaaattactaatttacccttaataatgaacggatcaaatcatttctaccggtagtataatactactagtacaaaacactagagcatcactagcaatggcggagcacacccagatctaacacgtcggttgtttattgctagggccacggttgatgagtgacaacacatggtgaatgcgtgccaccctaatgtttgggaccgtccctaagactttgaggtcctgtgttaaaaatacaaaataagaagtcttatatatatggcaa

SEQ ID NO: 16156 - DNA, 16780 bp, Oryza sativa
tagtaaattactaatttacccttaataatgaacggatcaaatcatttctaccggtagtataatactactagtacaaaacactagagcatcactagcaatggcggagcacacccagatctaacacgtcggttgtttattgctagggccacggttgatgagtgacaacacatggtgaatgcgtgccaccctaatgtttgggaccgtccctaagactttgaggtcctgtgttaaaaatacaaaataagaagtcttatatatatggcaaatacaaatttatagagtaaattttatttaaatccatgtacatggataaaaattacatgaatttaacatgactaatgacagctagagctagctatacaagagctcacctgctgataaaggtggagacaatttgcctatgtaggaactaccgaactagaaagaagaatcatgttctgatggagtgacttagttatctttgttaagaaaaaaatggaaccttaattgcgtaaaacatacgttcacatcatcatcacgagtttcaattctttgtggctataattatcatcgaacacttgttatacctgagcaaaacaaacccgttctagctaaacaaatgaagagaaatagaaggtgatccactctgctttggggggctccgcctccgtcgaaggacatattcaattcttcatgttagttgtatataaggtgtcctttgaaacacgggagttataaaaattttataggattagttcaattctttaaaaagattttttttcagaaactttgtattccaaataagcgctaacatgcttatataaaaatgtcagatccaaaggtgcatgtcaagattcatgactccatcatgttccaaacttacaactcctgtatatatttataacagaaggtgtacaaaatattggaggagatgctgtcgatcagaccggagagaatagcctcatgcagagtaccgaacgaaggacagcttctttatgttctctttattagttatcccgcgtttaattggaaactttaattatcacccggaattgggggaataagatccatgggaggatcatgcatacgtacaaagtccgtgcatgtcatgaccaccaatctttcatgtggtttgccaaatgacaaattgccaattgccggacgaataactaaagttctacgcgtaatgcgtatataggtgttttacaggtaaactttagttagcagctgaagccctgcctgcgtttgcgtggcccccatttgatctcatatggtctcgcaataatgacaatcttttgccaagcttctttgtgttgtgccaaaaggatgctagctagccaatttgctaaattttctatgctttagtagctagctgctagctaactgcagcttggaagattgtatttgtcccctgacggatgcatatttgcattggcttgttttctctttttttttttcatattattcaccggattataacgtcatgctgataataacgtcaagctgataaaaatatactcccaaaacaaaatcttcttcgattacacgacaaatgcggatgcatacacaccactatactatacatgctcaaatagatgataatcaacaacacatctctgatctcactaaaaatatattgaaagcctaaaataatgtgtaatatttgtgggtactaggattcgaacctctgatgggtaaagtcatgcatgcacccacgactttactagcacatcattggacattggtgctttcttaaaaaaataagtcttctactgtattgcctagatcacatgttttaaataatttgttaagtttatttatcaaaatatttaagttatccttatagtcaacaaaataattcgaagaaataacccgcttaataatttgcttcaaattaagccaagtttaaaggcgtatcataatattttggtctagcttgcaagtgtttgattgaatgtggcattttgactaactgtatttgttagacctccatcacatatagcatatattttttccaagctttgtttacaatcgtggctaaaaaattgttcaccacgccttttgtttcacgccatactttggctaattatttttagcaaggttaggcttcaaccggacatcctctaataaagctaaaataatatgctaagcttctcgtcaatcacctttaattacatcgacttttcgtgatgtagcaccgctaagtgtcttacgactattcccaacccaataactaggatggtgtctatagcattaaataggctgccatctagaatgaaaaatgatgtggcaagtgaataaataagaaaagaaaagaaaaccatgtcttgcatgagacatagtttctacacaacattcaagacatcatgtgagataagtagcattaaatttaagtatgaatagtggtgtttgcatgggaagagtagtgtctagtactagtttcttgatgatgtggagtttatgaaaactatgtcgttttgggttaggaatggcctaagagcaagtttaatagtatagcccactactagctccaaataatctatagccgatgtaatagccaattcatacaatagttgcttacttattaatacatgatcccacctgtcatacacacattacgtcttggagtccgtgctgcagctggctatagatctgtaacccgctgctcttctctcttcctttatttctttaaaatatatttatagctgacttatagcctgctattgtacctgctctaatacaaaacattgtactttcacgaatattttgatattaaagctaaaatgtccacgtagaaacatataaatgtacgcaaggcattattttccattaactcgacctttaaactagtttaaagctaatgctaccatgaggttcatgaccaagtggtgccttccctccatagaacccaccaccaccgtcttttccaaagcaatattggaaaacccaccaatggcggatcgacacttgctcgtgacgcctacccgctacctgacatgtgtgtgcaaaagccatagaaaccattcgcgcctttttctctcccttttctgtgcataatatttgccgatctccgagaacgaaccggcctcgagcgctctggtccaccgtccacgcgcaatggcggctcacggatttgtggagctttggctctcctttccgcggagcaatcatagcgaggcgttcgttcgttcgttcgtgcggtgacggccggtgcagcgagctaggcgaaggcaagaggcaacgattcggtcgggtcgcgtcccctcgcgcgctgcttttttccgagcgttttcgctcgagggccccctgcatgacgcgcacgcacccggcgcccgcgacggcttcggctttgcgttgcaccgtggcccacgggggggcgggggggggggggggggggcaacggccaatggtggtgcggttgctgccgctgcgtggtgtggtgcgccgtgcgcgcgtctcgctcgctcgcgctcccatccaaagccacgcccacgcgcgcgatgatctcacttgagagggcgcgaggcgcgacgccggcaggatgggatccacagggcaggtggtgacaggctgtgggcatgggccgggcgggcggcctttcggggcaggtgcgttgggtttacgatgcgccgccgacggaggccgcgaacgggtgattctggaactggaaggccgaataacagctggccaacttgtgcttgctccatccagcagagccaaatattagggcacccgcaatggttatctataggctctctacaagagatctatgtcagcatattttcctacttggaagagattaaatgaagagagagagcaaagctatctactaatctggagatagtctatagaaaaaaacgaggcaatggattagagagctatagatacccatgtagacataccattgaagtggtttactattaatttagtctattgctgagatgtacatgttttataaatagcaccttactttactattgcgggtgctcttagtactattattttagtgaaggggatgccgggatggtcactcgtgatgcttgtcaaacctggcttcttccaggatgaaacgatgccgttgctggatgtgtggcagtgggacactatgaccaccgcaaagggacggacaggttcggctgtttaggtattggtctctgaaactgaatgctcgtctttcaggttcaggagtgtgacgaacgaacctgaggtgtgacacgttgttgggtattggatacagcgcaacgggaatcaagtgacacggcgtgtaggagagaacagttggagcccttgttttttgacgagccctttcccacagagattgacggtggaagtacaatgcgtgtgctcgagaactttcgcatttcccagggtgcagctgccacgcctgactaggatcgtcgatggcatttgcatgattgcatcttcatccgaagtctcgccgttgctgtccagttgctgtgtcgtatactcatatactcctgacttgccgtcagaaatggaggtcaatttgtccagttgctgacttgctgtgtcgtataatcgtgtgattactaaaaaaggcaaaacatcctgcctcttttttatcggaacaaaatatcttgacttgttccatcatagaggacaactttgaattgcatctcgtcatgccaatactatgagctacctatccacaggattgaataaatcaaaacatgcatgcgcaacctgcacatcttgccgtataaccatgctcccagccttgcaccatcacatttgcaccggggagcgcaaagacaaatccagcacaatttctccgagaaaatcgaagagaccaaagcgatccaacatacaagtgttagctgaatgtttgaggtgcgaacaaattggagggaagatacaaaaaacttggcaagtttctgggctagaaaattgtggcttctaaatctaaataagaaaatgacagtactatagcaatctctacccagtaaatgtggcagaattgtgggagctcgacagcccgtagttgcatcgtcgttacggcagcatacaacgtgtgttaaaaaagcatacaatcaacaagtatttgagctacacaaatcgtgaaacatattggcattaatttacattagactagatgaatcccaatacgttattgtaagagtttattgtgataacaataagtaaaaataatatgtaagataatatagacaacatatgcttacacaagtttaagcttacataagttgatgtgatttattaaatttaaatattatatagaatgatgatttaaatgtaaaagtaaaatgatgttgctttacgagagaacaaaagaaagacgataatttagaccatacatctaaaggctaaaaaaatgagataatatggcttagcgagagaaaaataagagagataatttaaaccatagattaatcatctaaggactaaaagcaattgatgtaatatgacttaatgagagaagagaaataacattaactaagtcagcatgaactatataggtatatgggatattatagaaaatgatgaatagatatattaaaatattatgtgaattatgtgggatgatttaacatacttgtattttaaatctctaaaattttaaaattataaaattatagataatatagcatgcttacataatgtttagatgtaataattattagtggatgataatgtgacatatttacatgttaagctttaggatttagtggatcataactctataataagatgataataatggaacaatgatccgttggagggcatttcagcattcaattcgatgagtttctttttcacatatttttttcaacattttccaggaatgtgttatatccaagaggtacattaatccaatacaactctatgtagagaacatgaagccattctgctaacaaagatgtgttatgttccctgactacagtgggaacacggaaggcataaccgaaccttacagcctgccaggagctttgataggataaagcttagatcgggtaacaagaagaatggttactgtatatatgctttggctgcaaagactaacatcattcctcttaagcacgcttcaccggcctctgaacataagatttgttcggatcctcggtcttcagctttgggggtttgatctcacctttccttgcctataaaaggggtcagtaagttacaaattaatgcataacaagatacactagctcaagtgcactctctaaccttctttcctgtcttcataaaatccctccagctagagacctacaggccataaataaattgatattaggcagtacccatggcaggtaatcaaatctggagaaaaacaaactcatctaaggtctcattcttacattgtaaaatagacacgattagaccacattgtactggatttgggtgatagggaatttagggcagatctacaaacctagcataatggatgcataaaaaccactaatgcaactcatggatgcagcctcatgctttcatacgtttaagctgagaaaaaaacatccacggtatcctgtgtgaaccgtatcagatggaataggagttcacaagatcaactccttgaacacatcctaaagttacaagtggatctcatggttgagccacactatgcggcagcagcagggatttacaccagcagcaaggggcagagcactaatatacaacagtgggggaacggcattgggagatgagcaggatgaactggtgctacggcaggcctaacatgtgcaacagccagctgctgcgtgtggcaagcgggagacaatcatctgatgtgagtgggccttgtaggcaagcacatagatggaagggcaccaacaggggcagaggcaggcctagggatttttggctttgccactgggcaccaacacacacattgacatctgtctgtgaggccgagcatgaccttgggcagagattagtagacaaccagccagcatggatagcaaggcaatcaaataagctaaggtcccctttttgtgaaactcgattggattttgaatctttttatagaacttgacttttttttcacacactcattttctgtattccggaacagaatagaaacctccattttggaactcaagttttatattagaaagtaactgaagcactaaattatgaatgtggaacacatgacaaaaatatcataagggtgaaaacatgattatcaaattaaacaaagaactgcgagcttactcgttggtctctggtctcttcccacttctcttcatgctcccgcttcttcttccacatttcttttgtttcctcttcatccttcttcagtcttccttcttcctctgatatctgtaggagcacatgggcatagctcatatcgactgtcacaatcaatgatatttaaaaattttaaagcactttatttaccctcatctgcattttcctgcgacgccactctttgtctgtcaaaatttcacgaactttaattattagctgcttctgaaattcttctgatcgttcatactgctcttcatattttccctactcataggcaaaccaatcagtggacgttctcaatttttcaacatgaatgaggttcaatatgatgttacaagtgacttgcaaaagtcattttggcaacatagaatcacacattgacacatatgttgtgcacaaaggaaaacatctgatatccaaacgtacatagctgttgaaattccagcagatggctctttcatgatacatataaagtattttgtctttctgaaaggtttttgttctttatatatctataaagttcaatcataagcatgtaatgactcctaaaagaatctattactgaatgtggtcaacaaacatgaagcatggaactacaaagtcgtcaaaatttcagcaaatgatctttttgtcagagtgcgcatagaagcttctttctttcagaaatttttatccatattaagtaagaacgaagtcatgaacatccaagctcataaaaataaccttccgcgggaacactaacaagcagtcagcagccaccaaccaggttgaccattgctgactgctggttaaggaaatccctgcagagactggggtttcaaacttcagatagtttacacttcagagttggccaaaaccaaaaattgttccaaattacaccaattcaggtttagcatattattattacacattgatattcatatggtactcagcactaccaaaaaaattacgattaaagtttacaccaccttgcatgagattgtcttacctcatctacttgggactttatctttgacgcgctgtctttcttcagctcctttttcctctttgccctcagctcttctgaaatttttaacacgtaagatcatcaaatttgctgcaccgtgccctttatatttcattgaacgaattacgaagctcaaatagtatgaattaatagtgtaatacaagagcaatataaataaaatcacattgcaccttttgcagcagtaacttgatcaagaatatatcctctctcctgtggatcaagtaggagctgctgtgcttttgccagagctgtttatgacgaggtaccatcaattagatatacatccattgagcaagtgagaagcaaaaaagatgtgacactggaaatcatatgagttgtttaagagcaaaaaagtggctgagtttagtggtagaactagctacagaagtcaaactcctcagtaagagatagtgtaggcattgcattttattgtttctttttaaaaaatatctcttataagaatattaaaaactaactccaaggtgattctcagttactggcaaagccaacaaaaagaatgtattcatttccggcaaaaaaaaaattccatcaaagagtgattagatttgacatgcaatgatgacactcccaatcttgatatgtagaattaccagctaactttgtttattgtcggttaaattatcccatgactgctgtttcaaaatgaacccaaactctggcctatagcaatacagtgcaatgcttcttcgatacatgtatgataacacgtactattatcattggacatgctacacagctacgcaactggtgttaatggataaattgcatacctgcgaaagcttcttgtgctttcggatgcttgcatttatcaggatgaaccaacaaggacaactacagatggtacgaacaaacaacaattagatctaaaaaaaggattggaagaaaagaatcctttcagataaatggctcaataccttcctatattgcttcttcacctcatctgctgatgaatcaaatgacaacttaagatgctcgaaagggtttaacttgaagcaaccaagaatcctgataagttttgaatatgttaggaagtgcaggcagatgtatttttttttaaataaagtaaatcttatgtcaaattcatttagtttttgcactgataatttccacgagaagaaaaggtattcaagaacacagaaagcgtgtagtgtcgtcacagtgcaggtttatttttctttcttttgcaacatactggtttccataaagggaaacatgaaatcccagctaaaatcgacatccatgagccactgaattcgagagcaggatgcagacaactgattatggatgagagccaatcgtacgactctaacctagggttcaagtggaaccagctggatcccctaacccccacggaaattcagcaccgaggctgcttctacatctgctgcatcacacgccgaacaattccggagcgaacagtgtagcacggctggggatctgaagctacgccgatgcggacacggatcgaaaccgctctggccgacgaggggggaaagggagggagagagagagggggggggatttacctgagcacttcgttgtcgcgttcggcctcgctgacctcggcgaggaagctcttgaggagctggtcctcgtcggcatccgtcgacgccatggagggagggcgaaaggcggtcgctccgggaggacgacgagacgaaacgagagagcgcgtcgcgtggagagagagagccacggagaggggagagacgggagtcggtgacggaacggacggtccagatttcttgtgctcggaagataccagagacatgccgggccgggcggccggcgaccgctcacatgtacagttcagcccagattggggacggcaatgtactctcctgaactttttggatggcccaaagtagtgtgggaagaaagaggcccaaatcctcgacaaaaagatctaaacaaactcccttcatttcatatactagcaaaatgactgtgtgttgcatcgggtgcaaaaaaaaaattaatacacagttgaataagatgatgcctcacaaaaacaaagtaggaatcatgcaggtttatgcaatctttgtgtgtgcacgggaccctgcgcttataccagaacttacgctctatttcgtatcaacatgatcttcgtgatctaattttgttagagcgacagaagaggggaaaatgctacatttctactccctccgtttcactagcatttcccatatttatatgtttagattcattaacatcaatataaatatgaaaaatgctaaaatgacttacattgtgaaacggaggaagtagtataataagtcaattatgcacataataaacaacatattaatcctttttattatttgtctattgttaacgaccaaatttggtaagatgtgaaccaggttcaatattaagatcgaggcggattcgatgaagagatcgattcgaataacagagtatgcattggctgcgaagatattggctggggtgtacatcggctggaatggatcggacagaggatagccgatacacccgatagaggtaatgcaaccgattacgatgaagacggtttcaaggttgtttctagaatcgttcaaagtgctttatagggattgccatgatagagataaagtttaggcaattgtatctattaattatgatattttatgtaatttccctagagatatgtttgggcaaaagtctgccgcaaagacttgtggtatcttagagcttcttagagataagtgtcgtgtccggcaaagacatattttgtatcttaggtataaatagagcccgaagctatgtaatcaaacaacacacgttcaatacaatctcggtgcatcgccaccctttttactttcgtttattttcgacgagttcttgctttcgggttgagctgcataagtttcgatcttcaactagaggtaaagcttgttatggcggcttgcgttctcgggattagtgcttccatctttatgatactctaatcttgtttatgtaattcgtcgagttatcatatatcctatataatcgttgacaatatcgttatttaaccttcaatcagctaacatctatcattggacggcagccgattaggttaaataccaatgttgacttagattatacaggatatccaccatcctatgaaacatccaacggcttgattgtctagatattatccttcttttcatacttatagctgcatcagttgagtttgaccttataagtcgtgattagaatctcaatctctagcctgctttttggttgctgattagggtagtattggagtttcagccgatcttacttgatttaactcttttatatcttatatgcttgattgacatgttaaatctgccctttatgttaagatcttgtcgcatttaggtatattgagcatcctgtttgatatattttgcttgctttaatatcttaatatagagtagtatcggagtattagccgatacatgttggatctgtctgatcggctgtgctataaatgtctataatcttctcattaatatatatttcgatctattgtctcggtatggcgaccgatctatcccaatcacttgatttaagtatatatcgatgaaagtattatataccattgatatctatagccgatcgaatatatttaattctttcttacttatttatgactgtcgatcgaatcaaatatgacatcggctgaaagataaatgatacgtcatcggcgactggccgatcggctatcgtttatagatttaaccgcttttttcctgtctttatttcttgttgattgtaggatcaaatcaactggcacgctcacgaacctaaaggcaagattgttggacctgcactgaagttaagcagatcttccaggccagtatgtgtttttcgcatcaacacccgtgttacaaacatcaattagtcacatgcccttaaacacatagggctggtttggttttataccaacttattgtcctaccaaaagtttggtaacttcaatagtgaaaagtgattgtttggtttgctactaaattttacctacattagttcaaattcaatacaacctaatttagtagtgccaaaacttgttaatgttttggcactaccaagattttggcatggcaaaaattggttccaaaacaaacaagcccataacactattgaaatcataaccaccttttgaatcccttcgaacaaaggtcacacaacgaaatttctcttataaatacggatcagccaaaaaaaaaactgataaccggtgccgttgatatgttgctttcaaacttatgtttgaactaaaaagcaaatatagcaatgtatttgacactatatgataccggtgattacatgcaacaatttttgccataacaaaaaagtatttttatagacccacaaatagataataagaatagaaaaatgcaaccaaccgtaaaaacatttctttcaacctaaaaatgataaagacttaattttgttttaatatggttccagtccttctgcctatcagctaggattattcattttgtatttttataggaacttctatttttgcaaatatggcgacttactccaggatatattttcaagggttaattagatacatgccactaaaaatttatcggttttaaaataggaataagttcatctgaggtcccttaactttacactgaatccgattttcgtccctcgatcggaaaaccagacacaacgggtccctcaactattaaaaccggtgcagattagatccctcggcagttttaagagcggttttggctgacgtggcgcctatgtggctaatttgactcggtctttgtccgacgtggcattgacatggcgcttacgtggcaattcgacccgtgggacccacatgtcagtctcacatagaaaataataaaaaaaatttgtgggtcccacatgtcagtccaactcacccccttttcttcctcctctctccccatctcactctcttcatctccctatctctactctctctaggcgccacggaagacaacggcatgcggcggcgtgcggccggcgataggagaggagggagcaacgcgcaaagaccggcgaggcgggcagggagggaggacgcagggaggccggcgatggccgagcgccgtgggtgggggcttgatggcgacggacggagggagaggtgcacagccgacggtggccagcgggagagggagcggcgaccgccctccaccgcaacctgcctccaccaccgagcttgtcagcgatcgcccaccggagcaaggaggacgatagccggcgacgggtgaagaggacgaaggcggcggtctggagcagaggtcggagaagggcccccagccgccaggatggcgcacgatccgccgcgtttcaccaccaccgagctcgtcagcggcagcccaccggagcgaggagcttccgcttccccttcccccattgacgccgccgctgcagcagctgaggcgccgctccccatgccgccgcttctgtggcgcacgccggatgcggacggggacgccatggccatggacgcggacgacgtcaacgtcgacctcggcatcctcggcgactcccagggcccccgcaccgccgctactaccgggtggagcagcgcacggcggacgtcctcctcctccggctgccaccgccacacctccccgcatggctgcatctcctcctcctccggcggccatcgctcacgccgccccttctccccgccggccactgcccttctcccggccgccactgccggatctcgattgccggcgttgctccggggggacctgctgccgcccgggtcatctgttccgtccaccgccgtcgccgatccccttttatcaccccggctttctcctccaacttgctgctctcaccggtgggcgccggtctcgccgcccccctccaactcgccactctcaccggaagaggagaggagaggggagagagatgaagagagggagatggggagagaggaggaagaagaggaagggtgagtttgagtgacatgtggggcccatgatttttttattattttctatgtgagactgtcatgtgggtcctacgggttttattatttttccgggtcgaattgccacgtaagcgccacgtcaatgccacgtcagatgaagaccgagtcaaattagccacgtaggcgccacgtcagccaaaaccgtcctcaaaaccgttgagggacctaatctacaccggttttgataggtgagggacccgttgtgtctggttttccaatcgagggacgtaaatcggattcggtgtaaagttaagggacctcagataaacttattcctttaaaatatgccattactatttcttgctgtacaccctgaggccccacctggggacaaacagcccctacggcatggcttgcgacttgcaagcagcagcgccagatcgaggcccaaacggcctagctccagactgaggcccaagcggccgagcgtatgtacgctcgctgacttctatacggacggccaacaaaactattccgtgtaagaagacagaagtggcttgacggatgaaaaaaaaagtatatagaggctatttagatcctctgataaaatttttcaccatgtcatatcgaatatttgacacatacatgtagtattaaatataaacgaaaaaaataattaattatacagattgtgtgtaaattacgagacgaatcttttaagcctaattgcgccatgatttgacaatgtggtgctacaataaatatttgctaatgacggattaattaggcttaataaatttatctcgcggtttataggcggaattggtaatttgttttattattagtctacgtttaatacttgaaatatgtgtccctatatccgatgtgacgtgccaaaactttacgcccatggataacacccccataaacaatgtggctacagaatcaccttcatttgttttataacagataagtggtttgactttttttgtcaaacttaaaaaagtactaatatctattatcttattaaaggaatagaaaaagagcctccacgttcgctctcacggcctagaaaatctcatattaatcggagaaaaagaaaaacagagtccatatagaaatataatttagaaatagttgaaattcggaattaaaaaataagaaattttggaagaggagactgagttcatatagaaatacaatttataaataactaaaattcggaattaaaaataaggaatattagaagaatagtatagagtccatatagaaatacaacgaagaaataatagaaattcggaattaaaaataaggaatattagaagtagggtatagagtacagaagtagggtatagagtccatatcgaaatacaattaagaaataatagaaataaggaatattagaagtagggtatagagtccatatcgaaatacaattaagaaataatagaaattaggaatttaaaataaggaatattagaaatagagtatagagtcaatataggaatttaaaactaactaaaattcagaataaacataataaaattaaaattagagtttagagtccatataaaaatacaatttataaataactaaaatttgaaattaaaaaaaatatgggaagaagagtctaaagtcaatataggaatacaatttataagtaactaaaattcaaaattcaaaattaaataatattgaaagatgagtttagagttcacatggaaatacaattagaaataataaaaactaaaaattaaaaataaataatattggaagaagagcctagagactatataggaatacaatttacagataacgaaaattcggaattataaaaaataaatattgaaagatgattctagagtccatataggaatataatttacaaataactaaaatttgatattaagaaatattaataactacaccgtatataaaatgcaatattacacattattagtttcaattcataaagttagtacaaaatttaaaattatgttgtcattttaatatatttgaataatacatggagaatatatatatgttattatatgagagaaaatataatgatgctagccgcgcaatctgcgcgggccaccatgctagttttcaataaaaataaatatagtaacaaaatatatttgatgttaaatataatgaaactaattttatgttgtgaatgttgctatttttttataaacttgaccaaatataaaaaactttgaataagaacaaaagtcaaaagagatataatatgaaacagagggaatagtaaagtttgctattttgtggatgtccaccggatcatgatcgtccggatatgcctggaatgttaaactgtgctcagggatcattttacttgtaccgttgtgagattcgttattcttaattgatatatagttcagagcgatgcttgaaaggttaacactttgacaccacatttccacgtattttcaatgagcctcactacggtgctctttgctggtagtagaaagtaatatgaaaaagtacgaattaccctccccctcgggaactattgcgagagttcgatttaccccccctaaactataaaaccggacattcgacaccctaaacacataaaaccggat

SEQ ID NO: 16157 - DNA, 1896 bp, Oryza sativa
tcgatgtaatatatcagaaaatataagaaaacacaataatacaacatattagatttttccacatggtatcagagccttagagaccaacgtcgttcgatccccgcgtcgccctggggagatgagatcaatcttataatctccctggggcgccgcatctattagctccacaaattatccatagattagattttaccaatattagaattagatcaatttatttttttgccacatcgaaccctacgatctccaggagccaacacaacgatgatttcgtcgcaagccgtcgctcaatagcatcatcaagcagaaggcgaggccgtggcgtacagcaccaccgtccaagtcgccgtgaagcccgagcgacgggaacaccagacgtcatcaagccatctactgttgcatccatctactcaattgagagaagcacatggtgcacaggtgacaggagaatcaagcgtcaagacaccaagcaatccgcatcgatcatcttcgccaagctcctatgaacggccgcgacgcaagccacaactgcttcctcctctacatcagccatacatttgtcttctccgacacaacatcgccgatggtcttcatcaacataggaacaagcgcgccgccgccgactcgtccacatagatggacacctcgcgtcctctgacagattaatctgcaagacgcttcatcgacgacatcgaccgcgtcctctacgacggcaacgaccgcgtcaccgacgacggcatcgatcacgtcatctacaacgacaacgactgtatcaactcggcatcattattgtgatgaccgcttcacggcgcagaaggaccaaccgaagtggtggcctcatcgccaacgacgtcctctgacatatgcaagacgtccccaatggcatcctctcatcctctgacatctacaagatgcaagatgctaacaattgcagtttttgtcttcacaccatggcgtgaattttttttttttcgccttcggctatttgcggctacatcaactaccatgactaccatgaccacgactactatatgattggctacatcgacgaacgtctacaacaagaatcatctacgacaactccagtcaaagcgtccgtgtcatcgctatcgtccatgacactcccgctatgactgcgggagggaatagaggatagtcaagggacgacacagaaggggacgcagccaccaggtggaggaccgaccatcagagatgcaatcgatgatgatgactcagagagatgaagaaatagaagatttcaaatccagtcgcaatcgttcgcttcgctcccgttacgactgagggggaatgttagaagtataatatgttaattagagataagagtcaaatacaaattatagagataagatatattctagagatagaatcctagagataagatagagtcctagagatagaatcctagagataaatctactcttacttgtattgtactccaagtctctatcccctatgtactcctatatatacctcatgagagggtcgatgtaatatatcagaaaatataagaaaacacaataatacaacatattagatttttccacaccgaggccggcggcggcctgagtaggctacgctgatcctccatcccgcgagctaagcagggtggcgccgccgttgtctgtccatctgctgcggctatggcgagcggcggcaactgcggcaggacgccaggccggtgacgggcgttgcgggggcggtgatggcgcgcggcgcggcccacgacggcgactacggcgagcggtctccccccctctctctctgtctctctgtggcgccggcggccaacggcagaggtcttcccccacctctctctcctcttcccccctctctctctctctctctgtggtggcgagcacggcaccccggcgttgg

SEQ ID NO: 16158 - DNA, 6973 bp, Oryza sativa
caggcacaaaaccttacccatgggtgtgctatcgggcataattctcacccatcgggtggaccgggtccaatagcgttctatagtcacccgaacccattaacccgtaggttaaaaacaaccgcatggcctagcccatgagtgtaattggcccaaggcccaacaaggaaaaaaaacccctagctatataagttgtccacccaagcaacactaagctccatttctctccctcctctaaagccgcacacagtgggaatggggatagcggcggcgggggcgggccggcggctcgcgtcacagaggccgtgaggtgcaccagcctcacgaacgctgcctcctcctcacgagccccgctgccatcgctgccacgcgagacgctgttcgcgagctctgggcctcttgtgccgctgcggcctcctcccgtgagcgccgctgttgctggatccatgcgtatccgtgaccgccgccgccgccgccgcagctcttgcgacctgcgtctccttgctgctcaccgagaccattgctgtagcatgcaggcagcaacacgtgcatctccactcactcgccatcatcatctcgcccactggcctacctatttctgttgtgcttctcctgtttgtgatgttaattgatttgtttcatccaagtttgatatggcggttgggttcaattgtcaaagccaagtagctaacaatagcttatactgtgatctggaatggtttgctaatactgtggttgtatttatgtcaattgaggtgtgatgtgctctcttaaccgtgccactttttatgtattatcatctgacatgttgattttgcaatgtggccatatggttttcctggatctgattgttgcacaatgtttaactactgtaatgggtatgggtacccgtttacccatcacttgcgtgggtatgggtatggggaaatttctcacccgacagcaggtgtgggtaatgaaatgggcaagttcactctccatgggtgtgggtacgggggaagagaacccgatgggtacacacctgttgccatctctagtcgccaccgtggacgcggtcgccgacaaagtgcttcgcattcgccgtcgccgctcgccctcccaggcgcgcccgccgtgctccccagcggatgagagaagagagagagagagggggggtgaggtaggatgacaagtgggcccaaagtttttaaatatttttttaaatggattgccacctggcgccacgtgtgtgccacgtaggagcaaaaccactccgggttgagctgggggggagggggggtaatttgtccggtttcaatagtttagggtatcaaatgtccgtttttgaggttggggggtaattcgtactgtcgcgattgttcaggggggtaattcgtactttttctaaagtaatatgaaccattgatcttatttgatcgaagggttcagatctatctatgctaccaccctagttagtagtagaaacgtaatgtgtggatgggtataatcatcatttagcagtggctaaaccttttctttagctttttcgatggaatatgaacgatgccaacacaatggatgaccacatatcgatctaactaggaaaaaatataaatgacaaagttactcataatcaatgtattggtaaattactgatttacccttaatactactggtagtattatacaaccaatagagagcaccagggtatcgctcatgttcaattaattatatgggttccaactaaacgttgaatggtacatattctggcaaatactgaatctaccgggtccattgaagtcaattagaagatctctcccatcttgaattataagtcaaattagttacaaggtttacatgttgtagatgaaggtttggtgttattctcacttctaaacgtactagtaatcatgccgggggcccgggggggggggggggggaggtgcccattgaggataaagtattggatctgctggttactcatgcaaagcgtatgaacgtgttgtgcgtgatgaaaggaggacaactccacgtttatagtaaagatgaacaatcgaaagccaattttgcgagctggacaaaatatgtgaagggttggtgtggtgatggtgcttagaaagcatgtgtttgccgacaactaaactgatcaacgcccgaaagacagtgctctccttacacctctacgaccttcgctcacttcggctgatcagtgattagccaattgtggacaaaacccaacaataagcaatagtgcacagacctgtcccgaaattatacacgaatagtgaggactcaggacactccacaaaaggtgaaactaacaagactgtctaccaataaccaaccatgttccatttaataatttcttttttttttttgtaacatgttccgtcttattgactaacagagcataatgttactcctccccgtcgccagtggccaacgccattgccgcaccaacaaccgaggtccaatgcctacgcctacgaaccacaggtggtccagctgccagcaagcgcgcgcatgccgcgttctggttgccgcaccgccacgccacggccaccggtggacgccgccgcgcggttttattacctctaggcttctttgtactatcactgattcactgtacagcgtgtgtatgtgcgaaacgtggtggctagctattggccgtcgtcgcgcttgtggaggatcttgccggcgaacacggccgtctcgatgacccccctgatgacggacgccgtctggccgacgttgcacttgttccccgggaacgtcgccccgctcacccggtcgatgcagctcagcaggttctcgttgcacatcgtgttcaggtagtcgtctgcaaaaacaacaggaaaagccagtgagtgaatgagtgagccggagacgcacatgatgtgacgaactgacgatggacgatcgatgtgccatgggccatgacaagtgtacaccaaattcaccacatgcacacttggggggccttcggcgccgcgaggtcaagcttagtgcgcgtgcacgacgtcggcggcgcggctcatctcatggtcatgggtcgagcaatatgtggctagctttgcagcggcggcgactcgtgcaaaactgcaaaccgtgcgctttgcaataacccaatcgctggtatactaacaccgctggtttttgagacatgatttgattcgttaggtggcgcgtcgtctcgccagcatctggcatgaggttgaggcctcagagtcaagggagaccttttgtcccccctgctgcagtgctgctggtggaggcgtccgggcgaagcaaatatctagtatctcttctcgatcggaaggaagttcagagttcggagagtgaagagagagacagagagatgataccgttgtgggtgtcgacgcagtggtcgtgcaccatgcagcaggcgtcgagcgcgtcgcatggcctctcgccggggcacccgctgtagaggatcccgcagtacttgccgtacctcagcagaggtgcaactttcagaggtcgtcggttgcatcacggacacccagcaaaaaaaggcaaaatgcgtgtcagctccctttgccggacggccggaacaccaactcaagaatgcatatcatgttcagtcaaattaacggtgacacggaaggattcaaagacaagaagtctgcatctaatgccttggctagcatcatatgctctgcttgttttttttttttttcatttcagaagcagggggaagagaagccccagaactgcaaagatttctctgctctgtaggcagtatcagcctgtcagattattagtaagaggagtggcgtactacgtacttgtgcaaaactgggattcgcacgtccggctacatccctggtccttctgcgccgaaaacaaacaaagccaaaggcgaaaatcaatcaactgatcaataacaagtaactgcaaaaaatcagacttggtcagctagctccacgctggttctcaccgccggcgtgctgccaagcaggtcgccgatgttaagcccccgcgacgccgtcaccagcaagaggagaagcagcacggaacaccgaggagcgagcttgaggaagaacctcatctcgctcgcctcgcccgtcgtgtttctctttgcgcgttcaagcaagagcgcgtgttggatgggccgagaaagaaacgggtggagaggtgatgatctgcttccggaacaggcaccagctgagctgattatttatactagcagctgcgatgagtgatgaaaagtacataaattttctgaagagatattatagtatttgtgttggtgagagctgcgaacttgaggtgaagaagcttcggatgtgcctgtcctaccaagatatgaagacaacaacaccctgatcagatcaccgagccgtttcctatcccttcgttgtggtggttggctgatcgtagttgcacttgatactagtatcttaaagcaaaaggagcagtatcatttctacaaatgaaaagtgaacactgcaggggcaaacgcttgttttttcttaaaaaaatgtaaccgtgtaatatcccaattaaatgagactaatcctgattagtacactaaaatactaggatagcaaagttggttgcagtgataggtacactccaatctcactgagccaatattattattgaaggcatatgacaatgccattacttgcaaatgcagttcaagagttgccgtcagcccgtcacaggagaacaccagacaagtggctgcagttcttttgtaacttctgacctatacgtctatttggcatgcaaatgttaatatgatcagagttcaggatctctatcctttttgccatctcaacttctcaaggcacaccaaacaacatatagaaaaatgagacatatttcagtgtttgaccacatccatatggaaagcccagcctgcaccagccttggttacttaaatgctacaagaagcggtatcaaactgtggctgtttgggcgtctctctgaagaaatgacccggtaaccgcagagcccacccaaccgctgcacatttcaaattgtttgggcctagagtacaggctcctctagaacgaatggaacgtttcacccagccacccaatatcaatactagttgaaagcaagtttacgagcatagttcaggtggagaccggagatgcttcgacccaactcacagtttcgtgtaaatcccatctcatgtttcgttcgatctctatctaccagctagagttaaactagtactatatatgtattagtacactcatgttagagtgattatatgttcttgtgctgttgactataatctgatacacgtgtgggaatataggttgtgtttagttcagcgtaaagtttagattttggttgaaattggagatgatgtgactgaaaagttgtgtgtgtataacaggttgatgtgatggcaacagaaggagctttcagctacctctcttttagccaagatcaaggaagaggccaaaacttaggctttagcaggagcgagaagttttaatagctggtttttttttaagttagctcggaccaaaggtcttagcttctttctttttttcctttcgctttctaaagttctccttctctattcaatgaaattggcgctcattgattcgttcaaaaaaaaggttgatgtgatggaaaaagattgaagtttggatccaaattttggatctaaacacagccatgtatgcagggagttgagaaaacagagagctaatgttgtgtgatgactgatgaattgaagtctttggatcagttaagacggaattgattttgcgggtttgccccagcaaggctgtgtttagttcctgaaaaaagttaaaagtttagaaaaaaagttaaaagtttatgtgtgtaggaaaggtttggatgtgatgtgatggaaagttagaagttaggggtagctgggggtgaactaaacacggcccaaattgagggacacgtacgtagcccccagttctactccgatctagctactaggccgtctgggaaagtgacggcacgagtgcacgaccacacgaggccgtgctccacaaacaaaccgaggaagctccgaagctaggcatctcagtctgcactccacatgccaaaaactggagaaatgcaatgaagctgggcatgtacaacttggcgtctgcacagtccaaaaactgtggtgcaggttgcagtgaagccagtggcacagtgcagtctttggtttcagaaatcagaaacagagcaaaaacgaccgggaggaacgcatcatgacactgttccgctacatttattcttcccttccacgaactgtgctttcttcgagatagatataatagtatctcctcacaattttatgtatgcttcatcacttcacatttcctttttcttcagacaacggtacaccggctcacctgtccggctcccactccctatttactcccaaagtaaacactaattgacaaactccatatgcaaaatctggcgaggaagcggcaaatagtgtatatggggtgtgtttggttacagggcacactttactttttttttttaagactcccaaagtaataacaaattgacaaaccccgtatgcaaaatctggcgagaaagcagcaaatagtgcatatggggtgtgtttagttacaggtcacaccttacattttttttagagaaggtattttttacctgacctctatatccaaccggatatatgtagtctttttaaattataaacttagcctatcaatcatggaacttagccctcaaataactcaatctaaaatttgctcctatagagatttgaactcaatcttagggtgctactcaagtcactgtcagcactaggctacatgcacttacacggccgcactttaccattactaaggctaggtaagttgtggtacccataaagtgtggtggataaattgctagccacaagctcacaaagtgtggcaaagttgttgacaataaagttaagtctatgatgaataataaaattaagtctatgatgaatgggacatgttattgaaaaaagtgtggcaat

SEQ ID NO: 16159 - DNA, 13084 bp, Oryza sativa
tgtttatattgaaatatgagcacacgctaaaagttttgcgtatttctcagtaaatgtgctaagtgcatgttgatagcaagcaaataagtaatggaatttgcaatgaacagctaaatgtctaggtgaaatccaatgatgacaaattgacgagaacatgcctcaatgcgttggctcctttgatcatgcagattgtacggctagcattattatatcttctctcatataataataatattatatatatatataatatatatatatatatatatatatatatatatatatgagtaaattgcacccacggtgcattaacttggtaggtaggtgtaatttgatgcaagaacttgagaaatgagcgttctagtacaacaacttggcaggtaagtgcaatttaggacaagaactttataagcaatcgcataaatgcaataacttgcaagatatgtacgattttgatacaataagttaagaagttatgcaaaaacttaattatctggagcacttttttaatacatatttaattttcaagtacttattttgacaatatactagcgtggatttgtatataagcatatttatatttttatcctaataactaataactgaaaatcaattaaactgtatgtagaaattattatatttcggttgagatttggaaatgtgaagaaaacaaaaattcttaaagataattggatgtaaattggatgtgcagtataaatcttaaagattaaattcaatattgtaaagtaatatccgtaggactgctatataatagcatattgatatcgcgaaaaagaactcacctagcatatgcttagctaatttgtcaagttcttacacaagaacgcacccacttgttaagttgttacacttgaacgttcaattttcaagttattgcactatatcacacccacccgccaagttgttataccgtggatgcaatttactatatatatatatatatatatatatatatatatatatatatatatatatatatatatatatatattaatttacctatataggatacctatatgggactccatggtgcccgggcttcaaggtataaaacacacaaattctctcaaatttttaaaaattttcaaattgtgagtatatacctagctatatgaatttgattcatacaaaaacctaacaacaaaacaactcaaactaaactttatttcacaattcattattaaatacctaacgaattatatgtttggatgttatatacctagaaccaaaatctaacaaaaaaaaaagttcaaactcggttcaaacttgtttgaactaacgtagtaaagaagttaaagttcatatctaaacatttaaaaaaattcatactcattcaaattaagtatatactcaatttgaatcttggagcccatactccatgtagcaccagttaatttacctatatatatatataatttattattaaaatatattaaaatgacaatataattttaaattttatatgaactttatcaaactaaccaatgggtaatattcatattgtactgcaaattgtatgtacgtgatagtattaattattttttaataccgaattttagttatttctaaattgtattcctctaaggactctagatttctctaccagtattctttatttttaattttgaatttccagtatttacaaaatttatgcctatatggattctaaactttctttcaatattttttatttttaaattctgaatttcacttttttaaaaaatatacttctatatggaccatagacttttcttccaatatttattatttttttaattccaaatttccgttatttgtaatagtatttcgactctagaatattcttcttctaatatttcttatttttaattctaaatttttattatttataattatatttcgatatggactctaaactcacctttcatcattccttatttttttaattctaaattctgttatttgtaaattgtacttctatatggactctaaacttacctatcaatacttttaaaaaaaaattaatttcagttatttttacactgtattcctatatgctctctggactcttcttccaatatttttttttcaaaatttagttatttgtaaattatatttctatattgactctaaattctaattttaatcttattatttttcattccgaatttaatttaattgtaaattcctttatggacactaggctcttcttcaatatttattttttttaattcctaatttctattatttctaaattttatttctatattgtcacaccccaatctgataccgccgtacaacggcacctgacaggagcgtgtcgtagggaaaacggcgcgaaccgcttcctacgaaaccgcgatctcggtaccagtcccaggacatagtgctggtacccacggtaacaaatatgaatcatagcaatccttaaaataaatagaggacttatttaccttaacaccaacagcagcaacaacagcagcggaaccaacggtctaacacccaacaccacaggcgacggctgggaaccaggacgaaaccctaatcttcacttcactttatcttctcttcagggcggaggaactatatatatatatatatttatatagagcaagggtgagtactttcgtactcagcaagtcacgggaacttaggtggttaatgcaagcttggaagagaggcaaggttgttttgcaaatcttttgtttgaaatcattttgaaaccactaagtgatttatttctttctaagtttgggccgaaaagagacttgcgtctcgattcgactttaagagatgtttttcaacagctcatttggtaatgtatcgacctcccgggtcagatcattacttctcggctcccagagccattccacttgattaatcggctcccagagccttttcattttctcggactcccagagtccagctgcccagcagcacaacaatctgcttccactcgggaagcctaatctatgatgcccgcagacatcccgaatcacacagattcgtttctgaccactcaggtcgtccatctgccacataggctgattctggttacgattcccacaccacaacaacttttcacaaagcacaggcaaacaaatctacgcaacgggaaccacctcacatccgcccatgaccgtgggcacggctattcgaatagttagttaacctctgcagaggggggtacactttacccacacgacacgaacttactccagacactggccggtgtcagaggttcgcgacaaagcctttcccaagccgacccagggatacctcatgccacatagaaggatcaaatcctcacataaacataggccattttaggcgttcacaattcaaactccaaccacctcgatcggtaattcagcaagcttctcattcttgtattaccaggaacccggtttggctccaactgtcacgcccaaaaattcacgaaccagaatttctaagctgaatgtgcattaaacccctgtccaggaccagccagggtacacaaacgataattgttgacatacagatccacgtcttacaaaaatagaaaagattacaaatgcagcggaaaaagataaaagcgagctaagcctgaaggcttgacttctgcagcgggcgactccattccacaggcatccttgacggcagcgacgaaaccaacctcttcgagacatcttcaactgagaaggacttcaattctggtgagggggaaaagagcaagactgagtactacccacggtactcagcaagtcataccggaagaggaggtatgatgcaagatatatccaagggaggctaaaggttcttttgcataaagccggcatttcaaagcagtagttgaaagcagtaaaacagttgtagtatttaatccatattaaccaatcactgtccaacgttacaccacgttgcaacaggcccaaaccaccacatgaactaaccagttccaaaagctaactagggtgaaactaatcacggtgaatctggttgaccgcccataaccgcgggcacggctattcgaatagttttactctgatcagaggtgtacaactgtacccacaagacacagccccacgacacgttcccgtgcgccgacatgccaccacgacataccggaaagaggccgtgacaggacccttcgcataaccccctctaaccgatcgcaccacaccttagggttcgcccccgtccccagcaggcaacgggcagcccccctttcgtgccgcggtgaatccggaagccgatcaaccggacaccccggccgacccaactccatcacgcccaccctcgcctgggtacgtcggctagagaaaagctacactacaagcccagccgttgcccacgctggcttgtggtaagtacgataagttcttccagggcatcccgcgaaccggtccttaaatgccatgggtgcgactagcaagaccatgcacccacagcccaccatgacgtgtattttaattaaccaacaccattacggtggcactaaatcaaagctatgccaataatcaagtctatgctttaatgtgatccccttttgtgcactagttgaactaagcatggctaagcatctcctaaaccaacatctagtcattttaatacccaagttatcaatggcgtaagggaaacaacatatagctgagtaataggacccatcccacatgatattgtaaaacaatgcagtatttaatagaaatgcgggatatttgtaaattgggtacaatatgatcaattgtattgcatgacttgccttgctctcgcactgatgagaccacagcaacgtcttcgagaatccgcgaatcgacgaaacggccgaactctacgcgacaaacaaagcacacaagcaaaacatgctataagactactgaaacatgaagcaaaaccatttttaatggattctatacatttttatgaatttactgagacttgaatggatttaatcggagctcggatgaattagttatgatttttagaagattctctgtgtttttactataaaagaaaaactcttaatcaatttattgcgcaatattgccccagggctgacgtcagcacaaggaggggtggcgccgacacgcgggacccgcgggtcagtgactcaaggagagagaggggcggctggcaagcgggcccactgggcagtgtcacaaggggggggggaaaaaggcggcctggctcggctcggcttcaagccggccggccggttatggcgagggcggcggcgcgcgcgcacggttgccagcgacggcaaccggcgacgggaggcggcggcggacggcgcaaagacggcggcggcggccgaagcggcggcgcgagcgaccctagcggcggcgctacgcggcgggcggcgcggcaaagggagagagaggaagagagggagaccgatcctcaccgaggggctcggccggcgcgagggaggagcgacggcgaacggcaacgatgagagacgggaggacgacggcgacgggctccgggaggacctagagagaaggttgggaggggttagagagagggaggcggtccatggcgcacgacataaccgatcgaaggcggcggcaatggtggaagctcaccggagtgcgaggagatgcgagctccggcgatggaattggacgggagaacagcggacgaggtggacctcgggatggcggacgcggcggtgccgatggcggggtgcggcggcgaccctagcggctgctagaggcggccggagcggtggagatggcggcggcgggtgggtgcacggtgctagggcgatagggagctcgggagcggacggcgaaagagggaaaaaggtggagagaggcgcggtggtcggttatatagaggtgggggggggccggacgtggccgggaacggcgcaatttcgccggagtagtggaggaggtggaggaggagagagagagagaggcgggattcaaatttgaatcccggccatctcgcgggcgcggggtgagcgggagtggggcgtgggcgcggggagggcgaggtgcgcgggggaagtgggcgacgtggcccggggcgcggagtggggcgcggaaggcgggggaggcgggcggcgatgggtggtggtttcggcggcggttggcgcgggcgtgggcggccggaggttagggaaagggctgacaggtgggccccacctgtcagcgcccgagagggagaaggaggccgggtgaacttcgggagtaggagggaggagcgggccggcgcgggaggaaatgggccgggcccaagaaaaagaaaaaaggagggaaaagaaaagataaaaggaaaaaggattttcccagggatttaatattgcactttgcttattttaattggttaaaattatttccaaggctctgaaaattccactaaaaatcctgttagcatattttgacatgtagaatccaagagaaattctacatgtcgattccgattattatttgcatttattaattagggattcatctctaggttaaattaaacaatttcttcgaacgatttattttatgaatttagagcaagggaggggaacttcagggcgtgacaaacctaccccccttaaacggaatctcgaccccgagattcggaagagctggcgaagaggtgcggatgagcggccttcaattcatcttctctttcccaggtggcctcttcctcggagtggtggctccactggactttgcaaaacctgatcaccttgtttctggtccttctctcactggtctcaaggatacgaactggcttctccacgtaggtcaaatcttcttggatgtcaatgtgctctgagctagcttgttcctcaggtaccctcaaacacttcttcagttgagacacatgaaacacatcgtggataccaaccatattagatggaagctctagctggtatgcgacttcacctctgcgttccaagatcctgtatggtcccacaaagcgtggtgccaacttgcctttggtttggaagcggtgtactccccgaagcggagtgacacgaaggtacacataatcccctgcttcgaaagtaagctctcttcggcggttatcagcataactcttctgccgagactgggcgattcgcagtctttccctgacggtcctgactttctcctctgcttcggttaacacttctgtcccaaacagttggcgctcacctgtttgatcccagaaaagtggggtgcggcactttcgtccgtacaatgcttcaaacggtgccatttgcaaactggactgatagctgttgttgtaagagaattccgcatacggtagacttttatcccaggctccaccaaagtcaagtgcacaagctctcaacatatcttccaagatttgatttactcgctcggtctgaccatctgtttgcggatgataagccgtgctgaaattcaaacgagtccccaattcttcttgcagtttctgccagaactttgaagtgaattgacttcctcgatcagatacaatcttcttaggtaccccatgcaaacacatgattcttgaaaggtaaagctctgccaaccttttcccggtataggtagtgtgtactggaatgaaatgagcaactttggtgagtcgatccacgaccacccagattgaatcgtgccccaacgatgtcctgggcaaacctgttatgaaatccattccgatttcttcccatttccattccgggatttgaaggggttggagtaagcctgctggcctttgatgctctgccttcactcactggcaaacatcgcagagtgcgacgaattcggctatttcctttctcatgctgacccaccagaatttctctttgaggtcctggtacattttagtactaccgggatgaattgaataatgagtttgatgagcttctgtgagtatgagatccttcagttctttgtcgtcaggcacacacaatctttctcccaaccagattgtgccatgttcatcctcatggaaatctcgggcttttccaaccctcatattcttttttagctcagctatttcaggatcatttacctgagctgctctgacttgatccacgagcgtaggccgtgcctctagggcagctacgaacccgtgttccacgatgcccaaatttaggtgctcaagatcttgctgcaatttgtcacacatgtcttcaatacatactgcattgcaatagctctttctgcttagagcgtctgctaccacatttgctttgcctggatgatagtgtatccccatgtcataatctttaatcaactctagccatcttcgttgccggagattcaagtcgggctgggtgaagatgtacttcaggctcttatgatcagtgtaaacttcacagcggttgaaaataagatagtgccgccagattttcagagcatgaaccactgctgccaactcaaggtcatgagtgggataattggtctcgtgtgggcgcaactgtcgcgaagcatatgcgaccactctgccttcttgcatcaacacacatcccaatccttggcgggatgcatcacagtagacttggaaatcttttgtctgatctggcagaactagaactggtgcagagactaacctcttcttgagttcttcaaaactttggttgcactcagctgaccatttgaatttttcatctttctttagcaactgtgtcatgggcctggcaatcttagagaaattttcgatgaaccgacggtaataacccgcaagtccaagaaaactccggatttgagaaactgtctttggtggggtccactttgtaactgattccacatttgatggatccactgccatgccttgagcagaaatgacgtgacccagaaatttgacctccgataaccagaagtcacacttgctaaacttggcatatagctggtgctccttcaatttctcgagtaccagacggagatgctgctcatgttcctcttctgattttgaataaataagtatgtcgtcaatgaataccacgacaaacttgtcaagaaactccataaacactttgttcatcaagttcatgaagaaagccggtgcattggtgagtccaaaggacataaccgtgcactcaaacaacccataccgagtggtgaaggctgtcttgggaatatcctcttcccgaattctcaactgatgatagcctgatcgcaggtctatcttggaaaacaccttagctccttttagctgatcaaacaggtcatcaattctgggcaacggatatttgttcttgattgtgacctcattaagggcgcgataatccacgcacatcctcttagtcttgtctttcttctccacaaagatcaccggagcaccccaaggtgaagtactcggtcggatgtaccctttctgcagctgttcgtcaacttgctttttgacttctgctagctcgttagctgccattctgtacggcctcttgtagattggagcagtcccgggtgccaaatcgatccggaactcgatttctctcttcggtggcattgtagtgaggtcttctgggaacacctcaggatactcttgtactataggaatatcctccaacttcctgggacttttctccactgtttctgtctgaccctcaatagcagcctgattcagactcgctacggacttctgcgatgctggggaatggaaggtgatcttctcccctttgtcgttggttagggtgatggtgcggcttgcgcagtcaatcactcccttgtttctggtcaaccaatccattccgagaacgacatctaggtctttagattcgagaaggatgaggttggatagaaacggtgatcttttgatctctatagtcaccgaggggcaataatgtgctgccctcatgtcatttccaggggtatgaacctgcatcggtattttaagttccactaccgataatccatgtgtcccagcaaatcttttggaaatgaaagaatgcgaggcacctgaatcaaagagaactgttgctggatatgagttcactggaaacgtgcccaacacgacctctggtgctgcctgtgcttcctctgcagacacatgattggcgcgggcctggatgaacctgggtctagtgcgattcagcttcggacacttgccagcaaagtggccgtgcttgccacagttgaagcatggtcctggctttcctacagcccccttcttgggttgttctgactgagctgacacagctggcggatctgactgagctggtgccattagtgggggtggagtcgagttgtggttgtgctgcttactgttgttgtgactgccaccgttgtaatcgttgttgaagttactcgggtgatagggacggtgctgacagacgatcagggtgggaggcccacctagctgtcccgtcatgaagcgaggcttctgattgttcccctgaggaaagctgatctgagctgcctttctttttcggtccattttgttgcgttgctcttcctggcggatagccttgtccacaagcttctcaaagtcctcatagactccggagattagctggttggtcaattcatcatcgagcccaaaaaaaaacttctcctgcttctcagcatcggtgcgcacgtcctcaggagcgtagcgcgcgaggcggttgaactcgtgcagatactctgtaaccgttctggttccttgttgcaatgcacggaactctctcttctgttgtgccataatcccttcaggaatctgtaccttcctaaagttttgacaaaactctgcccaagtaaccttcgttgcatctggacgggtcaccacgtagttatcccaccaggcagaagcgggaccttgcaactggtgtgtagcaaaagcaactttctcttggtcgttgcattgtagtaggttcagcttcttctcaatagcacggagccagtcgttggcctccattgggttggtggtgcttgagaaagtgggtggctgaatacgaagaaagtctaacagtttggacacgtgtgatggtggaggaccaaactgctggttctgatgcgcctgctgcaacatctgatggtaatgttgctgcatctgttgcatcatcattgtcatcatctgagtgactgttgggttctcgggcggcggagatgaactgctgccaggtgcaccactggtatgagcttcatctgtctgctcttcgctgccactggcgtcgttggagtcacggggatcattccttgtcttcaccatctggacgaggataggtagaaataagagaaaggaagaaaacagatggctcagaaactaatctttcttataaacttaagtgcaattatcttaatcttgattaaaacactgaaaaagaggcacgcaactcctaattaaggctgtcataccactcacacatgatatcgaccgccgactaacccacaagcaacaaacctaaacatggaaactagcaagcaaacaaaactaagaagacgataaagctaagggcggcgactctgaagctcggagcggcgcttgcgatcgaagaacaggtctgacttctaaggtagacaagggataggaatcaatgcatgctcaaatccaaatttaaacaaagcaacaaatggcccaaacaactagccaagcatgatgatttttacgcatggaacatttttcatgaacccagacaaaagacactaatgcaactgactaaacaatgacttaatgtatgaaataaatgcatgataatcatgatgcgcataaaaactgcatcccatcgaatctagacacaacttaatgcataccacctaacaattctcgactgactgccaaataaattccaaataaagttttgctaaaaccctggactgtccctagccaagagatccgattaaataggcgaccaagattttctcccaaaatcaaaagatcaaaccccaaagtttcccgaaacaaatccaagtgaaaaaggcatgtgcatatgaaaaggggttcagagggctcttaggttttccagttggcttgtcctacggtcaaggtcggctctgataccaacttgtcacgcccagaaattcacgaaccagaatttctaagctgaatgtgcattaaacccctgtccaggaccagccagggtacacaaacgacaattgttgacatacagatccacgtcttacaaaaatagaaaagattacaaatgcagcggaaaaagataaaagcgagctaagcctgaaggcttgacttctgcagcgggcgactccattccacaggcatccttgacggcagcgacgaaaccaacctcttcgagacatcttcaactgagaaggacttcaattctggtgagggggaaaagagcaagactgagtactacccacggtactcagcaagtcataccggaagaggaggtatgatgcaagatatatccaagggaggctaaaggttcttttgcataaagccggcatttcaaagcagtagttgaaagcagtaaaacagttgtagtatttaatccatattaaccaatcactgtccaacgttacaccacgttgcaacaggcccaaaccaccacctgaactaaccagttccaaaagctaactagggtgaaactaatcacggtgaatctggttgaccgcccataaccgcgggcacggctattcgaatagttttactctgatcagaggtgtacaactgtacccacaagacacagccccacgacacgttcccgtgcggtgaatccggaagccgatcaaccggacaccccggccgacccaactccatcacgcccaccctcgcctgggtacgtcggctagagaaaagctacactacaagcccagccgttgcccacgctggcttgtggtaagtacgataagttcttccagggcatcccgcgaaccggtccttaaatgccatgggtgcgactagcaagaccatgcacccacagcccaccatgacgtgtattttaattaaccaacaccattacggtggcactaaatcaaagctatgccaataatcaagtctatgctttaatgtgatccccttttgtgcactagttgaactaagcatggctaagcatctcctaaaccaacatctagtcattttaatacccaagttatcaatggcgtaagggaaacaacatatagctgagtaataggacccatcccacatgatattgtaaaacaatgcagtatttaatagaaatgcgggatatttgtaaattgggtacaatatgatcaattgtattgcatgacttgccttgctctcgcac

SEQ ID NO: 16160 - DNA, 2169 bp, Oryza sativa
aaggaggccgggtgaacttcgggagtaggagggaggagcgggccggcgcgggaggaaatgggccgggcccaagaaaaagaaaaaaggagggaaaagaaaagataaaaggaaaaaggattttcccagggatttaatattgcactttgcttattttaattggttaaaattatttccaaggctctgaaaattccactaaaaatcctgttagcatattttgacatgtagaatccaagagaaattctacatgtcgattccgattattatttgcatttattaattagggattcatctctaggttaaattaaacaatttcttcgaacgatttattttatgaatttagagcaagggaggggaacttcagggcgtgacaccaaccgaccccgccccggcgttcccaactattggcatgcgaggtttccctgaaccgactagttacttagacagggtgtcccattccaccttgtggttgcactttgattatgttcgatgagtttcccacaggaatcggtccttatatgcgaatacgggacagtgccacataggcacaacccccgcatcgcgagttttcacaattcattttgttttcaaacacaccgacaccacatgtcgggttttgaaggcttcacaaacccatttcccaagttttcgacaaacaacggtgtatgtgggatatttggtatacgcgctcagagagcacgaataccgaggtaccacaagggtggagcgacaaggaatcagggtagtacgacctacggaaattagtgcgactactgggtaggtccatcggtttggcacgcaaaccgaggccaagcaagttaagtgtgtgattctaataatgcaagttgcaaacaaaataataatgacttttcaattataggggcaattgatcaaagggtgacttgccttgctcaaggtcttcacgaagcttcacgaatcttcgggaaaacccgcgatcgacgaaaaatccgataaccgcaactatacgcaacaatcgaaaacctaaacaagagaccaaaagaaagatcctatttagactaattagtagtgccattaaatagatctcaattttatggaaatactggaagtggaacggagtcaatcggagttgcgaattgggtgatatgaattttagaagtttaattggagtttctggaataggagaaatggtttatggaatttataatattctcaagaatattattgacagtcactgtcacgcgggaccaaaggaaatggtttatgggattttagaataaggaattgatttatgggacaaaggaaaaaggatttattaaatccctgaaaaagaaaaggatggagggatgttaattggacttgggccgagcgaaggggcgcggcccgaagagatgcgcgggcgcggccgaggcgagcgggtcggcgcgcgggagggaggcggcccaaggccgaacgaggcgcggcccacgcgacgcaagccggtggacgcggtccaccgtgccgggcgcaaggtgggacccacaaggcggcgacacggctcacgcgagcggggtgcacgcaaggcggcgcgttggatcggtggaccgggagacctttgaccggtctccgcggggccgggcggctgaggtggcatccacgtggatgccacgtcggatggggaagggagaggaggccgggcaggctgatccgatggccggcgacgagcgacgtgaaccggcgaacggcggcgaggtggattgggggggtagcaccggaagagagaggaggccaaggggaatcgattcaacggagcggattagccgggggaaaaacgacggcggctggcggcggcgaccaatctcgccggcacgccgacgtggccgcgcgcgagaagagcgaagggcgcgcgggctcgggcttagccgaaccggtacgcgaccgcgatgcgcacgcggggacgcgggacccgatggtcaccggcggcgcacgcacggcggcgttaggcggcggcggaagcggcgacacggcgcggagacaaaggagaaggccggcggccttggggcagccagggggaggtcaaggggatccccgggagcgtggcggcgagaggaatcgacgcgagaggagccgacgacggcggatttcgacggcgatcgtcggcggcgagcaaacagggaaacttcactggggcaacgggggttcgattcgttgggg

SEQ ID NO: 16161 - DNA, 9204 bp, Oryza sativa
cgcctcctcctgctgctcgccgtccccgtccgtccccgcgcaggcggcggcggcggcgctgtcgtccccggtgacgacgagcacgttcttgacgcggccgccgagtgtggtgatctcggccttgagcgcgcgcagccggagcgccttgagcgcgcggatgaggtccggcaggaggtcggtgcggtcgtcgcagcagagcgacgcgcgcacgacgaggcgcccgtcctcgtcgctcgacgcgtcgacggtgagctcgtccgactcggtggggagcgggcacgcctcctccgtgatctccgacgtctgccgcttcagctccttgacgtgctggatcacctccgcgagcagcgacgccttgtccgtctgcacccacacacacaccgcaccaacatgtaagcgcgcgcattgtcgatcaatgagtaaatcacaaggaagaaaacgcacggcggcgagagctcgatcagccaagcagcagtagttaaattagttaaactgctgtgtctaccgcgtgctaatgggggtgggcgaatggggggaatgatgagatggaacggatgggggggagtacgcatgcagggtgcaaaagggcttagggggccggggcgcggtgcgtgccgtggcatgcatgcctcctctcctctcctctccgatccaagcgtgggactcacactactctcgatctctgccaactaggagcacaaacaccgcgtaatcaattgcaaaacgctagtgcgtgcatggcctcgcagctagcttagctagcatgcatgctgttgatggtgctcgcacgcacgcgcgcttccacaagcgagccgtgttcgtccttttggtgttaagtggggcatctaaccatcaccactccccattgtttatacttcttcccttgtcacgccaacatgcggtcgtcaaatctgccgtccgccatctcgcagagtactactactaggttattggcgaatctggaacaaataatcctatgtacagtgcactcactaggcacttggaaatccataacgacctttcagcctacatatagatctaacagaattttcttttcaggtaaagaacagtagtagaaaagtaaaagtttcatagatgcaaaaagggaggaagagtgtactcctatatattgtttccctcgataacgataatgtaacggtttaattagcacaaggcaggcagggaattaggctgagtggcataggataacgtgagtggttttggagtaggggctcgcagagaatatctgggttgggattcttggaagtagggggaggtagcaaagcaggatctctcgagatggtcggctttctttttatctttgccgctgctgctgcctgcttctactactactagctctcatctgtgtctgacacaagctctcgtgtttgtctctcctcggagaggccagcatgaactcctgcgcgcgtcgcaagcttttcgtgtccttcctggtctctcttttgcgcgtcaactaggcggctcccctcccttcgcttgtctcctagctcccccctatttactagcagcgctatcggatgacgagccagtgccagccatggggttcgcgcgtgttttggttgggtcatgtagttgcaccgtggggatatgcattgcatgaatgaatttatgacggggatatggactgtactactactaccttggttgtgttggggaggaggctgcggaggcgggcgaggtgcgcgttgatccgctcgcggcggcggcgctcggcctcgctgtggctcttggacgcggccagcgccttggcgtccatgatctcctgcgcggtcatccggccgaggtcgccgaacggcgacggagcgaagggcggcggcatcatcatgccggcgacgtgggagccgtggtgacccatgtagagcccgccgaggccgagcgggtcggacgacgacgacgcgccgccggagtggtcgtacgcgtactggagcgcccgccgcgcgtagaagtcggcgaagaacgggggtggcggcgggggctgagggggcaggggcggcagcagcgggaagaacgggctctgctggccgccgccgccgcctaggttgtggtggtggtggattgcaccgtggacaggctgcgccggcggtggccagcacatgatcggcggcggccccatggtggcgctcacgctcccgacgctactggtcgcctcgaacaccatgccggcagcatcttggcacactccaccaccgtctccccccacctcttgctccaccacgccgctcgtcgggccaccgcaagcctgctcgatcacctcctcctcctcctcgtcgacgagcaccccggcttcttgatggtggtggtggtggcggtggtctccatgagcacccatctatcaaatcgatctggaagaacgcaacacaaaccgagccgcggggatcgatcgatcgattgaacgctggacgggcagcgtagtacccggggcttgcgtgtgggagggagatggatgcttcggcagggtgtgtctagggctaccttttgtatagggtgtggcatgtggcagcatgatgcgcctttcggcctttttgtctttcgcttatgatctcgccgggcgctcgcaagaattatggcggcctcccccctgattatacatatacaccaaaaggcctcgccttttctcgcttcattcgcccccggccggcgggggtactacctctagacctggcactgaccggccctgacctgatggtagctactggtgttacttggctgccacgcctttcgatggctttgtgggggcaaaggctagtagggtaatataattactaggctggagtaatggagacaggaggggaaagggagtgtggaaatggagctggtcgatcaggcctggaagatggcaaaagggcgctagctgggaaagagagaccgagagtcgagggaaaaggcaaaagattttgcatggaaggagagagaggacgagagagtagaagagtcctacgtacagtgcagcggttagtagtgcttgtgtgtggatggacgcctgaatggctcggtcaaggcccatgttctgcagcaccccgcgctccgctttaccaatccacgcctccccgagagacacaatcattttgtcttggaatacactcctcgcctgtggctgtggtgtggtgcatgcagctagccagcgtacgcttaacatattggtttttaccagagcagctgcgtgggcgcaggattatgtattgagcgagaaaaacaaaacaggatccacgcaaacagcgggctaatggcagcactcatgccccatcgatcgacaacggcatggttatcgagttcaaatcttagcccatgattaagctagctatagaactagtagctccgtccaggcaaacgaaaacggaatgcgatccccggccacgtccccggcccggccggccggcgccaatcgccatgatgcccgccaggcccccgcccgcgacgacacgatcatgccgccgggctggcctgtgtcaattttagcgcgggacgaggcgcaaggggacaagtagcagcttcctacagtttcccacctcccctgataccgcatcgatccctctcgccttctccctcgtacaccgcgcaggcgctcgcttcgccggccgcgcttgcgtgctgcgtgttcggcaccgtgcagtgcccaacttggcgcaggcgggcgggcgtaatctcgtatctcgtaccgtacgctcgcgcgcgcgcgcgcgtcaggccgacgaccaggcacaggcgcgcgacgagtggcatgcgcgcagcccggctgggcgggcgctgcatgcatgagctcatggccatggaccatgttgtgtgcatgcgtcatgcaacgtgatccatcgcgatcgatcgagtggtggttcgagctagcgcgctcctcgctagctagcagttttgttcagagcttggctgggaaatgcacgcatgcatgggggagagagagagagagttggcccgagatggatcgaggcaaaacgacgggagagggctcatcatggcgtggatccgccgcattcactcctccctagctagctcgttgtctctcgcttctgtgttcttcgttggctagctactccagtataggactgaaaacggggcgggtatttcccgaccgcccgcccggccacattatttcgggtcaaattcgggtcgggaattcgggtacccggacccttacacggatacagggttcgaatacgggtaattttttgcggatatgagatcgggttcgggagagcggtatccgacggatacggattatccgggaaattatgcgggtattacccgataatctatccgtatattacccggatagatggacagcagcccaacaggcaagcgcccaacaggccaacacaacaggcaacagccagcccacatccaaaaggcccaccaaacaaagtgccaagcacaaaccctagccttcacttcacagttcagatcagtacagcattgagtctgaagctatcaagctatgaatgcctacttttgctactactttggtatagttttgctgataggcattacgatgccataagcccctaatatattcataatagacatataggaaatggctgaatggctattgtctatgtggtatatttggttgttgctttgacttgatatctgaataaatattcgtaaccgatatagttcgtatccgtcttggtacgtattcgttccgtatttatgcccaatattatccgtacttctattcgtatccgataatatccgtgcccgacccgattccgattataaaatatgggttaggatatgagaaggatgagatccgaccgaacccgacccgatttcacccctactccagtatatagagagtactggtactactgcgttactgtgctgtgcctgtatttatgtttctcgggtgtatcctcacggaaatgatccacctgtagggacggcccactgcgtagttccttttgccgcctctgggcttcctttgcggaaattggaagagcaatgtgcgtgaactgtgaaggctaaaatgaagttccagatctccggatcggtctccacagctcctttttgcaggttttattctctaaaaaaagttcgttttgcagagggtatatatatatatattccagttagtagggggctcaaaagtgaagaggatagtttcttgatagaatcagtggccagcctgaattaattttgagcggcctagtttggatagttctgcatacctttattttagatagagttcaagagagaagcttcgtcagttggattgggcgttctgaggtcaggagtatgaggtaactgcccctctgatccatgatgggctatatagccggtaagctgtatctcatcggcctagtatgtcttttttttatatataatggaatagagcatcccggcctttgctcaaagagctacagtcaattattacaatctcacactcaaaatgagtgaagttcaaagaaacttaaaagatgaaaccaaccatcaataagaaacaacctaaagactgccaacccaagataaagagtacataattattgaattctatttgtgaacctccatccaaaattgacaaaaagttacataaccgttgtctcaagaatacggcatgcagcctttaaaagctcactatcttcctcacacttttgtagttgtgcccaaaaccggagccaatgtgttgtcctgaaaactacttgcatatatgaaatagatggtgacttgtcaaaaatgacatcattcctactcaaccatagagcctaacatatagcagatgctcctatgagaacaagttttcttctttttttttccacccccagaagccaattatcaaaaatatgagatataccatgaggaaggtaaagaccaaaagaaaattgaactgctctccataaaaactttgcataatgacactctacaaaaagatgttgagtagtttcatttttcatacagaaacaacgtctcaagctaccattccaattcctccttgccaaattatctttagttaatacaacccctttaagcaagtaccacataaagatcttcatcttaagaggcatcctaagtttccaaataatcttgtttctctcaatataattattgtttattaaggctaaatacattgtccgaacagtaaattgatcattttgatgataattccatctaaaacgatcattcagttgactcaactgaatatgcacaatagaagcacacaagttatgccaatttgctaaattctgaccaaccaaagctctcctaaaaaaaacattcagcggaacagatctcataacattagcaattgaagaattcttccttcgaacaatggcatatagagacggatacttatctttaaaagccacgttacatatccatttatcttcccaaaatctagtttgttccccattattcacaatccaggaacccatattcaagaaagtatttttaactttcatgagacctgaccagaaatgagaatcccctggtttcctatcaacttgagttatagaatggttagagagatacttccttttcaataagtcctgccaaaccccttgctcatttattaacttgaacaaccatttactcaaaagatatttattttggatctccaaattatgaacacctaaacccccttggtctttgggttgacaaattatatcccatcttgttagtctatattttttcttatgatcatcaccttgccaaaagaaacgtgatctataataatcaattttttgaagaactccctttggaatctcaaaaaaaagatatcattattttccgttggaataaatacattatttttcctccctcatctctagcccttgatcgaatcgcattccttaaccgcaaatccggtgaaaattaactccttcgatggttttagagaagtggttttgctgacgtgctatgttaacttggtccaagtatgctgacatagcaactcaatcgtcaaatgaattaaaaatagaaatggattccacatataattaagtgacaaggataaaaacataaaaacaatggagcctacttgtcagccccacttctccttctcttcttcttcttcctctcgcagtcaaagcttgcacgcgcggcgatggcggctacggaggcaagcggtgtggctagggtgggagggagttgggataaggagtgtggatgggcgttagtgaacggtggcggtggtgacaatttctcctcccctccctctccctactctctctctctctatctctctctcccagcggacagaaagacatcgatggtgatgggggacggtgggttggcgagggccgcgttgtgcccacgacagagccccgccacatcgcccataaatctcagttgcgttgcccggatctaaggagcagtggagttgcaacagtcgattcctcctaacgacgcaacgacaaacacaatgactgcaacggagacatcgtaatccccgaagataggccaatgggaggggatccggtgacgaggagcgcacgaagtgggtgttgttgcctagtaggaggggatccggtggttgccactctattagtttcacaccctatggaggctggctcaataagaactagttgtggtaggaggtgcgcatccaagcattgaaaccgccacatcagcgtgcggcagcctggtagagctcattatcgctgggatgggagggggaacaagaggttggggatgggagtggagggggaggggaggagaggaccgcggatgaccatgtcatcgtcaaccgttgtcgcactcaccgatagtcgctcgagttcatccttcggccgtctctgccattgttgcccccttctcgtcgaccgctgccttcccatggatgagctggcgagcttgtcaaccgccactgtcggagagaaggaggaaaagagactgacatatgggtccattattttctaattttttttcactaacatgtgggtcccattaaatttttttatttttattttcgtggcacaggttccatttagttttttatttttattttagcgccacatcattgtcacataagacgaagaccaagtcagcatgccatatggatgccacgtaggacaaaaacactagccgaaccgccgagggactcgatttgcaccggttttcaaagatggaggatgcgttatatccagtattgcgatttgagagacatgattccattaagggcagaagttgacggattgagagacgtttctattgttttctgcacacacacttcccgaactactaaacagtgtgttctttcaaaaaaaaatctatatggaatagttgctttaaaaaatcatattaatctattttttaaatttaaaataattaatattttattaattatgtgttaatggcttacctcgttttgaatatcttcttagtcattttccccttcctctcaaacacagccttattcctttggaaaaagtccactttgactcccttaattatcggcggaatctaatttgtgaccctcaaccgcaaaaccggataagacgactccctgaactattgaaaccggttcaatttgactccctcagcggttttggagggcggttttgctgatgtggcgctgacgtgtcgatgttgacctagtattcgtctcacgtggcgcttacgtggcattcaaattaaaaaatatatgtgggacccatctgtcattcacacagaataaaatatattgtggaacccacatgtcatcctctcttatctaccttcttcaacctccccctctctttctctctctttttgttcgcgagcgtgggatgagggccagcggtgggagggtgggcgggcgaaggccgaagcagggtccagatcgtcggcggcagcggtggacgggggccggagcagcggtggccggcgcctcctccaaccccatcccggctagagttcacccagcccggagcggagtccccctcgccgcctctctttctctccccccgcgagtcgtcgacgtcctcgcccgtccctccccacggcgccgttgccgccccgcctcgtcgctccaggtgccatggagctcgccgcgctctgcaccgaccccgtcgtgctctccgccgccttcctctgcctcctcctccacctctccctccgctcctactgcccgccctcccccggcggtggccgcagcctcccccgggacccccgagcgtccccgtcctcggcgcgctgccgctcgtttgcccggccccgcacgccgacctggtgtctctagcgcacaagtacgggcccgtcatg

SEQ ID NO: 16162 - DNA, 16704 bp, Oryza sativa
cccacaatattattttttgtgtgaatgacatatgggtcccatatatatattttttaattcgaatgccacgtaagcgccacgtgagacaaagactaggtcaacatcgacacatcagcgccacatcagcaaaaccgccctccaaaaccactgagggagtcaaattgcaccggtttcaatagttcggggagtcgtcttatccggttttacgtttgagagtcacgaattaggttccaccgataattaagggtgttaaagtggactttttcctattcctttcccattggtgcccctagcccattggcaccgcgaaaaagttttggcccaattatcggttggccagatttgcatcgatctgtttgggctggcccatgtgtaaagggtaagatgagctaatatctttctgcgtttttgctgctggacaggccgcttccggcatcggcgatacggcggacttagcgagactttgccggccggcaaatttcgagctgagctctcgacgccaaaccggcggtatatgcggcattgcgggcggctgatgctattacggcagtacggcttactctaagtttagtcttgtatgcacgcgaaatatcgatagtagactttgtactacttcctccgtcttaaaatgtatctatttttaatgttggcacaggtattaaaaaaagtagatgagaatgattgtagaaagtatatgattgtttaaaaagagaaagtcggtgaagaagaatggttgtgattggttgacaggaagaggtaggtggagaaataacttaattttgagacaatgtactgtgctagaaatagctatattttagagcatctccaatggtctatctaaatcggactctccaaatgtctatttggtcaactcttcatctaatttggcaagtcaaactcgtggtttactccaactgcctctccatctactatctccattataaatctattataaatgggacccatatgtcagcctatactaccatttttccaccacattccccatacatccccttcttcctcccttctacctcggatgtagcgacggcggacagcggaggcgggcgcgcgaggtggcggcggacggcggcgactcgtgggcgcgggaggcgggccaggggacagcagcgagcggagacggcgccgagccagcgggctgtagcgcggagattcactcctcaccggcctccctcgctcctctctcaccgccacgccctccatccctcgccggcgcggctggagacgacgcggacggcggcggcggtcgcggctggggatgacgcggacggcggcggcggtcgcggctagctctggtgcctctctcctccgtgccgtcgccgtcgtacggttcgtaaccgtcgccgttcacgagcggcgccatcgctgccttcttgctctagccgggggagatggagagagatggggtggaaggtggagtggtggggcccacgaatagctaggcaaagagactctaagtttggctagtgaggggtgtgatttagccatccgaatgatttggctaaccacatagagaggctattggagagttttttttttcatacttgctaaattttaacttggcgagtcatttagcctttatattgaagttgatcttagaacggaggtagtagaatgcagtgttgagaccctgccgccctcgcgtttgacccagctcaacctgcagcggtgcagccgaacctggtctcacgtgaactccccgtctgacccgccggtagtagaaacttctcatcgtttagctctgtttttcttcttttaaaaaaaatatagatctggtttgaaaaatgctcaaacatttaggttatatttgaagcagattattaccaagattaactacttgattttacaggaatgaagtagattataacaaatcatctagacaatacagtttaagatttttttttttgagaaaacataattttggagttgtgaagtacataatcctggagctccaaataatctctcgtggagtagctggaaaatttattttttttcactacaagaaagaagagctgcattgtgtgacgtagccctacagtgatcctacatgtaccagccggccatcctaaagagtgatgagaagctagtcgtgtatactggcggtactgcgtagtgcgtacgtagggacattagtatactggaacatgataagtggccctgcagcctgcaggccacccggaccccggaactaagtactcccctataggagtacctagccaaacaataacagatgctttactacaggagatgatacagagtactccataaagctagcatactccctgtgtcctaaaataaatcaagctaagatataatatactccctacgttctataatataagggattttgatttttttcttatactgtttgaccactcatcttattaaaaaatttgtgcaaatataaaaaacaaaaagttatacttaaagtactttggataataaaataaatcacaaataaaataaataatacttcctccgtcccacaatatagagattttcagtttttgcttataacgttagaccactcgtcttattcaatttttttttgcagatataaaaaataaaaagttgtgcttaaagtactgtagataataaagtaagtcacaaataaaataattaataatttcaaaaaattttgaataagacgagtggttaaacgttgcaaggcaaaaactcaaaatcccttatattatgggacggagggagtaatttcaaatttttttaaataagatgaatgttcaaacaatataattaaaaagtcaaaatcccttatattatgggacggagggagtaacattatctattgatgttttatgtcaagtttgtttgttttgaaatggaaggagtagctgccatactttgcttgtattgttatcaagggaaaattggaaccatgccattataattttgtaaaatttaagatataccattctgacccacatgtgattgactcatgtgggttctatatgtcattgagataccgatcacatattttaaattttataaaattataatggcatggatcaatgcataggaagagagtggaagtacgaatcgaacaggacaacgtacgtcatcagttgttcagttatctcacctgtcaaaattaaatcaagtactgccctcgagggatatctgttggcaaatactacaatatatttttaattttgattgagacttggaacctggcaaatatggtattttagcgcgattaaatatcttcatgaggctgatttttggtggagatataaccgtacagggactggacaagttctgcttcgcccaaatatctgtacggagtaaccttatagagttactccgtggttactttcctattgttctaagtaatgcacgcggtacaatgttcatgagaaagggttctctattgatgcaaacgttgtgcttagaggatatggatagaagaagagggaaaaacaaaaataaaataaataaagaaaaaaataagtcgaagatagaagagcccaaattccaaatgatgtccactgtcccaaaataagtatatctaatataggatgcaacatattctagtactggtgatcatgttagcaacggcagcctaggagcccaggcttaaaaatctcttcggcaacgacggctctaggggtagcaacggcctaggatagcggcggcctgagtgctggcgcaaggttctcggcaaggaggtgaatgtgggtcccggtggcggcggtggtagccctagtggcagcggcggcctgggagttcgggaggcagaaaagaatcccgtcaatggcggcagccctatgggcggtagaggaatctggcgaagcgaaagtggatctcgtcagcttgtgtcttgtcgctagttctaactagacgacgatgaatgaaggtgggctaatcggcggcgcgtgacgttagctcacctgaagcggttgaaaatggcactaacggagattcacaacaacgacacactaggggcagtggcgactaggcgatttccactcatcgaatctggctgtttgagaaggtgatgtcacgaagcagggtctgaggtagtaggattttcgtttttatggttgtgtgttctctttctttgttgagatgtaagttaagtgcttttgtattttttttgctgtgtatatatcataaactttatggatattctagctggattaatgaaaattcatttctaaaaaagtagctttttaagttctagaatatgtcacatcatatactatgtgtaattattttgggtaaagggagaatgaattagctaacttttcgtacagtttgatccaacaccgttgccacaaagcctccttgctactcgaagaggattcggatcctagttgtacttgccacggtgccgcctaacaggcagccgtacctgcctgcgactcgatctgatttgtccacgttgcgtcagatccccgtctcgctcgcctcgctacttttatactcccctctcagctttcccagcaaatgcaacgctcgtactcctcgcatcaacagcctccctcctccgctctcaaaaaaaaaaaaaaacagcctccctcctccctcccgaaggccaaagctaccctccatcagctacaacaagcgacaggcggcgatcgcctgcggtcgtgcgcgcgtggcgtacgtgcggccaccgagtagcggcatctgagatggtcctgcgccggagacagagaccggcggcggcggctgcaggtgggctgctcgggccgtggctcctcgtcgccgtgcttgtatactcctcgttcctcggctccaccgtcttcttggcagtcgacgccgcccgcacgtcggcgttcgtggccgtggcgccgctaccgatggccccttcgccatcgccgaccgcggccgagcttgtcggtgacagcaagcggaaggtgcccaccggtgcaaatccgctgcacaacagatgacaatcatcgagcgagcagcagctgggaaggtgagcgacgcagcgttcggtagcatgtgagaagcgaggaacaagcgagttaagctgtcagggaagccatgcatatgaagaagctagctagctactgctgctccttggtgagaccgtaagagagcagagagcagccaagcggaaaggggtggcggtggagagatcggcaatggcgcggccgccgccaccgtaagcttctgattctgcttcttttcttctccacactttttttttgtttctctttgatctgtcgaagctgtgatccgagaggagaaatgaagctgaatgagaagggtactgtggagtgccacatgctttacgtagctagccacagctagatatactatgctcttcttgtttttagcatgtcatggttgcgaattgatcaatgcttcaagtaaaaacgttcatgtactcattggtttcttcttttctagcaataaaaatgcacatatatgtctattctgtgcattcttctatacatgtaactttaggatcgattacattggaaacttcttcaaattagacgattttttagatagtcccttaaagagcctatatatgctatctctattcaactcgctcttaaatatacacaggaataccaatttgttgacaaaacaggctggtcaatgtaaacaccttcgcctgccacttacatataggcttacactagctgacttctccaatctctagcagcagaagtgctgtgtcaatggaggggctagctatttttgtccgcaaccttattttggtgctagatttttaccaacgtagtgtaagatattgttagctgacagatattgcacatgttcctgcaatacatgtctgtcagtgtgtcatttgcgcgctcgctgggcatccttcgcgaagatgagaaaagacgcattgtacgtgtatgcctgcacgcgaagccgttaattgtattactccatccgtttcgaaatgtttgacaccgttgactttttagcacatgtttgaccgttcgtcttattcaaaaacttttgtgagatatgtaaaattatatgcctacataaaaatatatttaacaatgaatcaaatgatagaaaaagaattaataattacttaaattaaaatttttgagtaagacgaatggtcaaacatatgataaaaagtcaatggcgtcaaacatttcgaaacggagagattacgtacgtataccagtgtggcagttattagtggccaccgtcctgcaggaacagtccaaagtgagtcctatggtctgatacagtagctctagcttcgtcgacgtccgttgcgaccgtggaatttgacttgatcattttaatcagagatcgttcagacacccaaggccaactgcagattaaaaaaacgcatcagtctttacgcatacagttccaaactccagtgctgttctcaaggccggaaacggcgaccaatacccacatggctaggaattcagtagtaccaactgcagtacacaaacaacaatagttttaatttccatagctgtttccagattaagatcacacgttatatactactccgtatatacactcaactcgcggtttgatatctaatttaaatactctctctatatattatactactgtaaattgatccttgtttggagtgcatctattccgttgttcaaacggaaccatctttctgggattcaacgttcatagggaagcatcttgtggccttttcctcttggcagcgcactcgatcgtgcgggtctttgtatgcagctagcgagcctagagcgtgtgcgcttgggcaacttaacgcacaagacgccggagaaggtgcgctcatgtcgcttcagctagatccatatctcccctttctcccatctacacctgcactaaccacgacgcatgcgctgcgcgccctatctttcaccgatcgatggatccgggtgcatgcaagctctaagtcatgatctacgagagcttaatcttagtagtactagtttaatccaaggtcaaaatggactggtgagcataggagtgcgcacacttttgtatttcaccgcgtctgcactctgcagcactgcatatatagtcctgcacagttcaagatggaggtaaaaaccttgacaagatggttaggaagagtagtaaaccttaaccacgatgtgatagctatctcggttccagatttgtactaaacatgaactaattagccctttgctgaagatgctttgcaagatttgactgtcgtggaatcccaagacagggtaagataatggttaggaatagactaacaaaatttgaagtattgcctcaggtaccattctaaaaaaaaagtattgcctcaggttaacgcaatgtttttgtactccagtcatcaggtagcttatgtgcaaaggaagaacattacaacatacatactccatggtttactccggtcaagcacacgtaaatcttcaatccatgccagctgcgtcgaggttaaccctgcccatggaagcgcgaggtggaaataaatgtcatagaagtgcggtatctttctcaccttaattaagccagagccgggcttgaaaacccattttggtcacgcagctcaagagattccaagccagcgtccatgcaaatgcatgacggatgcatagcccgcgcgcgctggggctggagcgaggggagcccagcgccgaccagtggctgggtcgccacggtttcccgggcttttgtttatcgcttcgaaggcgttgaatgtttgctgccgccattaatgaggtcacgtgaggtggaaccgtggccaccccggccgcattggctgccctgatcgatccatcggtcagctgagaccgcgtaaggtcagctgcgctgatggattgatctctcgctgttggatctgtagtccctgcttgctctggcctcggtgttcttctcgagagatcattttcttttggcaaaattggatctatagcatcgaaagtttctgttttaggttttgtaacaccgaaagttcaccgcttactttattagcatccaaaatctctctctgttcccataccaagcaattccgtccatctcatcccgtttcccgttttctttgactggattgaccaatctcaccacgaacagaactggaacgaactcttccgtgcttggtggcagcgacggccttgccgcatttgtccatccttggatgtcatcatcgtccccattaccggtggcaacacggactcagcccaacagtccgtgcatgtttaattgcttgatgcgctgctcgccgtcaattaactgaaaaagcttttcacttgcatcaatttactactaaaagagctgtccactgaaattgattggagatcgatgtgatggtcaaggttgttaccgcaggacgggctgccagcgatggacaagcaaggtggagtgggagctgctgcatagccactgatgatggatgtgcaacgttggtggtagtctggtagaagtctgacggcgaggtggggaagcagctgagcaggagcggacgaacaaaaagctgccgctggtgatgtacggcggcgccggtgatggtacgtagaagatgggtcacgcagctaaggtcgcaggagaagatacagcaaggggaaggccactgccggtgggagctagacgaacctgaacttgatctgtgctcccagtgggatgcccagtatggttggcgagttgacatggctaccggagtcaatccagtcaaagaaaacagaaaataggatgaaatggacggaattgcttggtatgggaacggagagagattttggatgctaataaagtaaacagtgaactttcggtgttacaaaaccaaaaacggaaacttttgatgctataaatacaattttgccttttctttttcatcatacggcctatagagcacagtgccacagactggccaatggccacgagcacgacgacgaagattaacgggcccatggccgaggacggaggcccatcaggcctagcctataacgtttcagcccaacatgtaaaaggccggcacgtccgtggttccgcccatgcgtgatgggcccacatgaccgtggtcatgggtatccagttccggttctgggctaagtcactggttcgtcttaaggctcgggtggcccacggcccaccaggccgggcactcttcctccccgacacggcaccaccgcaccacgggacgcggcggcgtagagattccccgccgcgccggatcccgaacccgttcaccgcccagcgatggcctcgcacctccgctccccgctggtgcttctgctgctgctcgccctccaccggctgtgtgccccgtggctggtggtcgccgacgacggcgcctcggtggcgaggtcggccttctccatggacggcgacgtggcgtgggtggtgcaggtaagcgacctccacatcagcgcctaccaccccgaccgcgccgacgacctcgcgagcatcctcggccccgccctgcgcgccatccgcccccacctgctcctcgtcaccggcgacatcacaggtgagcggcgagcccccttctcatgtatcgtcaaatttgattaaaaaaaagtcacgaattgttccttcatgcatccattttgtacagttgtttggtaaggagcatggcaactgccgagaaatagaccgtatctactctggttttgacatattgcaagtgatcggtgttgagtggtattgttatatgtgggaaatagcagtatataaactcgattagctatgctgtgaacgtagaatcaacttccgtataagctgtgaactcgattagctatgtgggaaattatgctcacagcatgagctttttgttacagttgtgctgttaaatgcgcatgtacttctgaactaatcccatctagtacatgatggcactgactacgaaggaatatcatgttctgttaatgagaatctgcagaaaattctgattcatttccatgtagcgtaggcaggttgaatttgtatttgtggttgccaagtattgcctaaaaagatcaaatgatacagtaactcagagtccatggctccatgccatgaaacttgagaatagcttcattagttaatgcaaggtaaagcatacaacttacaaactaccataaggttagtagatcatttttctaataaactcagctagcgtaacatccataaacatattctggaaatatcctggagttattggcctaacattcatttcaactatttgcatgaagaatatgactctgaatttgttgtataaaccattaaattctccaatatcgtatctaatggcgacatacatgaaagctgctttgttacaacaaatggagataaatcccaaatcacttgaaaacattactaactgtattttttatatttggaaaatatttatttgtatgtggaaggtcaaatattggaaagttgatttggtagtaaatttggataacttcaattttcgtcccttgctataatgcatttccttttttcaccttgagtgtacatgttaatttgttagacagaaagcccttgctagaataataaggaaatgaaacaagcacatatatggttgatgcaattgaatgtatatgttgttcttgtagttttatatattcctatgactgtataataatttccagttttttcgtgggatgttaacaagatgcaaagaataggagaaaaactacgtcaagacaagatgagagggaatggattacatacaaaaaagctattgatgcaattgttggaataggtggtattgataagagcaggatatttgatattagaggtaatcatgatacatatggagttccctataggggaggaaaattggatttcttctcaacttacagtgtgaactcacagcttgaccgattaagcaccatcagtagcattttgcttcaggtactccttatcttcttgtctgatctccttgttaggcacaattaattttgttcatagtcgtttatcatgacttattattcgtcatgcgcataatccagtgtacagttatctttcaattaatccagttctatattctgcttctttgaagatgtaaagcatactataacatatttgctgtcagagcttcagttgaacattgacctgcactttataccgctgattactgtgcacagaattaatgctcctctgccttgattattgaacgtcctctttggttagctggtagaacaatatctattggtccataataaatattactctcgtgtgatactgggcatgtagtactacaaatacatcatgcttcaatatcatactgatgatacttgaagcagaaatgtacgataagcttgaacatagcactaaaccatcttactcaatggagaacagctcttgctaactagacttgaccatcaattataatttactaataattgcatttatatgtaacaataatgatgtagtgtgctatactgatgtcaatgcaccttcagactcgcttaatgtacactcaatagcaggacagatgaaggtggctatacattcagcacttaaaccataactggcctgtgtcaacctacaatggtagttaaatttactaaactataactctatttatctttggcagctattacgaatcaaattatgtcttatctgtgccttataatttccgtaacccactttgtctctagcacttatatagatttctaatggtgtcataacagtactagaggagatttttttttttatgttgggctatctgtgcataacacattgtctatgttggattatctgtgcataatacattgtcaaaattcttgtaccatttatatgccacgcatctctgctaattctgcttacaatgctgggcctgaattttatcctaaaaggtactgtagggacgcaggaattatctcttccttggcatagatgatacaatgagtattggcattcgatatccagctaatttatttggccatcctactgataagaggatagacgctgttaattcagaacttcaatactggtccaatcattccaatgttccaataacaaaagtagtttttggacattaccctatgtcattcactacttcatctcaaaaaggacaacgttatgaaagtatatttgcaaagcagtcaatttcagcatacctatgtggccatctgcacgcgaaaattagtaagcagctttggcggtttcatgaaatgagtgcaacaacacaagagcagaaatcaagctattgggaatgggaacttggagactggaaagagtcaagactgatgaggattttagcaattgatggaggtgcaatctctttcatagaccacacactaaaacaggcatttcaaacttccatcttgatcacatacccaacagattcaagaagtatgaatacattggaatcaatgaattggtcaacgagaaatgatataaatgttcttgttttctctaatcaggtgatccgcaatgtgagtgcaagagtttttgactctcataatgagtttaagatagttgaagaaataccactgcagcttgttgccacaccatctgttcacaaacctttgttccatgcggaatggaatgctgaaaactacaaaagtccatcccctactcgctactggctgcaagtttttgctcaggattctcagggtgggaagacatcaagcgagcgacgaccattttcagttgagggtaaagtgcaaattcaatcacgtccatgtctgaactacttgatttttgaagtccaatgggaagacatgtatcaagttcttctgtggagtaattttgccttcataattgtactattgtttgctcccaaattgctgtatcattttatgaagaaaagtttgacataccaaagatggaccgtgtcagttatgctatcccctatccagccgaggaaagcttacttttggttggtctggtttctaatggagggtgcaaggagtagacccatctggttttctttgctcatatatgttatttggcttattgaaatgccatggttttggggtcatgcgacatctgagaaaggagaaattgctcaaatgtacttatccggatggagcatcccatctcttggtgaagacttgacctggaacaaatcgagcaacccagatgtgctggttattacactgcctttcctatacctggtggttgtcccagttgtagttgtaatatatagtttgtttgcagagaaggctgttgcttgtttgcggcacagcagaagaacagaaaacacggtcaacccaacaaattcaaaccctgagtcaggatatctactgccaagtgcttcagtgtctttagcgaacctctcagacaagaaaattctctcaatggtaatgaaattctgtggcggctggacaaggagggtgctcctattgttgtgctgtatcattgcggtgatacatttgaaggtgcgtacctatctaaaacaccatctgcagactgtaccatcaatttcatgtcttaaatgttgaattgcatatcttgcagctttcctcaaggctaatgtcagcttatggagccaaaccagtagccttttctcctccagtaacgtggatgccgttgttattattaagtgctactgcctattgtacaatgcccaacacatattagtgctgtcagctatttttgaagcacgagtatattagataagggcgtgaaaggtactgtccttttgttgtacttgaacgtggtgtgaatcgtttatcaccaacaaaaagctttgtacaattactcgatgtttcagttaataaagtgtcaatttcatttcatggacggcaattcacgtaaaattctatattttgtaaaatttatttattctaagagtacatttttaaaattctatattttgtaatattggattgtaaatttgtaatgctttcagatttactaacttgcgttcaacatccgggcaaaaataaacaaggaaatatataggtgttttcctcactagacccagcaaatatacttgggctttatccatactaaagatacttatagaaaattacaatgcatacgataaattagtacgatttttgcatacatatatgtatcagcgctgatacatatatgtttcagttaaacaaaacaggacaattagtgatgcatatgcccaccgcaacattacgaatcaaaagttaaccataacagcagacggcaatcaacttaggttcacagctagcgacacgccacaacagcacatggcaacaccataaatccaaagttttgacctaaggcaacagcctaaacttcacctgcggcgctgatcctgtccatgatgttcgcgacaacctccttggactgccgcagcaggacgatgctcttcttcaggcgctcgcgcttggcgccggtgctcggcgacggcgccagcatcctctccacgccggccatcttgttgcccaggagctcatccgcgagctccgcctcaaggtcgtgctccacgaggcgcttgacgacccgaagcacgtgcagcgccagcccgtcgacgaggcggagcacgatgctcctccagtacgcggtgagccgcgccctcaggtcgaacgcctgcccggccaagccggcgtgcgccctcaggtgcgaaacgtccacctccccaaagccctccagggtgatcctcgcgggcttggagccgtcctccacggcctccatgaaactatcgtggccctccatgatctccgtccacgtcctcatgtaatccgggttcgccgtgtagtcggagacgagctccatctcgatcagctccttgacgtgctgcgccgaccgcgcccgcgccttgtccatcagtgtctgcacggcgcggcggcacgacggctgcacctgggggaagttctcggagtgcttgagaaggatgttcatcaccacatcctccacgtaaccccacacctcgttcacgagctcgtgcggcacgtgcatgacggtctccaccttcttcttgagcaagacgaggaacgcggacctcgggaggaagttggggaggttgatccccttggtctcctccaggacgcgcacctcctccatcaggaacatggcgtcgtcgtcgctgctcttcgggcactccgcgggaagcctcctcttgtagccgtccatcttctcggcgatgcgtgcggtgccgtggaaatggcggtcgtcggggaactcgtcgaactcgcctcggacgagcaccttctcgagcgaggcgcacacctgcttgacgatgtgaaagaacgccctcaccgcgtcggcgacgttgttgaggtccggcggcatctggtccagctcgctgctgtggcgactgaggcggtcgttgatctgcttgacgatgtccgggaggcatttggcgatgatggtcgcctgaatctgcatcagcctctgcgcgagcaccgggatgccgaccatggacttgtcgatcttggagaggaggggatgatacttgaacagccgctcctcctcgatgcgcgcctggtcgtacgtctcctcgccaatgcggttgcggacgcagacgtagccgaggccgatgttgacgtcgtccatggtcaccttctcgagcaggccctcaggggccttgtccgccttggtgacgacggcgagcgtgcgctccccggtgcggtcaacctgctgcgacatgcggatggactcgcacgtcgggaagtcgacggtggcggagagcacgttgaggatgatgctctccttcggcgcgatatactccttgatgatcttggcgatctggtcgtagatgtcgtcgggctggccctggacggggacgcgcgtgatgccggggaggtcgacgagtgtgaggtcggggacgccgcgcttccgcacgacgagggtgatgggcgcgtcggagatgcccttgccgctcccggcgatctcggccgtggcggcgttgatggcgtccgcgaccttggcctccgaggtggtcaccacgcggccgttgctgtactccagctgcagcttgggcgagtcggcggaggggtcgtcctggagccgcatgacgagcggcacgcgggtgcagatgccctggcctcgcgggaggctgatgccggcgagcgactcgagcacgctcgacttgccgctggactggtcgcccaccacgacgatggtcggcagctggatcccctcctgcgtcaccttgaggtggcgcagccggtcgacggcgtcgaggagagggcggatctggtcgttgtaggactccgcgatggcgctgctggtgacgacgtcactggctgcgaccaaggccttggagtcgccaaccaaatccttcgcgctcttggtcgccatgatcggaagcagcttcttggacatgggtgcagcagctagtgtgggtggcgtcagggcgattggaagaagcaggggaaggagatcgctgtggttgtgagttgtgccacgccggtgaggagggttttaatggcggggatgggtgggagaatgattgcccgggaggtggagcgccgcgcactggaatcccttctcggaagacgaggggggtttgcgcgcgccgggaatcggagcggcggccgcggtgaagcgaaagttcagtacacgagccgacgagcgcgtcttttcgcttttcgagctttgtcttgttctcctggagaaaggtgggctgctttttagacaccgattgggctactctactaccggcccgtggattggcccattactgaaaggctcactttggcaggaccagttctcattcagcccgatctaactttcagcccataaacaatcgtgaagtactccggaggggcccgcgtgaaaaataggtcaagacgcagcccgcacctcgattggatggtgcgcggcgacccgatccctggatcgcctgtacggccagttcatctcgccggccgacgatgcccggag

SEQ ID NO: 16163 - DNA, 12376 bp, Oryza sativa
ggggggggggggtcaagtacgccggcgacgaggggcgaggggaacaatggtgggcgagatcgagtagtatcagaggccttcgcgccgcgtggtaccccaacgtcgacgccgcgaggttcgccggcatggacgcatggtgagtttcaacaactatactctttcagtctttatttctatattttcgggggccaacaattatacgcgtactgtattgcaactgcgactacaccattgttagtctagtaggtctagcatagaaaatgcaacgagtatactttgcattctctccacagtccacaactccagattattgagtccattatgatcagtggggcctaaccttccaggcttccacgagctgaagagtgaagacagctcaaagccagacttcaaagtgagcataattgggcaagccagagtgcccagttaatcatgctatcataaagatgtgccagtagtactatactaagtaatctgtacatctatggcttcttaagttttagggaagaaaaaggaaggcttcttaaactggatgggagcagaggatttaatagtgtacagcagaagcacaaggaccagagaatcgtggcaaatgcaatagcaattcatcatttccgaaaggattgctttcttcatcaaatctggctataaaaaaagaacaaaccgcacgtaccaaccatacaagctacaacctcatacagaacaggacaaactcatgcacattcctacctctgcacaaacaattctgaaaattgaagaaaaaaaaagaagagaataaataatagatcctccacatctccactcagactaactttaccttttctttttttcccctaagttgtgcatacatccgaagctggcaccaatgattcaacattgtgcagctttggaaggactaatgatttctacaactaccacatcataaagccggcaatgctggaccagaaacaaaaggaagaggctttgcttccgtgccaccggcaaaatgagcaaaacctcccatgaaatcagccattatctttcaaaggtaccatcaccaaccaagtacttcagatcattccgatcgactcaccaaagccgatccactaaatcaatagcaagctacggtaatctgcaaagcataattgattttggacgttattgatggtaaacagctatctgaaaacagttaaggaggatatggactgtttcagtaacacagaattcagtactgtccaaaagtataaatacgagtgctagcttttactgtagaaattattgtctgcatattggatgctcttgatgttaatctataccaaaattatgttattttctcctgaaaatatagttcacactagtacaatcaaagatgcttcctaatgtataccttctgaaaagtatcacccacccattgcagtgtagtaaagaaaaaaaaaagaaatttccaggagtaggaaattaccacatgttatatataagaggcatgtgctatgctgaatttgcagcaagggcatcaccagcatgcttaacatgaagttccacgctccggagttcgcgaagatgctgcaagatctcttgaagaaggtccatgcccctgtcacctttcttcagggacttgatgcagtgcctgaggaactccttgtctgcctctagtgcttgcagtctctcgtatacatgatcaacctcctctattattgccagcctctcctgttcttttacaagcacagaaaccggttttgtcgaattatcaacttgcacatccccaacccttgcagatggtgtctgatcactgctctcatctccagctgcatcgaatagaggaagaagactctttcccctgcaaatagaatttcgaccttcaaactttgccttgtcactggtgatatcaccatttcccggagaatggagaccgtcagccgacagttcatattcatctgaagatcggcccacagcagcactggtgtcgttgatgtcatcatcttccaatgtgaagagcctctcctccaatgtcttgagctcttccaagatagatagcctttccatctcaaagtacgtcaaggagtcatcaagagccaccagatgtttcttgttttcttgatctgtcctggggctaaaagcagcatgagacgggctctgaagattgctgccatccggggactcacctagttcgcagtattcatcggagtgcccgtcactgtcctcaccactggatgacacagaagtgccattaccattggggctatgcccgttagccttgaagcttgccattctcctcctctccttgtcctcgtagtgtagcaccttctgcctgcacatatccagctccctctccagttcctgcttctccctctccctcttggtgaccaactcgttcagcaactgcagcgcctcctggtcgtactccgactgctcctccatcatccgttggtattgcagagcctccatctgcattgctgccttctcttcctgcaacctgttgatcattgccatagtctggttggtcgcgatggcagcggcgctcctctcttcctcaagctcggagtacaatgcgctgagtgcctttcgctccgcttgcagcgccgatttcagctgatcaacggtggaaggctcggacaactccatctcgcttgccacactcccgtccaaagataaggatagtgaccgtttcctctcaagcaaaactttttgtctgagatttgtgtggcaacgctgtaggtcggtgtctcaggtgccttgtcgtcttcaacctcgttctgttcgtttggtggctggtctaatctctggctcgccgtcgcctcctcctcctgttcggtttcacttgcttctaatccaaacataagaagttaacattaagttcataatcattttgaaagcatcttgatgggggacaagttaattactagtcaaatgcacaatccgataattgtactaccttgcgcagttgggtctgtttcatggagactttccaatggcagtggctgctcatctgggtacgccaatggatcagttggctcctcaaactctgctgattcatgaaacggcacgacatggtcatcttgctcccgttcgcatatctcacttccgattgatacctcacagttagtgtccacctctgctgatctgttgtcatcttcaggaactgcttcagtgactgaaaggaaaacgatgagactggcataccagatgacaagactggacaattgattgtcatcttcagaaacttcttcaatgactgaaataaaaacgatgagagaggcataccaaatgacaaaattggacaatcgagagaagccaatgatgatcttaccttcgggcacaacaatttcttcttcttcagctgtctcaacttcttcttcttcaactgtttcttcttcagcagtggcatctccaatttgagcaacatcttcaataaccaattcatcatcgtgggggatgatattctcatgaggatcaggtgggcttgtgacaggctctgcacaaggaacgggcacaacaaagtcgtcctcaatcgcgacatccgccgttgcagccgaagaatccaacatcctcttctcctcaagaacaactccgatatcaagatctctcaactcgtgctcgccgtcgatatggtccatttctttctccttttcacagcacgcctgatgcaaacctgactcgtcggcgattgtcatctcatcgatggctgccaccgacagcaagcgctcgccgtcgagctcgatctcttctccgacagccatgacttccaaggactcgtcctggacagcggccatcttctcctcttgctcgtctttatcgtacacctcttcttgccgctcttcctcctgaaattctccatgctcttcttcgttttcctcgtcgtgctcctcttgagccaaaataacatatccttggtcttcttcttcgccgtgctcttcttgagccaatggaacatacccttggtttctgtcttcttcggttgtcttctcctccgattggccttgtcctttatccggcagctcgcgcgaggaggttttcacaacggcgtagcagcaagagcacaccgtggcgctctcctcccctgcatcttttatgctctcctccttggaagaagacaggcaggcctcgcacatgtcgccggcgtcggcgagccgaccgtggtgcaggcagtacccgagcccggagatctccgccgcgtgggcgccgcagaggacgctccgcagccaccgcgcgccatcctcctcctccgtcgccttctcgaagaggcggtcgacgcgggagcagaggaggcacggcggcctgagcccgaagtaggcggcgaaccgggcgatggcgtaggagaagagcccgttgatcagcagcagcgcgatgagcgtccactccaggacggcgtacgccagcgccgacgtgaccctccgcgtcctcctgtggaacagcgccgccgcgaacctgctcgccgccgccgccgccgccgccatcgcgccctccgatccttacaagttagtacagccacagcatgagaaaaaaaattccgatcttcgcctcggccttgacgactgcttggaatctagctgccgccacgccaagccgagcgagaccgaatgaattcttgcgggttgaaacttgcaaaggcagcagatggaatgatttgggaggggtggaggcttggctggatgagttgttttgaagcttctagctttcaccttttgagggagaaagttcgggccattggaccccatgagagagctagctcgctctcatttttctccatttttttttcgcgtttgaatggagggaagggacggatgacgagggttaggaattcgtcccgtttgatgcggccgccggccaatgggtacgtacgaaccttggagcctggtaaaatggaaatgctgcaccggccatgacgacgagtcgacgagacgggcatgaattggcaaattgcgtggtggtgagcacgacttgggcaaggatggccgtgcaaaatctggggtgattgtctccagtaaccattggattctctttttttatggcgattcagtgtccctgtcaacaggtagacacatcttttaatttgtcatcggttggaaaaaatggtacggaatgaaaggaagaactggccttaatcatacatctcggcaccagcaatagaatccgatgcatgcatgctcttaatcgtacatgtacactggcaggaacaccggtcttgtattgccatcgacgtggtttgtagtttgtttgccgtaggtatatataagagtatcggtttgtcgctggagattttcatgtttgttaataaaacgctgctgcagagggtttagtttatctcatgaacctacagcgctgccttactgggaaaaaaatgcattcgcagattcgttgcatctgttgttgtaatgatagtctaaatatctctcaaataatcatggaaggctggccccttcaagaaaccagctaggttccatgaatgccttcttcatgacaggcatagccgtgaacaccaggggatccgcagcctctgttagtttcaggctttcaatggccggctcgctcgtgctggactattcgtactgatcttggttagttgcatcgacgttaggctaagagcatgtacaatagcatgctataagcccgctacaaatatattttaagaagataaatagggagagagaagagcagcgggctacagatttgtagccagctgtagcacgaactctaaggcacactgtgtgtatgataagtgagaccagatattaatagtgtagtatgtaactattgtgtaaatgagctattaggttagttatagatgaattggagctagtagttggctatactattaaacttgctctaagggcatccacaatgtaaccataagagtgagccttaagactttttttcagccatatacattgtggacatggacataaggcattaaatgcttaaaaacagctctaagcttatagttgaacttaagagattaaaaaatgatatctaatggagcctatcagcatatgattgtgaattggtggtatatttcttctttgatgggacccagtgggatccagcttgtttctcatccaaggctataaccattgtagagatagatatagctaaagctatctgcacatgggcccacccctatcgctcattcagcaacccaacattgagcctgccctaagatcagccagcaggacatacgtacgtgcaccgatgcactggtgcgctcacgcactggaaaagcaggccgagtttattacgcagaaatcaccacgtttcgcagcaaactgtacacgagaggcttctttcgagtgtagcatggggagaaaagctaacgttcggaaggactcggctagcgcccacgataaagccagcccaggacacggcgggggacatggagatgttgcgcgaacagcagcgggaatgatacgccccgtggcattattggcggcgagttggccacgggagcgcgcccgcgcgggcgatggcgctgatgaggagcggagcggagttggtggggagttgattgcgcgccgcggcgcccccacccgccaccgacccgacccagctttcggccgccggccggccgtctggatagtgggctacctttgcctttgatccccaaagcgtcctcctttttttttcccctctcgcaacggccagcacgtctccttcgcagcggcacccatcgtttccctggtttttcttgcaagatttgacgaccgtccgtgtgttcgcgtacaatagttgtgttacttgtgtcaatgtgtgggcactgggcagattaatagtacatgccggttcagtgtttgcgttgcgtgaaaggtgcaaaattgatggattctccgaaagcggcagttaaagttgaaggtagagaagaccgtgatgctttgctcaggtaaaaactggaagctggggcttaaagaacgtagcccggaatgcttctagacacctaggaaaatacagcctgttcttctcctaatcagagcttcgggcacgaaccaactaacgttccgctggcaaagctcgagatagcaaccacagtttagtatttcttttagactcaattttagtattggaagaataacaaaataagcgacatatatgaaatggagcagtgctataggatatacgtgctaaaaaaatattacagaattcttacaaataaaaatcttttttgcatgtgtaccattttccttttgcatgtgatcctgatcctaacaatctgcttattgaccgagacataaaaaccaatctcaaagatccctaaaagacttattcatgatgtgagaaggttaaacaaaagataggagatttataattaacggtgcagaaatgaagagaacaaataaaaggtgcttttctgttaacaagaatattattttccctgtttctcccaacagttttgaagttgacaatttagagggtgttacaaactcctctcccaaaattcacatattccattgttaccccgactaaagccaagttcccgagtttacaccattgtttttgagatgataggtgccactccaaatctttacctacttataaaaaattcatagtgttctgctgttccacctaacatacatgtttatcttttattctctttaaaaaaatagatttctcccaatcacttatggcgcccccctccccctttccccttctccaccgatctctctctccctcccatttttttcctggcaccccctcccctcatgatctctgtttgttcctttttttcttggttttttcctccccgacctctcacctctctctccctcgtgtttttttctcttttcttttgttggtttttttcttctcaaggaaaccggccaactagaaaaaaataaaaccttttcttctcaaggaaacttgccaactagaaaaaaaatgaaaacacaatatcatcgatttggagtaaaatctgttggcccgagaccgagtgaaatcatgtgactgtttgcaccagcacgttatagctcgtgtgttttgcatgcccaggagacgtggctccctatgattcagtttgcatgacaagttgagttagcggtgatctcaggttatttgccattctctgtgttgtatggcaaactgtgataagattttatttgcatggtaattggaatcaccggtgccgattggaaatgtcacatgcaaatgcaaatgatactaacaagaagttatgctgctgacccattctaataggatatgtgtgcgttttgtttaaaaaatagcttatgttgaaggtgagaacaaaaatattttttaaaaaacaagttatctagcagttcttcgtgaagaatattttctatagaagagttcagatcatatgaaaataagaccttgatcatctgtatgtgtatgcaattttagttttttcccgttgcaacacacgggcttttttccagtagactgaaattgaagatgatagatggcattccaaatagaaattcgatttgttgcatttggcacagtcctagaataaaagtaccaataatcataaaagaaaaataaggtaagcaaagtcacagcttgtttcctagccacttgcacacatactatcgtataggaacaggttgagaaaagaaaaggttagctatcatggtcattcttaaaaggctgggcaaccaaatgaccacacgctcaaattttgaaacatatatacaatgaacttggctagactttgtgaggcttcagcaatagtaacctttcaaccataagatattatatgaggggtacacacactgttaagagcaggtacaattgcagactataagccagctataaacatatttcgagaagataaaacaggagagagagaagcaacgagctatagatttgtagccagctgcaatacaaactccaagatgcatgtgtgtatgacaggtgggaccatgtattatatgtttatatgtaactattatatgaatcggctattaaattgactatagatgatctaaagtcgtagttagctatactattaaacttgctctaagctacagtggtggagccccaggttgaaatgatttttttttgagaaacgtgcttgtgagccttgattttttaagcgtaagagcatcaccaacaacatcctaaaattttattcccaaacctttttattatgggaatcttacacagaatttaaggtgttaaaattttcctctctccaaaagattgggtaaattggtttcctaaaaacaaaaaaggtgggccacgataaaaatccccagtggaaaaatctgttttacgctccttcctcccgcgagatcgtgtaacgctccgcttttcgtgagtcgttaaaaactatttcggcaaaatcctaattgcgaaaattttcgttctttgtgtgtgagtctaagttgtgccaaggatctcaattcaaatcccgttgttccctcttatcgccatcaaaatcgtccacctcaagattccaattccgactcaagtctccgaaattcaatcacatcccttgaatccccgccaaatacctatccccatttccgaaaatatcaaatccccatctcgaatcatttccttgagtctcccttgattcatccctaaaccctcgagttcgaatatcaaatttgaattcgaatccaaaccctaaatctctccaattctctccaaatcagtcttctctgcaaaagtctattttacctccctctggctcggtgggccgactcttccccggcccatctcctctcagcccgcttctcctcctccccgtacgtgcgctgcatgcgccgagagagagaggcatcgcctctcttcttcctctctctttcctcgctctctctctgcttcctttctccctctcctcggcgccgatctcccgccgtcgccgttcgaaatccggccgcacccccgcgtcgcgtgcgctcgctcgcgaggtggccgaccggccggtcgctgccgctgtcagccctgccacgcctgcgccgcgcagccgcccggccccgctccatgccaaaccgaccgccgccgtcatcgtcaacgtcatccatggcccccgccactccacaccgcacccgtccaagagtgggagaagcagctgctctccctctcctcctcctcctcctcctcactctccctcctccttttctcgttttggcaagggaccaagcccctttcccccttctttttccttttgcccgacaccgccggcgtcatcacctgccgccgccttggctacacgcgtcgacgaccgccagctcgtcgcccttgcatcccttgactgccaatgtcggtttccctcctccaaaccgacctctccccctccgctataaaaacccgagcccccctcagtgcctcgaccacccactcgtttcctcccacagcgccattgccgccgaaccaccatccccgccgtgctgccgccgtcctcgcctccctccgccgtcgcgcgtgctggtgaagccggcgtgcgcacgaggagctgacgcggactccggtcgccctctctccctcggcccgagaccgaggtgatcccgcctgtgccgtcggacacccttcccggcgatctcctgacgcggtagcctccgttctccctcctcactcttccttcccccctagcttgcgcgattgctagcctagaccttcctaaacgcgcgtggacgctgccccgagccccgccgccgcccggcatggcctcgccgccaatgccgtccgctcccggaggccgccgctcgtcgccagctgtcctcggtgctcctccgtcccatccggcgccggaaacggattccttgaaccccggatatgctcccaccccttttaatcgaacccccgttgctccggtgaagtttcccccttttctcgccgccggcgtacgccgccgcgattcgtcatcgccggcctccctccggcgaatccgatccggtggctcacttcctctcgtccgtcccatcgttccggtgtactccctctctctcgaatcgtcgcgacgagctccggtgaactcggccgccgtccgccgtccatctcggccgccccttcttcctcctcccgccggcccgcgtggctgccacgtaggcgccacgtcggcgccacctcggctttgaccgagccgagccggtcagccgcctccttcctcccccctctcgcgcgcggtccacggtgcaccaaccggctgcgcgtgggcccgccgcatccctggtccatccggtgcacgcgcgtgaaccgcgctcacccgaaaccctagcgccgccctcatgcgccgctcccactgtgagccgcgccactgacaagcgggccccacccgggaccccgcaaggtggatacggtccacccggacccatccccctctctcctcccgcgcgccccgcccgcttgggccgcgccttgtccggccatgggccgcctcctcgcgcccgcgcccggcccattggctcggccgcgccgtgcttggccgtacccgagccgcccaaagaagtctaaatcccatccctccttccatttcttatccaaaggattaataaatcctttttcctttgtcccataaatcaattccttattcccaaaattccacaaatcatttcctttggtcccgcgcatcagtgactgtcaataatattcttgagaatattatttctataaattccataaatcatctctcctattctagaaactccaattaaaactttcaaaattcatatcactcaattcgcaactctgattgactccgttccacttccagtaattccgtaaaattgagatctatttaatggcactactaattagtctaaataggatctttcttttggtccttgtttaggttttcgattgttgcgtatagttgcggttatcggattttcgtcgatcgcgggttttctcgaagattcgtgaagcttcgtgaagaccttgagcaaggcaagtcaccctttgaccaattgcccctataattgaaaaatcattattattttgtttgcaacttgcattgttagaatcacacttaacttgcttggcctcggtttgcgtgccaaaccgacggacctacccagtagtcgcactaatttccgtaggtcgtactaccctgattccttgtcgctccacccttgtggtacctcggtattcgtgctctctgagcgcgtataccaaatatcccacatacaccgttgtttgtcgaaaacttgggaaatgggtttgtgaagccttcaaaacccgacatgtggtgtcggtgtgtttgaaaataaaatgaattgtgaaaactcgcgatgcggaggttgtgcctatgtggcactgtcccgtattcgcatataaggaccgattcctgtgggaaactcatcgaacataatcaaagtgcaaccacaaggtggaatgggacaccctggctaagtaactagtcggttcagggaaacctcgcatgccaatagttgggaacgccggggcggggtcggacaaaccgggttcctggtaaggcaaggacgag

SEQ ID NO: 16164 - DNA, 642 bp, Oryza sativa
catcgctcgatcagataatcgatcattcaccgatcgattcatcgaattatcgagatgatcgatcatgtaatgcttaccgctgcacagtaatggacgaccttgacctggtcgaggtcgacgttctccgggtgcctccagagcatggcgagaacggggttgtagacgttggggatgggcttgtactgttcgcggaagaacatgttgaggaagtcctgctcggcgaacggggtgggcggcgtgacgacgagcgcgtcgagcaggtccttggcggtgccgaggccgggctcgtggacgaacatgccggcgttgaagtagagcggcggcggggggcagagctcgcgctccggccacgccacctcgtcggggcgctgctggcagtagccgatgtcgtactgcggcgtgtggctccacgtcttctcgcagaagcagtccttgacggcgtagaaggcgcccttgtcgaggtcgaacaggtggtcgatgttgtcgaacacctgtatgtcggcgtcgaggtagaccatccgctcgtactccacgaactcccagatgcggagcttcgagtagttgatcacgtagtaggccatggcgaactgcgtctggctctccggcgggtacaccggctgaatctcccggaccacgcacccc

SEQ ID NO: 16165 - DNA, 510 bp, Oryza sativa
gagggaggggggcagcaagaggaggggtggtggggaaaggggagaaatgagcaacattttgaatgaatttaacacggctaccacgacgagctcaggggcgcgacgcgaagagctgatctcaaaaagaaaagatatgcgggagcatgcagattcagaatttacagcagaggattctataaccccaacctcggtcccgtctcaagcgcctgcggtccgctttcgccatcttcacagggctgctgttccactctgtctgtagcctgaaaaattgagaaagaaaaggaggagcttgatccattagcttcatggagtatatgggaagcataaattctgaatgttatgtggattggccaaagagaaaataattcaatggttaatctgcttttccagctaagatctcagtctgctgtgtttagataaaaagaataagcagatgacaccatttggatgtgaagagaactttgaagctgcttatagagataggaggggaagagtgacaacctccctata

SEQ ID NO: 16166 - DNA, 1750 bp, Oryza sativa
gttttccataagccatagttctctcctgatcccatgcatgctacatatcatacacatctcatgtcatgctgacattttctttcagataaatctcgagcacaggatagcatggatggaacctccaggaaacagctagctgacagtcgcctgatgatcatatcaactagcaagatgcaaattcagattgcgttacaagcctcggttgaaatgagcggcaagtgttcactgcgcagcctgggatgcagactcgacaaagacaatacgccccaaaggttttctcccttcgccttttgtgatgcaacagcacatctgccaattatgggtatgaacaatctcaccttcaacgggagatggatagcagcatcatgcttagggactaagcatgtacgtacggactactaaaacagcgtaagtaaaggtgaggatatacatatgtctaatttcagatcgatgattattggcaaaacctgttctgcaattgggcttgttaatttattttaatttaacaaaacgatcgattcttgtgcatgctaaaagtagtagtagtattatttgcacagcttcgtatagtcacttcgtttgtaaagcccaagaaaacaaagctgcccttttcttttccttttcaaaactcttgcccacagttggtcactacttgccaactactttgggggcagaaaaaggaaaacctgaaacaagagaatagtacagcatactagccttgattttttttttcgctattaccttcagctgttcagctggtatctactcctacgtaccgagttagattcatcaatagcctccttctattgggctattggctacagattttgtgaagttattatcggcttgtgccatatacaaattttgaccaaatatttgttgttcctcaaagcacggttaccttgtacacaggaacctacaccgaagttcgtcgttccgattataatttttttctaagaaccaattaaaatttttgaacatagtaacgggatcagggcatggagcagttcatgcttgagatatcctgcttttgataccaatgtgatgataagccagaaatgtttaatttatactgggtaaacaatgagaaatgctagctgatgaaaggtatccactaatccacacctttaattgactgctcttattgaaagtggagcaagctaaccttgcatggctcatatgtggggcagcatatatagtgcaccaaagtaccaaacataatgtcagtgtatatacatacatgattaattccttcgatgtaagccaaatgagaggggtgacttagttatgtgcatataattaatacgatctacataattgtgaaaaaaatataatttattttgacaatacagattattctttaatttatcactgcaaaaatgaatggctaaactcaatcgacacatgcaagggaaagataaatcaaatccagctttttagaattctccaatatacgcaaccaaaaattaacttggttagatgaatttggccttacatgcatgtttgtagagttacaccattacatacttttctgcaggcatgcacctctaacattttctaaccatttggatgtatgcataaaattaaggaggacacatacatgccactaagttgtaaaatgattttcccttcctaaatcgtaatatattttaattaactactttataacaggaaaacaattttctaaaagaggtcttacccgttatacacaattaacagagtgtttttaccgtgataaagaagatatcat

SEQ ID NO: 16167 - DNA, 787 bp, Oryza sativa
gcaagtccgccggcaccgtccgcctcctcaagtacaccgaaggtaatatgcacttaaaaaatctcgtgtttaattctcaacacgttcatattgttttttaaaaaaaatgtttagagtgacgtctctccggccaactctcatttttacgaatgatgcctccgatcgatgtatgaactttattgaaggggtgccgatggtgacgttcgcgaaggagaaggtggaggtggcggacgacgagaagaaggtggtgtcgtacagcgtggtggacggcgagctggtcagcttctacaagaacttcagggtgacgctgcaggtgacccccaagggcggcgccgccgcccccgccgccgacggcgcggtggtgagctggaccatggacttcgacaaggccagcgaggaggtgcccgacccggacgtcatcaaggagaccgccgccaagaccttccacgacctcgacgactacctcctcaagaactagccagacagccagatcgagcgccgccgtgcgggtgcgtggcttatgtgttagagtccactatagcgtcctcgccgtcagtcgtcgtcgcacacggtcgcagtatcggggtgttgcatttgctagctctccggctagccactgtctcccacgaattagtgtacgtatcggtgcatgagtgaataataaagtgttcaggttaaaccgtttatcgtctctccggctctccgtttactgtttccttgtattgattttcggtctatccgactctctcactctcctttggttaggcctaaacatgtttaggttgag

SEQ ID NO: 16168 - DNA, 1446 bp, Oryza sativa
ttacagcctgattggtaacgattgatcaatttatctcctgtcatacaacagaagggtagaaatgtcatggtgactgtccttttatttactttaagggattggaatcgatcatttcaaactttacacacacatattagctgtgcgctcgctgaaatgttgcagaatagtcattgtctttatgttgaataacatatatttataatggtcatagctctatggcattccccctgataccgacttatctcaatcttcaagcaacaaatttttactatgttacatagaatttcatgatgccttccttttatcttttagttgtgtacttatggcactaccactttaattgcgtaactaccagttagtgatatcttcatttgttgacattctgaataaagattcatgcttttgtcttaaagaaacaacttggttacttttcatgtgtaagaagaaaatgcacctaaatagctaactgatgtttgtgggggacaaacaggttcagatcgcccaaacatatgagaaaaatggagcagcatgcttaagtgttctcacagatgcaaaatactttcaggtcagtaatcttttcccttttgacaatttggctactcctctgatgcattacgaaattatgcatgctgaatttgtttccgtttgttatgtaatcagggaagttttgactatttggatgctatacgcaatgctggagtacaggtctgtaaatttgctcatatgttgtacttccacttacagcagtcaaggaaattcagttgtgtggttcgaatgtatggaaaggctcattctcttgaatttctaaatgcagtgtcctctgctgtgcaaagagttcattgttgatgcctggcaactttactatgcgcgtttgaagggagcagatgctgttcttctgattgctgctgtcttacctgatcttgatatcaagtatatgttgaaaatatgcaaaatacttggcatggctgctttagttgaggttagctgagttatttgtgatatgttttacatgtcaaagcacttccaactctcttatgttagctgctttggagtcattctactagtgttgcaacttccaattcattttcttcttccaagtaaatcaaatgcaacctcaatattcaaattttgatttaataaacaagctaaatgtgttctgaaggtgcatgatgaaagggaaatggaccgtgtgttagggatagatggtgtccagctcatcggcatcaataaccgtaacctcggtatgttattcttgtttcacatgtttagacaagttactttggcacatatattatataacaatgtatggattcaactgccagtgtgaccacacaattctttgtcagatttgttccctataagtcactgtggctaagctatcatggtgccacctgaaaacctgttggctcatattgaactagtggcttgtgcattttcatctatcgc

SEQ ID NO: 16169 - DNA, 13409 bp, Oryza sativa
tggagaagaagtcttaggtggagtcctggcttataccccagttgagcgcctgtgaagatggagccgtaggcccgctttttcgctgctgtttatttttgattgtcaggccttaagtgcctttgtaataatgtaaatattatcgatataataaagatgtgtcttttatatcatgtttgtgtagtgtaccccggcttttcctgggacggggattaatacactagctttcgggaaaatgtatttttctcggtcgcgacaggagaggtcctggtacgcgatctggagagtgggcctggccacagtgaagtggtgtgggcgaaggccagctccgtgtatacctccacgagggtaaaggtacacagagagctcacagcgagggggaacacggtccacggagtaccccgtgtactcgggacacgaaaagccaaggaagcgggcgaggtcacgaagctgagcgacgtggtgaccctcaccaaaaccgtgggaactgaagctggcgttcactgccatctacaattttgaaggagggagaaaagatcagtaaccattttagaaacaaactattgaaaataaagaaaccaaaagaagccttagcttttcgcaagtagttttgaacttagtatccttagggtcgtcctaaatgtcgggtttcgccctagggccaagcctgtgctctgataccatctcttgtcacgccccgaactagtcccgaccggaactagcccgtgacgctccaaattaacctgttaatcgataacagtcccaggaaacagtgctggtatcacaggaagacagaatatcacagcaacagaggtctctttattatagagtaggagtacagtcatgttgggctgcggacagatcccgagcttacaactgcattacaaaagggaagcggaagccaagacttggaccaaacatcacaggcgcgacttgggaactaggctgaaaccctaaaactcatcgtagccggcttgctcctggaagaactcctcgtcagcgggatccgcttcatcttcttcagcaactgggggggattatttatatagagcaagggtgagtacgggagtactcagcaagccatgggaaataagtgtttaatgcaggcttcaaggaaaggctgttgtttttgcaattgattttatttgaactcttttctgaaatcaactaagtgagtgcttctcaaacgacacggatgagacagtgcgtctcgtccggtcggagtatgtgcaatgtatcagtttttcgaattgaaatcaaggttggcacccggccaacaactttcaaacggccacccgggcctagctgatcccatcagctgcagattttccaaacatcaatcccctttccacaacagcaatttcacaaggcagtagtcaaacaaaactacgctaggaatcacctcacatccgcccatgaccgtgggcacggctgttcgaacagtttgttaacctctgcagagggggtacactttacccacacgacattactaacccggatcacccagcccgtggggatcagccacgtcgggagacctccaagctttcatgacaaggcatttccaaagccgacacaggtttaccatatgccgacgagaggggtcccagaccaacaacaggttaggtcccagaccatactgtgccaggaagcccaggggtcctccccgacaccaccccggtgaatccacatgtctctcggcatcaaggctcccctgataagctagttactcagccaggggtgtcccattccacccatgtggtcgtacttgtcttatgttcggatgaaattccaaggaaacggtccttaagtgcaagagcgggaaaccgtacacctggtacgttccccggtccgcggttttggaaattcatttagttcacaagcaccaacccaggtgtcgggttttccaagtcttttgtaaaacccaagttttacccaagaagttactcagattttaagtttgaaggcgaccgttgatactagtgcagagtgcacgatttccgaggcgcgactaggtggttacaaggaaacatggtataacaattaacagaggaaggatcaaatgcaacaaataggtaggtccgccaatctgccttgcagacgggacaagcagattaagtgtgatcctatcaatgcataatatttttcaagcaacataattaagttcaaatataggctcaagatgttcaaaggtggcttgccttgctcgagatcttgagcttgatcctcgaaatcctcgcactgcgggtcttcgggctccgaaactacacgcaaaacgggacaactcaacaaacggcgaaaataaagccctattaatgacctctaagcgtgccattagatagatctcgagatttgaggaattttggaagttgaacggagtcaaacggatttacggttgggaagatattgaatttctaagattattggatttttggtctaaaggaaaaaggatttatttaaacccttttggaaaaagaaaaggaagagggaggggaagtagacttccctcgggcggctagggcgcggcccgagagaaaaggggcggctcggccgagctaaatgggccggtcggcccaagaaggcggcccagagcgcgcgcgcgggaggggaggagagagggagccggtggactgggctcacctcgcgtggtcccgagtgggacccgcttgtcggtgacacggttcaccgtgcggaacgcgcacgcggcgcgcgccagggtttgggggagggacgcggtgcacgcgcgcggttcgcggaggacgcggatgcggcgggcccacgcgcagcctcacagctcgcggtggaccgcgcgcgcgagggaggggaaacggagggagcggctggccgggtcagctgatccggtcacggtcgaggtggcgccgacgtggcgcctacgtggcagccacgcgggccggcgggaggttgaagaagacgccggccggaacggacggcggacggcggtggcaagcggcgaagcgaaacacggcgatctaggcgaaagcgagcacaccgggaagttgcgcgggacgaggggagtcgagccaactactcggatttgccgggggatgctcgacggcggcggattgcggcggcggcaaccggcggcggaagaagggggaaacagcgacgaggtcacgaggggccgattcccggcggcgagagcatctacgcggctacgggaatccgatgctagcgttggattgggtggaaacgcatcgagggaggccagcgacgagaggcgcttccgagctcgggcggcgacggcggcgagcacacggcgagcgacggcagcagtcggggcggcgccggctagctacggggaggctactcgtgctactacctgagtctaaggggaggagatggaacgaggagggagaacggggagatgcgctaccgtgcgggcggggcgcagtgacgatgggccgatggcacgggagtgatctctccggcctcgggccggggaagaggaagaagagggcacgcccggagtccccttccgcgtccttgctcgtgccggctccttcgacacgcgcaacgacgaacggcgacggcgaacagagcacgggaggcggcgacaatggagtggaggcgatgggacaacgagaggagaagagagggagggcgcctgggctttataggatggcaatgtcggtttgggagaggggaaccgactttggacggtcaagccagcgagctggcgctccggctagcggccaaatcggcgacagggcggagggaggatgacgccggcgggaggaaaaagggggaaaaggagggaaagaaagggggcttgccccttgcctctttgggaaaaggaggcggggagcgggggcgacgcggcagagggaggaggggctctgcctccgtcccttggcagcttgcgcgcggtgtggtggggccgagtcgatgacgacggcgatgacggcggggcggtgtggagcggagcggcgacacggacggcaggcgcagacaggcgcggcagaggctgacggcggcggcgaccaggcggtcagccactacggcacgcgcgcgcgggaagcaacgggcggcgcggcgatttgagcggcacggctcgggcacgcgtgctgactcgcggcgcagacggcgcaggcgtggcacgggcggcgaccgcgcgggcgcgcgcatgcgaacaacggcgcgcgggaagcggcagcgagggagcgaagagggagggctcggctcggcgcggctcacgcgcacgtgcgcgcggcgcgcgggcagagcggagaagagggagagagagagcgagagagagagagagagagagagagagagagagagatagccgggggggaggggaagatgggccgagagggattcggcccatcgaacccgggggaggcaaaatagacttttgcggagggatttgatttgggaaggatttggattcgggattgaacttgacaatagatcggggattgagatctgagatggcacggacactagacaacaagcaaagaaatggatttcgcaaatagggtttttaagagataatttttccgctaggcgccacgacggaacgggcgctacagtgggtcaaattgatcagctacaatccatgtcacttcatagcttattagaaccttctcctagtactggaccgcccacagtggccatcatccaccagtgcataagcagtcgatccaatcactgatgtactccaggctaggcatgagccaattaatcgttgttcttccaatttggtaactacatgtccccaactccaaacccgtgattggtaatcttcattgcttgttgcttcattgattggtaaccttcatcgtgctagtaagtataccagttgtcaccgccattctgtgtgtgccgacacggtgccgttcacgtggccacatctttgccaatatgtcctgtggtatgtgaagtggtgcttgcctgcccgattctcttcagtagcacaatataaacttagtaatggtatgtgttgcgtttggttatctttatcgaacatctccaccaatatttattttatagccacgtctgtcaatgtgcactaagtataccaccacacatatcttgggcttttgaaagctgtatgcagagttgcagatatattttttgagtaaattagacacatgaaaagcatatatggttctaaatttatcaaatggttcagaaatgtgactgtgcataagcataaaagaataaaccatctcagagacagacatttttctcaagttcttttcaggtgcttttacacgggaagtcactctgccaaacttaccaatcgtcagtgccatctaccatgcatgctcctgtcaactgatgactcctttcagctgtagcatgagtaccaaggaggcaaggagacgttaaaatcaagcacgaagacatgtacaggggtaaatgcatgcatatgttcagatgcattgtactgatagacccatctagctaccattagcttttgcctttcgatggttgtgtcacacccttttttatcttccttttttttttgcctgtacttgggacgcacgaggagaaaaaagctgggttcgactagactatcacgcgtacaactgaactactccaataacatttgagctttcacaatgttgtcaaacatatgtaactacatgctttctcttcttataagatatatgctctcttgtatgatcctaattaagtgatttgccactctcacctaaggattggtatcctgtcccaaatccaaaagatctgcactttgggtattttggaactcaactgagtgactagcaaatcctggattgagtcctaattaaaatgcaaaccaagacataccttgaggcgaatcagatcgatgacaggccagggatatattacacgaatccgagaattgcaacatcggtcagatatggtgaggaccagacaggccgtgcaaatcccaaacagagaattaaaaacttcaaaccgatcatcatgttgcacaaacaaacaaacagagccaggcatcagagtgcgtcaccattgccgactgatcaaaaagctctctctctctctctttctcactctctctcgttagtcgtcacagctaagtagtagagtataaccgatggaggggtatggataggtgcgcacaacggaagtggcggatgacctgcgctccgattcagattataattagttaatttcaggcgaggagaaagatcgaatggcaacttggctttatcggcgatgcttctgatagctcctctttacgagtgatcgtacacatcgagcagcattcgatcagtgagataatcgactcgatcgggagctaatgacgatgctatcatgtcaatcggtcgctttaatcagttggctgtccaatcatcagtgacattcatgtactgctgccatgcatcaaggcagggtcgatctggcaaatgctccgggggtctaatcatgtgctctggcgtaagtaagagaagcagagggagacaagaggctaaggatgtctaagctacgcgtgatgcgccacgcactgacgcactcatgcatttgggggtacagatgccgattatgtttatctgatgactaagagcaagtttaatagtatagccaactactagctccaattcatctatagccaatctaatagcttattcatacaatagttacatactacactattaatacttgatcccacctatcatacacacattgtgtcttagagttcgtgctacagctggctataaatctgtagctcgctgtttttccctctcctcatttatcttcttaaaatatgtttgtagctggcttatagcctgttattgtacctgctctaatagcagattgatttcgtgattctggaatcttggatcggttcgtatcatccacgacacttagaaaagcacatccaaatccactgcttaattactggttagtaagagggtgatgaacaacttggcgatcgtggtgaaaaataacgaactcaatttaccttggcggccgagctcggaggagaagccagtgatggtgatgaacagcgagcagcagaactactccgccggcgacgatgcgcctggacgggagcggcgccagcgtcagaaacagatccaacaatccagcccatcaaagaccaattagagcccatctcactctccttgatttacgaggcagtgcggcccgtgcagtttttacaagtcagttatactagccacttagtcatgcgttgcacgactttagatacctgtataaaaagttatatatttgggttataataagcaattatacttttagtttcaaattttgcgaaaggacttgataagacttgagcatacaaccggggaatgaaactgtgagctgctgttgcaagatttaaaatgagggcttgtgcttagcagttctacgaatagacggagaatttaagctctgcttcatcaagtgaaagagaacaactaccacgtcaagaactcaactgaatcaactaaacaactcatgtcaggaatttaaggatactgaacatgtaccatgccttaatgccttgttagccggacagaattagaccaccacagactgcgcaaagagggcataatctggtttacacacaccactataaaacctaatcaaataaaccttttccaaatatggcaacacaatctatttaacatattatcatatatttgtttaaaacagcgaaaagatcagaataaagttgaagcacaacctagactccaaagagttattgagaaccacaattttccctagctattaatcagcttggctgctcaaggcttgctatcatatccaatatatcctatacccttcgccttctttcagtaatggactaatttgatcagcaatatctccaggaatctgagcagaaagaagaaggcatttgagcagaccaaatatcttcaggaatctgagcagctccagcatgctgcataattatttttttatagaccaaatatatataatagatggatagcagtagcttgcttcatatagccgaaatattaatgtgttgttggaacaaaatattttaacatcaaattatttttatgtattgttcatcattctatttaatatttgttctaggccttttgggttgcacaacagttagggggtgaactgtaagagagtactaaacagcagtatatgatagcaatatactacgtatgatgttaactgatcaactcaatctttcttgggtcattataattggtggttccttttgtattctaccaaattctgatatgctattgtttgaattacataaatatgtctgctccatatgatcagggtaatgatacgaaatttccaatttctattgttatgcatgttttgaagttgacagcatttcggaagtaaatttcaagctttagtcagcaagctgtgattatttatatagtatttcccaaaaaaaaaggttaatgttgagaaatgtttcagcatcctgaacagttaagtgctgttgaactgcacgatcagattcagtagtttatccacataatcattattttttattgagcaaatggataggaacaaaaaaaaagtcatatgtattacctttccttgaaacttttcatcgatctactgaccagaacctatgaaatgtaaagactggagactgccaagtatgaaaaagttattacctcagctttcataggacagaatcaccattgtgaacagcctaaatcttttcattgtggaacagccgctacacctacagcctagtaaatctgttcaatctgcacaaatatctctatccgacaataactaatatcaacacactatcctgcgtaaaaatttgtaaaatctgtaacatagtatggctgtatgattttgctatgtgcgtggagcatgaactgaaagggcaagaaggcattgcagtagaatctgtcctatacccaatgaagaccatgcaagggcagtgtgtcaaagttggcctcgtcctccaagaagccttgaggtcagcagcacgatgtcatgcatcctagaggctagagtacgatgctggtggtgccgctggacaccgtaatggccttgcatcctcatccttgggttcctgctggtaaccaggcagccctcgctcttgctggtggccattcgtcgagcaggagcggccagacgaagcccactggacaccagcggcagttcgcagcagtgcacgctcgatccggcgatgacgctctcataggaggacctagagtgaacgatccgacgcgacagggcctgatccggcgagacgcaaatgagtgggggatggacaggagggaggaggaggcaggggattaggagagactgaggccagggtaggagcttgtggggatgggaagaatggaagatgcggcggaggaggatgaagccgcggcggcagcttttctttttttcttttttttttaacgcgtggatgctgcctattcgcctacctctctcgactctgatcgaagactcctgaaatctcgtcttcaccttttgactaaagctatactgaggcctattcaaaatctaacggcatgggttcaatgtttgttgcatccaacggctaatattattccgatgacatggcgctttgtggtggtgaaaaactttagtattttcactactttagatttccaatcactaacaaacagcgaaacagaggtctgattagagatggcaattggcaacatgtcccataacccgagatcccataggtttttatattattattacgagtcacatttttaattctgatatccatggatttattaatgagcaaaattccttacctgttgggttgtgtcacgccccgaactagtaccgaccggaactagcccgtgacgctccaaattaacctgttaatcgataccagtcccaggaaacagtgctggtatcacaggaagacagattatcacagcaacagaggtctctttattatagagtagaggtacagtcatgttgggctgcggacagaccccgagctcacaactgcattacaaaaggaaagcggaagccaggactaggaccaaacatcacaggcgcgacttgggaactaggccgaaaccctaaaactcatcgtagccggcttgctcctggaagaactcgtcatcagcaggatccgcttcatcttcttcagcaactgggggggattatttatatagagcaagggtgagtacgggagtactcagcaagccatgggaaataagtgtttaatgcaggcttcaaggaaaggctgttgtttttgcagttgattttatttgaactcttttctaaaaacaactaagtgagtgcttctcaaacgacacggatgagacagtgtgtctcgtctggtcggagtatgtgtaatgtatcagtctttagaattgattcaaggttggcacccggccaacagcttttcaaacggccacccgggccaacaactttcaaacggccacccgggcctagctgatcccatcagctgcagatttttcaatcatcgaacccctttctacaacagcaatttcacaagcagtagtcaaacaaaactacgctaggaatcacctcacatccgcccatgaccgtgggcacggctgttcaaacagtttgttaacctctgcagagggggtacactttacccacacgacattactaacccggatcacccagcccgtgggaatcagccacgtcgggagacctccaagctttcatgacaaggcatttccaaagccgacacaggtttaccatatgccgacgagaggggtcccagaccaacaacaggttaggtcccagaccatactgtgccaggaagcccaggggtcctccccgacaccaccccggcgaatccacatgtctctcggcatcaaggctcccctgataagctagttactcagccaggggtgtcccattccacccatgtggtcgtacttgtcttatgtttggatgaaattccaaggaaacggtccttaagtgcgagagcgggaaaccgtacacccggtaagttccccggtccgcggttttcgaaatttatttagttcgcaagcaccgacccaggtgtcgggttttccaagtcttttgtaaaacccaagttttacccaagttgttattcagattttaagtttgaaggcgtccgtcgatattcgcacagggtgcacgaatatcgagacgcaactagatggttacaaggggacatgatataacaattaacaaaggaaggatcaaatgcaataaattaggtaggtccgccaatctgccttgcagacgggacaacagattaagtgcgatcctatcaatgcataatatttttcaagcaacataattaaatttcaaatataggctcaagatgttcaaaggtggcttgccttgctcgagatctggagcttgaccctcgaaatcctcgcactgcgggtcttcggtctccgaaactacacgcgaaacgggacaactcaacaaacggcgaaaataaagctctattaatgacctctaagcgtgccattagatagatctcgagatttgaggaattttggaagttgaacggagtcaaacggatttacggttgggaagatattgaatttctaagattattggatttttggtctaaaggaaaaggatttaattaaatcctttttggaaaagaaaagaaaagaaaagagggagggaatatagacttttcctcggcggctagggcgcggcccgagagaaaaggggcggctcggccgagctaaatgggccggccggcccaaggcggcccaagcacgcgcgcgcgggaagggaggagagagagagccggtggaccgggctcaccacgcgtggtcccgggtgggacccgcttgtcggtgactcggttcaccgtgcggagcgagcacgcggcgcacgcgcgcggccggggctgggacgcggtgcacgcgcgcggttcgcggtggaatggatgcggcgggcccacgcgcagcctcacggctcgcggtggaacgcgcgcacgggaggggctgaccggggtcggcccgacccgatctcggccgagctggcgccgacgtggcgcctacgtggcgcctacgcgggctggcgggaggaagacgaaggcgccggccgcgaatggacggcgggcggcggcggtttctccgggacgccttgcgacgatgaggggcgacggggcgtacaccgggatgacgagggagaatgagagggagcgagccaacggcttggattcgccggagggtgtccgtcggcggcggattgcggcggcggcacccggcggagagaaaagggtgaaacggcgacgaggtcacgaggggccaattcccggcggtgagagcatctacgcggttacgggaatccgttgctagcgtcggattgggcggagctacgccgagcgaggtcggcgacgagcgggtgctacggagcacgggcggcgacggcggcgagcacatggcgagcggcggcaacggttggggcggcgccggctagctacggggaggctacacaagctactaccgaaaactaagggggggagatggagcgaggaggaagaacggagggaggcactaccgtgcgggcggggcgcagtgacgagaggccgacggcgcgggagtaatctctccggcctcgggccggggaagaggaggaagacgagcgcccggagtccccttccgcgtccacgaacgcaccggctctccctgcgcttggcgatgaacggcggaggcgagacagagctcggaaggctacggcaacggcgcggacgagaaacggggaggattgggggggagaagaggaagggagggcgcctgggcttacagggcggcaatgtcggtttggaaaccgactttgggcggtcaaggcgcgagctggcactcggcgctcgcggccaaatcggcgacagggcggagggaggatgacgccggcgggaggaaaaggggaaaaggagggagagaaagggggctcgccccttgcttctttgggaaaaggaggaggggagcaggggcgtcgcggcagagggaggaggggctctgcctccgtcccttggcggcttgcgctcggagtggcggggccgaggcgatgacgacggcgatgacggcggggcggtttggagcgaagcggcgacatgggcgacaggcgcgggcaggcgctgacgacggcggcgaccaggcggtcggccaccacggcacgcgcgcgcggcttgcaacgggagtcgcggcggattgagtggcgcggctcgggcacgcgcgctggctcgcggggccgagcggctgcgcagctgcaggcggcagggcagcgggaccgggtgacgcggacggcgcagacggcgcggcacgggcggcaaccacgcgggcgcgcgcaagaacaacggcgcgcgggggccggcttcgcgggtggggagctcgccagggatggggagaaggagagcgagggggagggggcgctcggcgcggcgctcgagcacgcgcgggcaaagcgaggggaagggagagggagagagagagagagagagagagagcgccgggagggagggggagatg

SEQ ID NO: 16170 - DNA, 31243 bp, Oryza sativa
  unsure (1)..(31243): unsure at all n locations
caagccgatgcatatcaaagaaatgaatacaatgagttccacttaccatcttgggaccaacaaatatcttttaatctctctgaaccagagaccaccattaaattagacgagcttcagaatcttctagttctttcggcgaggggaatggattgaccttaaaggaagtggattgactttgattctctcaacaatctcaaattccagaaacatgattacaatgttcgtaacacacgagagaatcgattcgtccagccgaacgacttccatcttcaccagctataaaaaagccgagaaatccaggtgctcagcacagtggtccagatcacttgcgccatcacaagtcgcaagccaaaaccatctcgctcgagctcaccatggaattctcctcgagttcaacctctctcttcctcctcctctctatcctgcctctcctctactttctttgccagcgcaacgaccccaagaagcagcctcacgcccatgggctcaagtcctaccccgtcgtcggcatagtgccgcacttcaccaagaacaacgaccgcttccttgagtttacaaccgaaatcatgaagcggagccccacgcaaaccatgtcgttcaaggctctaggtctcaccggcggcggcgtcatcaccgccaacccggccaatgtcgagtatacgctgaagactaacttcggtaactaccccaagggcgagctcgccgtgtccatggtcgtggacttcctcggccatggcatcttcaactccgacggcgagcagtggcagtggcagcggaaggccgccagctacgagttcaacaagcgctcgctgaggaacttcgtggtggacaccgtcaggtccgaggtcgtcgagaggctgctgccgcttctggagcgggcggagcgcgacggccggacgctggatgtgcaggacgtgctggagcgcttcgcgttcgacaacatctgccaagtcgccttcgacgaggacccggcttgcctcgccgaggacagcatggcctcgccccagagcgcggagttcatgcgcgcgttcaacgatgcgcagattgccgtgagggaccggttcatgtcgccggtcaagtcgctgtggcgcttcaagaggctgttcaacatggagcccgagaggcgaatgcgggaggcgctcgccacgatccacggcttcgccgagcggatcgtccgggagcgcagggagagagggaaggccggactggcgcgcagtgacgacttcctctcgcgcttcgccgcgagcggcgagcacagcgacgagagcctccgcgacgtggttacaaacttcctcctcgccgggcgcgacacgacgtcgtcggcgttgacctggttcttctgggtactgtccggtcggcccgacgtggaggacaagatcgtacgcgagatccacgcggtgcggcgcgcgtccggtagcacaagcgacgcgacgttcagctttgatgagctgcgtgacatgcaatacctccatgccgccatcacggagtctatgcggctgtacccacccgtggccatggacacgcacagctgcaaggaggacgacttcctgccggatggcacgttcgtggggaaagggtggctagtgacgtactgagcgtacgcgatggcacgggtggaggacatctggggcgcggattgtgaggagttcaggccagagcggtggctagacgaggtcggcgcgttccggccggagagcccgttcaagtacccggtgttccacgcggggccgaggatgtgcctcggcaaggagatggccgacatacagatgaagtccattgtagcatctgtgctcgagaggttcagtctccagtatgccggcggcgagggacacccggggctcgtgctctcggtgacgttgcgcatgaagggcggtttgccgatgcaagtggccacgagaggttgatgaccggagcgtgctgctacacttgtggacttcgtttttacagaactagtggcacgcgagattgcatggctagcataacaacatatatatttttatattttattgttaaaatatgttaaatgtatataattctaagttatgtaataatttcactttcagttatttctaaattcttccaatattccttcatttctattttctaatttccgttatttctaaattatatttctatatgtactactatatactctacttttattttttatttcaattcctattttcaggtagtactgaatttctatatggactctagatacttcttccaaatattccttatttttgtttctaaaattctattatttataattgtatttttatatggactctaaactcatctctcaatattctttttttttaattctgagtttcggttatttctaagttgtatttctttatggactctagcctcttattctaatattcatcattttttaattttgaatttttgttatttctaaattgtatttctatatgtactctaaactctacttttgtagcgcccgttccgtcgtggcgcctagcgggaaaattatctcctaaaaaccctaattgcgaaatttgtttcttcgcttgtcgtctagtgtccgtgccatctcaagatctcaaatccccgatctatcgtcgagtttaattccgaatccaatccttccaaatcaaattcctccgcaaaagtctattttgccaccccagggttcgatgggccgaatctcgctcggcccatctccctctccccctccctcccggcgcgctctctctctctcccccttcccctccgctctgcccgcgcgccgcgcgcgcgtgtgcgagagccacgcccagcgcccctccctccgctctgcccgcgcgtcgcgcgcgcatgcgcgagagccgcgccgtctgcgccgtccgcgccgtccggccccgctgccctgccgccctgcagccgcgcagccgcccggccccgcaagccagcgtgcgtgcccaagccgcgccgctcaaatccgccgcgcctcccgttgcaagccgcgcgcgcgtgccgtggtggccgaccgcctggtcgccgccgtcgtcagcgcctgccgcgcctgtcgcccgtgtcatcgcgccgctccaaaccgcccagccgtcatcgctgtcgtcatcgcctcggccccgcctctccgcgcgcaagccgccaagggacggaggcagagcctccctcctccctctgccgcgacgcctccactccctcctccttttcccaaagaagaaaggggcgagcccccccttttctctcccccctttatcctcctttttccctctcgccagcgtcaccgccctgtcgccgatttggacgcaagcgccgagcgccagctcgcgccttgaccgccctaagtcggttcccaaaccgacattgccgcccatttaaaccctagcctccccctttcccttcctctctcattcgcctccgcgccattgccgccgcccccgtgctctgttcgccgtcgccgttcgtcgttgcgcgtgtcggaggagccggcacgagccaggacgcggaaggggactccgggcgcgccctctccttcctcttccccggcccgaggccggagagattactcccgcgccgtcggcctctcgtcacagcgccccgacccgcacggtagtgcctctctccgttcttcctcctcgctccatctcctccccttagttttcggtggtagcacgagtagcctccccgaagctagcctgcgccgccccgacctttgtcgtcgctcgccgtgtgctcgccgccgtcaccgctcgagctccgtagcacccgctcgtcgccagcctcgctcggcgtagctccgcccaatccgacgctagcatcggattcccgtagccgcttagatgctctcaccgccgggaatcggcccctcgtgacctcgtcgtcgtttcccccttttctctccgccggttgccgccgccgcaatccgccgccgtcgagcatcccccggcgaatccgagccattggctcgtctcccctcgtcctgcgcaacatcccggtgtgctcgccttcgcctgtatcgccatggtttgctccgccgctcgccgctgtcgaccgccgtccgttccggccggcgtcgtcgtctacctcccgccggcccgcgtggcagccacgtaggcgccacgtcggcgccacctcggccgcgaccaggtcaagtagaccccggtccgccgcttccctccgcccctcgcgcgcgcggtccaccgcgagccgtgaggctgcgcgtgggcccgccgcaccgcgtcctccgcgaaccgcgcgcatgcgccgcgcctccctccccaaaccctagcacgccccgcgtgcacctcgctcacggtgagccgagtcgccgacaagcgggtcccacccgggaccacgagggatggacccggcccaccggctctctctctcccctccccgctcgcgcgcgcgccttgggccgccttcataggccagccagcccattaaggtcggccgagccgccccattctctcgggccgtgccctagccgcccgagggaagtctaatttccctccctccttcttttcttttcttttctttttcaaaaaggatttaaataaatccttttcctttagaccaaaaatccaataatcttagaaattcaatatctccccaaccgtaagtccgtttgactccgttcaacttccaaaattcctcaaatctcgagatctatctaatggcacgcttagaggtcattaatagggctttattttcgccgtttgttgagttgtcccgtttcgcgtgtagtttcggagcccgaagacccgcagtgcgaggatttcgaggatcaagctccagatctcgagcaaggcaagccacctttgaacatcttgagcctatatttgaaatttaattatgttgcttgaaaaatattatgcattgataggatcgcacttaatctgtcgtcccgtctgcaaggcagattggcggacccacctaatttgttgcattgatcctcccttgttaattgttatatcatgtccccctgtaaccatctagttgcgtctcgacattcgcgcaccctgtgcgagcatcgacggacgccttcaaacttaaaatctgaaaaacaacttgggtaaaacttgggtttacaaaagacttggaaaactcgacacctgggtcggtgcttgcgaactaaatggattttccaaaaccgcggaccggggaacgtaccaggtgtacggtttcccgctctcgcacttaaggaccgattccttggaatttcatccaaacgtaagacaagtacgaccacatgggtggaatgagacacccctggctgagtaactagcttatcaggggagccttgatgccgagagacatgtggattcgccggggtggtgtcggggaggacccctgggcttcctggcacagtatggtctgggacctaacctgttgttggtctgggacccctctcgtcggcatatggtaaacctgtgtcggctttagaaatgccttgtcatgaaagcttggaggtctcccgacgtggctgatccccacgggctgggtgatccgggttagtaatgtcgtgtgggtaaagtgtacctcctcttcagaggttaacaaactgttcgaacagccgtgcccacggtcatgggcggatgtgaggtgattcctagcacagttttgtttgactactgcttgtgaaattgctgttgtggaaaggggttcgatgtttgaaaaatctgcagctgatgggatcagctaggcccgggtggccgtttgaaagttgttggcccgggtggccgtttgaaaagctgttggccgggtgccaaccttgattcaattctaaagactgatacattgcacaaactccgaccggacgagacgcactgtctcaaccgtgttgtttgagaagcactcacttagttgtttttagaaaagagttcaaataaaatcaattgcaaaaacaacagcctttctttgaagcctgcattaaacacttatttcccatggcttgctgagtactcccgtactcacccttgctctatataaataaccccccccagttgctgaagaagatgaagcggatcctgctgatgagaagttcttccaggagcaagccggctacgatgagttttagggtttcggcctagttcccaagtcgcgcctgtgttgattggtccaagtcctggcttccatttcccttttgtaatgcagttgtgagctcgggatctgtccgcagcccaacatgactgtatctctactctataataaagagacccctgttgctgtgatattctgtctccctgtgataccagcactgtttcctgggactggtatcgattaacaggttaatttggagcgtcacaggctagttccggtcggtactagttcggggcgtgacaacttttaatattcctttttctaatccaaaatttcaatcatttctagattatattctgtatggactcttatacttttatttcaatattcctttttttaatttcatggtatttataaattccggattactgttatttttaaattgtattcctatttggaatctattttttatttttttcctctttttctccaattaatatgagaatttctcgaccgtgagagtgaatgtggaggctcctttttctattactttaataaattaatagatagataatattctatatggactcttatacttttatttcaatattctttattttttaatttttaatttttggtatttataaattgtatttttatatggactctatggagtacttttattattttatttttttgttaattccgaatttttatttataaattgtatacgtatatggactctagccttttcttttaatattccttattttctaattccgaattcagttatttttaaattgtattcctatttgcactatattttttctttttctatttttctccgattaatatgagaattttttaaccataagagcgaatgtggaggctcctttttctattgctttaataagttaactagttgggcagcccacgcaattgcgatgctagcaacaatttaaaattatctattttttacacatgattttatttaaaattatcattctcgtgattctaataattttatagttttaaaagccacatcagtcactaccccttactcctttatcacatttttatttgcttactcgatataccactacttctattcatcctctttaaaactttaaaaaattaggccttatagtttttagagttcattgtcttgttgggtttcgttttcataatttttaggagtattgtcaaacatcgtcaatttactgctctacggctcatccgctgccacctctctttattatcattgggattttaaaaatcgaacataattattgcttgtgttcttttttactttttataagtctcgtcaaatcgttaggggcttcgccccctatactgctctgcaccccgcccactgcctcccctctttattgttattcagattttaaaatcaaacatgattatcattggggtttattttactctgcataagtcccgtcaaccgtcgtgaccatgttgcataacagcatgcctatcttcactgggattctatttggggttttgtttatagttttttgatatcacatcaaccgctaacactctactcctttgtaggcctattgcttatctcctctttatggtaatttgtgattgttgtgttctagatggatttttttaaaattgcataatttttcatcccgataatttttttcataaattatattccaacttaaactcttataattatttttctatttttggaatttattttatttgttatttcaaactttaattaatctcgtcatgtattctagattgtctcttacttcaacggtctttattttttattacaaattttagttatttattataaattgtatacgtatatggaatctagccttttctttcgatatttcttatttttctaattccgaatttcagttattttaaattgtattcctatttggactctattttttatttttctgtttttctccgattaatataataatttttaaaccatgagagcgaacgtggaggctcttttttctgttgctttaataagttaatagattgctcccgcttaatctgagaaataaaaaaaatcggtgttcttgtcttctccgagtggcgaatggtcggccgacacctttcgaatcggagcttatgtcggttgcgtgtttgtgtttggcacgccaagtggagcttgagaaaacaatcgagatcgatctatgtgcagtattgcacaggatttgcatccttaagaaagttggtgtgccatcgcattcttggaaaaaccggttactgcgtttgtttgcaacagatagagagaaatcacagttttctccatgcgcaaatcacagttttctccatgcgcacgctttccaaactacgaatcattaaatatcatactttaaaaaaatataggaaagttactttaaaaaattaaattaattaatttttaaagtttaaaataattagtccttaattaattatgctctaatgtcttaccttattttgcgtattttctcaatcttttctttttacctcctctcaaacacggtgaccaatgagcactgagctaccactagaaacctaaccaattgagctacatttacttcgctagtatgtaatttataacgtagttctcttgtagaatatatgtttgatcattcatattatttaaaactttttacaaatatatggaaatatatagtaccgttatgacaaagtacttttagtgataatagaaatcacaataaaataaataatcataatattattttttatgaaacaataatcagatgtaaattaataacggcgtatattaaaatcggagggagtactctctatttgaaagcacgagcttccgaatatgatctgtagctctatcctactcctctataaaaaaaaattcaaactggtccagattcatccctacagtttgattttttttacggagagacactactacaggaatgattttccttgacgggggtcattttagattgcaaacggcgtgtaagtagttgcgtctgcgaaaatcgtgctccattttcacgtgcgactctttaagatgactgcacaaaaaaaatcaattatcgcaggcgggccacttaataggtccgcatgcaaaaataggcttgttttcgcgtacggacctgttaagtcaccgcacacgaaaatagcctctcaacttttaatccgccgtcgctgccccacatgcacccactctcatcgctatctccttagatcccatctcacacctgctcctcccatctccctctccgcctcctcctcccatctccctatccgcctcctcctcccactcctccctctccctatccgccccctcctcccactcctcccatctcccagcgacggcggcagcatcggagcggattcgttgccggccgccgcagtgaggatggatccatcgcctgtgaccgcgaggggatccgtcgccggcgacagcggggacgacggcggcgggccttaggcaaggcggcgatgacgacggtggtgacggcgacgatggcggtgacggttttttttgtttcgattttttattttcccgtgcacacgtgaaaatcgcgattttcacagacacttcgttccagacgggtggaagattcgcatgctcgaccgcacagaaaaatcattattgcactagtgggagtatatgttagcagatttgtttcgagcctaatcaacttttattatagttcgtgtgtgcgcctggatcaattatttgtgaactagagagagctgtaccaaagctgaacctaagaacctgattatttgagcgggcgtccactgtctagctttactagtactactattgatcgagtcaatgatcgctctactagtactactattgatcgagtcaatgatcgctctactagtactactattgatcgagtcaatgtaacgatctgtttggtggcatatgatgtattcttgatcagcaaaacgtatgcttgagctgcaagccgatgtataatcaaggaaatgaaaaacaatgagttccacttgccatcttgggaccaacaatatcttttgatctctccgaaccagagactaccattaaattagacgagcttcagaatcttctagttcttccggcgaggtgaatggattaactcttttttttaaaaaaaatccagaaacatgaataccaagttcgtaaaacacgagagaatcgatccaccagccgaacgactgccatcttcatcagctataaaagagccgacaaatctaggtgctccgcacagtgatacagatcacttgcgccatcacaagtcgcaagccaaaaccatctcactgactagctcgagctcaccatggaattctcctcgagttcaacgtctctcttcctcctcctctctatcctgcctctcctctactttctttgccagcgccacgaccccaagaagcagcctcacgcccatgggctcaagtcctaccccgtcgtcggcacactgccgcacttcgccaagaacaaggatcgcttccttgagtttataaccgaaatcatgaagcggagccccacgcacaccttgtcgttcaaggcgctcggcctcaccggcggcgtcatcaccgccaacccggccaatgtcgagtatacgctgaagactaactttggtaactaccccaagggcgagctcgccgtgtccatgctcgtcgacttcctcggccatggcatcttcaactccgacggcgagcagtggcagtggcagcggaaggccgccagctacgagttcaacaagcgctcgctgaggaacttcgtggtggacaccgtcaggtccgaggtcgtcgagaggctgctgccgctgctggagcgggcggagcgcgacggccggacgctggacgtgcaggacgtgctggagcgcttcgcgttcgacaacatctgccatgtcgccttcgacgaggacccggcgtgcctcgccgaggacagcatggcctcgccccagagcgcgaagttcatgcgcgcgttcagtgacgcgcagaatgccgtgatggaccggttcatgtcgccggtcaagtcgcggtggcgcttcaagaggctgttcaacatggagcccgagaggcagatgcgggaggcgctcgccacgatccacggcttcgccgagcggatcgtccgggagcgcagggagagaggggaggccgggctggcgcgcagtgacgacttcctgtcgcgcttcgccgcgagcggcgatcacagcgacgagagcctccgtgacgtggtgaccaacttcctcatcgccgggcgcgacacgacgtcgacggcgttgacctggttcttctggctactgtccggccggcccgacgtggaggacaagatcgtacgcgagatccacgcagtgcggcgcgcttccggtggcacaggcgacccgacgttcaacttggacgagctgcgtgacatgcaatacctccatgccgccatcaccgagtccatgcggctgtacccacccgtggccatggactcgcacagctgcaaggaggacgacttcctgccggacggcacgttcgtggggaaagggtggtttgtgtcctacagcgcgtacgcgatggcacgggtggaggacatctggggcgcggactgtgaggagttcaggccagagcggtggctagacgaggccggcgcgttccggccggagagcccgttcaagtacccggttttccacgcggggccgaggatgtgcctcggcaaggagatggcctacatacagatgaagtccattgtagcatctgtgcttgagaggttcagtctccggtatgccggtggcgagggacacccggggttcgtgctctggttgacgttgcgcatgaagggcggtttaccgatgcaagtgaccactagaggttgatggccgtagcaacttgtggactacgctgttagagagttgctcccgcttaacccgagaaataaaagaaattggtgtgcttgttttctccgagtggcgaatggtcggccggcacctttcgagcttacgttagttgcgtgcttgtgtttggcacgcagtggagcttttgaaaataatcgagatcctctgtgcagtaatgcacatgatctgcatcatatccagatatcctcgagaaaggtggtgtgctacagtacaaatagtactactattggtgtgtggacaggattgatatcctctcgccggtcgactacatcgttcacggacatatgggcccgatgatctttaggcccgcatgtctgtgacaaagacgcaccaagacgcggtgcagtcgactgcgaagaatctttatctatgtggatgatgtagatggatgccaactcaaaaaaaattggttattgcgttcgtttgcaaccgattggttaatagttcgtagtttggaaagagttcgtttgtacgtttttcgatctacaaaatattactcgacgtgtttttttataaaaaaaatatagaaaagttgctttcaaaaattaaattaactattttaaaattgtatgctcgccaaagctcaaagagatgtcggggtgtgggtgtgggtgtcgctggggcacgactttcccaacatggtttcgagccatcgtctctcgtgtcatgctcgttcgaccttgcaagccctaacgaggctcgcgcgtcttcctagttggttgaggggcttgcatgggacacatcgacacactatgaatgtccttacatgatctttctgtttagttagggcaacgtcaatgttaaaggttacgtgaaacataagagtgggacccaccacagtaagcagcagttgtttccatgcctacaatgcttgtgtcgcagagagaaaataaggtggggcccacagggtcccatcgaggggaaaaaatatcactactcactccttccgtgaaacacttggcgcaatgaaaagtccccatcttctattcacttcatattttattagcttgttgccgcaccgtaaggttaaggcttctttttctctatggttcttatggtgtgcttgcacaatgcttaaggtgttgtactgtataacattaattgcttaaggctaactttttaccaacattgtggatgcccttaggaggcaaaagacatggaccttccaacaacgcacaaccacattgagtgccattgtagctaaaataaagagtaaattgcacttacggtgcaacaacttagcaggtgggtgtaatttagtacaataacttaaaaaatgaacgttctagtgcaacaacttggtaggaatgtgcaatttagtataagaactttataagtgatcgtataaatgcaacaacttgtaaggtaggtaggattttgatacaataaattaagaagttacgtgacaacttaattatttagagcatttttatataaattcaaatttttaagtacttattttaacaatatactagcatggaattatataaacatatttatatttttatcctaataactaataactaaaaatcaattaaactggattaagaaattattatatttcggttgataattgagaaggtgaagaaaacaaaaattttaaagataattggatgtaaattgtatgtgcaacataattcttaaagattaaattcatatataaggtaatatccgtatgatcagtgtgtattggcatacttacatcgtgaaaaatctcatctagcatatgcttagctaaattgattcactaaaatactaaattattaagttttttactagaacgcacccacttgtcaagttgttgcactcggacgttcaattataaagttcttgcactatattgcacccacctatcaagttgttatatcgtaggtgtaatttactctaaaataaaagaggaaacacgaacttgtgtgtggtgtcagtgtgtactgtctacctttaatattgaagttgcggcacaacaaagtcattgtaacgatctgcttgcgctgaatcacttctcaccttgataggatgatccactcctgaatcttgagctgcaagccgattcatcttaagtaaattagaaacatttagttccacttgccctcttggaaccaataatgtcaccaatttaaactctaccattaaaattagacaagcctaagaaacttccagttcttctgatcaagggaatgtttgacttttgttctctgacctatgtgaagtcgtaagcacatttatctatctataataactctattaattgagcaccacgagggaactaaccgaaaatatgtaggagtagttgatgactaaccctgctgcaactaagcttagggtgtgtttagatcccaaaaatttttggtctaaaatgtgacatcaaatgtttggacacatgcatggagtattaaatatggacgaaaaaaaccaattgcacagtttacatgtaaattgctagaaaaatcttttgagtataattgcgccatgatttaacgatgtgatgctacagtaaacatttgctaataacggattaattaggcttaataaattcatctcgtaatttacagacggaatctgtaaattgttttgttattagtatacgtttaatacttcaaatgtgtctccgtatatttaaaaaagtttagccaaagaactaaacacggccttaagcaagttgtgccatgcaataaaaatatgattagaaatagtttatcataaagtatagcatggctaagttttttttagcaacagaggttatcgcagaaacaaatttacagattagcccgagatattacacaaccaaggagactcttagtgtcaaataattaagaaattataaaagaagtctgggcatgctagaactcaccccttccactatgctagcaagcactttcctagcattgttagttataaatttggaagtatacatgacatgtgataagtgcagtgcgatacaatggcggcaacaaaataaacatatatctaaccatgacataactaaagtgtgacttagcaaaataagacaaccaaacaaaagccgtaaaataccaaaatacccaagaacccaacacaattgatatgttgctgagccggacgactacaatctccagctataaagcagccaagcaatccatgtcttcttatcccagaaacattgatactgatacagatcacttgtctgccagtcacaagcctcatgccaaaagctcctctcacacactcactctctcgcgccatgaaattctcctcgacctcaacccctttattcatcctcctcctccctttcctgcctctcctatactttctctacctgtaccaggataccaagaagcagcctgcaggttccaatggactcaagtcctaccctgtagtcggcacgctgccgcacttcgccaagaacaggcacaggtttctcgagtggtcgaccgacgtaatgaagcgcagccccacgcacaccatgacgttcaaggcgcttggcctcacaggcggcgtcatcacagccaacgtggccaacgtcgagcacatactaaagactaactttagtaactacccgaaaggcgagctctccgtgtccttgctcgaggacttgcttggccacggcatcttcaactccgacggcgagcagtggctgtggcagcggaaggccgcaagctacgagttcaaccagcgctcgctgaggagcttcgtggtggacaccgtccggttcgaggtcgtcgagaggctgctgccgctgctggagtgggcgcggcgcgacggccggacgctggacgtgcaggatgtgctcgagcgcttcgcgttcgacaacatctgccatgtggtgttccacgaggacccggcgtgcctcgccgaggacagcatggtctcgtcccagagcgcggagttcatacgcgcgtgcagcgacgcccagaacgccatcattgcccggttcatgtcgccggtgaagtcgctatggcgcgtcaagaggctgttcaacttggacccggagaggcggatgcgagatgcgctcaccacgattcacggttacgccgaccggatcgtacgggagcgcagggcgagaggggaggccgggctggcgcgcagcgatgacttcctgtcgcgcttcgccgcgggcggtgagcacagcgacgagagcctccgcgacgtggtgaccaacttcctcatcgccgggcgcgactcgacgtcgtcggcgctgacctggttcttctggctggtgtccagccggcccgacgtggaggacaagatcgtgcacgagatccgcgcggtgcggagcgcgtcgagcagcggcggcacaagcagcgcgacattcagcttcgacgagctgcgcgacatgcactacctccacgcggccatcaccgagtccatgcggctgtacccacccgtgcacctggacacgcacagctgcaaggaggacgacttcctgccggacggcacgttcgtggggaaagggtggctggtgacctattgcgcgtacgccatgggacgtgtggaggacatctggggcgcggactgcgaggagttcaggccggagcggtggctggacgaggcgggcgcgttccggccggacagcccgttcaagtaccccatcttccacgccggaccaaggatgtgtctcggcaaggagatggcatacatacagatgaagtccatcgtggcgtgcgtgctcgagcagttcagcctccggtacgccggtggcgacggacacccagggttcgtgctctggtcgactctgcgaatggaaggaggcctgccgatgcaagtgaccaccagggagtaatcatcgtccacttcattgctagagttgctcttgctttgatcccagaaataaagcatgaatggttttcttgttttccctatagatggccaaatgagtcgctcgacacggcctggcctagcacaaccaaagcatggtctgagatcagtcagtcaggccgtgctcgcccactggttgcacctacgacccaatatgacacaggctgtgccatgctggtctgaaggcacaaccagtctaacgtgctcgtccttgcaataagtctattttgcctccctcatttctttgggtcgtgtcttgtatatctagaatacatctattttgcatctctcatctctttgggccgcccattgacgagctacggcctatgggagcgggggatcattgggccgtgccgtgctagatcggcacgtcgtggcgaggaagaggctcaggcacgacaattcatgtgagctccaacaggtacagacattcgccattcgggggaatatagttggccaaaagatccgcagctcgacaacccgacccacaacatggagaggcgtagcccacaacggaaccataatggcatggttttatattttggaaaggaaaaacaatcgaggaagagaggcgattgatctgaaattgtggagattttgaaatattctacccaagttaatttaaaatttagataaaatttgtataaaatttactaaattcataaaattaaaattttcggatgaaataatttcatacccgggaccgaagtttctaaaaccaaaatatcgaaccctgcttaattaacgtggtgttcatgttctgtggtcagtatgggcactaaagtacttcaaatctgtactgtcactaatataagtcggaggaattttataaaaaataaaatcaattcacatgtaattatgtaaacacttcaaagaatataattatatgagattattattacgagatttcatttgaatatagaaatgtaagattttgttgtgagatcttaataaaaggaatataacattataaccatatcgtatatttgataaaaaaaaacagttgaaaagataagaaaatctttatttgaagattttccttgttattaaataccgataagaagcattacttgtcattgatcaaatcatttgacggagagaccgaggaatgggcgcatgatcgtgggaagcgtttccccaagatctaatcgtggtaagcttcctaaagactactacttgcattaatttaaatataattgtgcgtgcaactcgtgtgattttgaaaattcacaagttcatattaggatttgttgagaaggagaaattagtggaattaaatggtgaaatattatgttcgttgagaagagaaagttggtatagaaataaaatgatggacaattctgatttgttaaaaaagagatatagatagagaaatagctacattttactttctccattgcaaaatatagctatactttctagtttgaactaaaaagtagatgcattttgggatggaggaagtaaaaaaaattgaaagctagaaataactatatttgtgatagagtgataccatagtagttgtccgcattacatagtactattttattttttttatatatgactccgttgatttttacatgtcatttgttcatctttcttatttaaaatttatataaatattatttttatatgatttatctttaaaaaatctctaggtttgatttagggggctgcaatataacggaatcctattttcgaacgggatgatcctgtcgacgtttgatgtcgtcattctggtatttgcatagtatggggatcgtcggtgctaggatatacgcgagactgaggtaaaagagacgaagacggggatttttatacaggttcaggctcctgagtggtcaggtaatggccctacatcctgttggccggagccggagttgcttttattcaccataatcacaccagtacaatatgtggggtagcctatctaaccgttgtcgacatggcggtctgaaggtctgactcgtagtcgacaacagggtagccttcctcctcgagctcgcgcccgacgaaatcagagacagtgctagatccctacggccggcctctgaaggtaccggatagggtcgatccaggcgtatctttgatgtcgatatctggcggcttgtcttggcgtatgtaggtttgtatgttgtcccgtgtatttgtgatgggtgtgttgattgtggtggtccgtgtgtccgtgttgatcgtgttgatcgtcctggggggccttgtatttatacccataggtgtcgccttgtccaagtagaactagggaaaccaatgtggatacaatccgagcagtccttgttgattccatgtagaactctggttgtccttccttatatggaactccctccatatctgaagtcagtttccgtataagacatggtatgtggtgggtcctgccgagatgcagtcaactactattaggtatgtggtatccataaccctgacagatcccgagtaggtatcaggtgtgatacctattaggtatcagacgattctacacaacaggatgatcccgagtaggtatcaggtgtgatacctatcaggtatcagacaattctacactcgttttatgtgatacttgcaagtatcatgtgatacttatcaggtatcatgcgatttctaccacgtatcgcgtgatactcgcgaggtatcatgtgaaacctgtcaggtatcagacgatttcaaccatgtatcgcgtgatactcacgaggtatcatgtgatacctgtcatgtatcatacaatttctaccacgtgtcgcgtgatactcgcgaggtatcatgtgatacttgtcagatatcagacgatttctaccatgtatcgcgtgatacttgcgaggtattggatgatacctaccaggtatcaggtgattcctactagatatagctgggcattccgttgggggaggagcaccccgacatgcgcgattggtcccctgcagctgtcccttgtagacgaggacagcgacggcggcggtagcgggggacgggcacggcagcggcgggggacagcaacggcgaccgtaggggatgggcggcatcgacgggggacaggcgcggcggcggcgggggatgggcacgacggcggtggaggcgacgggggacgggcgtggcagcggcgggggacggcgacggcggcgagtgagcaggcctggtgcgtgtatggataagaatcgcgttgtggaggaggagctatcccgttgggagacggtatcctgtcccctagcattcccgttaatttatactttagcatatttacactattgttttataaataaataatcaaatgttattctaaaagttaacaacattatctattttttttaaaaaaaacggaggtattagtagttagcacctccgttataaataacgacacatcatgcatcacttgcaatctccagccacaaaaaaaaaaaaaaatcgacctcttctcgcaagcacttgcgccaatcacagctcacaagtcgcaagacaaaagccccaaatcatctcactgttgccatggaactctccccaatctcagcttctctcttgctcatcctgatcctgctcgcttttctacccctcctctacttcctctacatgcaccaggatcccaagaagaagcctcgcattcatggactcaagtcctaccctgtggtcggcacgctgccgcacatcatcaagaacaagcaccggttccttaagtggtcgaccagcatcatgaagtgcagccccacgaacaccatgtcgtacaaggcgctcggcctcaccggtggcgtcatcaccgccaacccggccaacgtcgagcacattctcaagactaactttgacaactaccccaagggcaagctcaccgtgtccatgctcgaggactttcttggccacggcatcttcaattccgacggcgagcagtggctatggcagcggaaggccgccagctacgagttcaacaagcgctcgctgaggaacttcgtggtcgacaccgtccggttcgagatcgtcaagaggctgcttccgttgctggagcaggcggggctcgatggacggactctggacttgcaagatgtgctcgagcgattcgcgttcgacaacatctgcctcgtggccttcggtgaggacccggcgtgcctcaccaaggagaggatggccgcgccccagagcgcggagttcatgcgcgcgttcaacgacgcgcagaacgccatcttggcccggttcaactcgccggccaaatcgctgtggcgcgtcaagaagctcttcaacatggagcccgagaggcggatgcgagaggcgctcgccacgatccacggcttcgctgagcggatcgtccgggagcgcagggagagaggggaggccgggctggctcgcggtgacgacttcctgtcgcggttcgctgcgagcggcgagcacagcgacgagagtctccgcgacgtggtcaccaacttcgtcctcgccggccgcgacacgacgtcgtcggcgctgacctggttcttctggattgtctccggccggccggacgtcgaggacagggtcgtgcgcgagatccgcgcggtgcgcgcgtcgagcgggagcacggacgcgacgttcagcttcgacgagctgcgcgagaagcactacctccatgccgccatcaccgagtccatgaggctatacccacccgtggccatcgacacgcacagctgcaaggaggacgacttcctgccggacggcacgttcgtggggaaagggtggctagtgatgtacagcgcgtatgccatggggcgtatggagggcatctggggcgcggactgcgaggagtacaggccggaacggtggctggacgaggcgggcgcgttccggccggagagcacgttcaagtacccggtgttcaacgccgggcctcggatctgcatcggcaaggagatggcctacatacaaatgaagtcaatcgtcgcttgtgtgctcgagaagttcagtctccggtacgccagcgacgccaacgagcgccctcggtccgtgctctcgctgacgctgcgtatgaagtggggcttgccgatgaaagtgaccatcaggaagtaaccaacaagagtgctctcgcgcctcggtggcctcgccttcccggacactcgatcaatgcgggcaagaatttgggacgtgtgtccatctcggtaggccgaatcggtgagcgggcttatgaaagaatccttttaagtcccttatgtttgttgctaacttgttttggcgttgatagattctggcactgctaatcttggattgtagcccaagatgagatgcctcccatacatcacagctctcacatggtactattgggaaaaagtttacttcagatccctcatctcattgtcgagtttcagaatcgtctctaaaccagaatatcagatataacgcatcactatttttgcaaaatcgggtcccaaagtagtgttgaggacggttttggataaaacaaaaattaaaataaataaataaaaaccacgaaaatgtaagtgaaacattatattcctccttgtatatcttcccatcctccggtttctctccctaccgccccatcctcaccggccggtcaccgccgctgcggccttcctgcagctgctaccactgaagatcatcgataatgcggcagatgtcgaggtcaagctcccattcacaggccttgatgtcgaggtcaagcgtcaaaagagtctcttgaggctcttgacaagcagagaaggaagtttttgtgggcggggggagaagccttgacgggtggaaaatgcaaaatcaactggacccgaacctgcctacccactggttccggaggtctaggaatcctaaaccttgagaagtttgtaagagctttgcgcctccgatggctttggcaggaatggaagtcaccggagaaagcatgggtgggttctggtacaccgtgcgatgacaccgataagctccttttcgcggcagcgacatccataactatcggaaatggggcgacggtgagtttttgggagtcagcctggtggcaggggagaaggatgaaagatgtggcaccgctagtctacgcggtctccaagaaaaagaatagtacccctccaacatgccttgcaatcagatcaatggctgctcgatctgggattaccaacggacgtgggctggacaatagagctgattgaccaacttgtcacggtttggagcgccatccagacaatagagttgacagaacatgaggacgaccaaatatcttggaagctcactagccnnnnnnnnnnnnnnnnnnnnnnnnnnnnnaatgcacaactacttggaacaacggccaacaacttcaacaacctaatttggaagccctgggctcctcgcaaatgcaaaaccttcgcctggctggtcattcagaatagagtctggacctctgatagactatgtactcggggatgatcaaatagatccatatgtcccttatgtcgtcgggtccaggagacggctctacacctcctcgcaggctgctgctacacaaagagaatatgggcaaccctagcggaatggacggcgtgcaacaatattcaccccaaccattgacggcaggcttcgtcggtgttagaatggtgggatcaaaccacaagtgtaaaagaggcacccaaaaaggctctacgctccctaacgctcctagtcgcctggttgatctggaatgaaagaaatcgcagaatattccagcataaggagctcccaccgagtggtcttctgacaaaaatcaaggacgaggccgagtggtcttctgagaaattggcttgttccttagttgactagggccaaaggtcctgagttttttcttttccttttcactgtacagttttctccttctatattcaatgaaattggcggctcgccgattcgttaaaaaaaaaaatcacgggccagtttcttgctcctcgtccagcaccgccctatcgggcaagggtggcagcctgcaggtactacaatagttggagctcggcacagggctatgcattggctgaggtggagtccatgcgggcgtcaaggccgccaccatcgccgctagcacatttttgttgtcaagcttcgccgctccccaaatggaggaaagcgtcgatgcggtccctgtctcaccagtcggagttgagaaaaccaaaaaaataaaaatagtttgatttattttgagatacgacatatctaagttgtgttatgttttttaggttggtttatctccggttaaaagacaaaaggaaataaaattcatcggaaatgatgatttatgacgtcttatcttaagcaataatttatgacatactccctttgtttaaaaaagaatcaacttctgataatgaatatagataactgtcagttcagaattattctagaagttctttttagcggaggatgtaccccactgccgcaatccaaattacttacgccacttgcaaaatgacaaattacatttactctttataaatgacacaatattacgggaatgggcccgcgcgctggctgcttaactcgctcagccgccggcccccccccatccgcgtgcgattagcacaagctaattacgattgttactgttaaataccataattaaaaaatacatgtataatttaaaattttgagttatcagttttaaaaatttgggttaaaacttttgaattttgatatgaaagttttcaactagatatgaaatttttttaattttgagttggaagttttgaatttcaataccaaagttttaaaatttgagatgaaaatttttaattgagttgaatgtttctgaaatttgaattggatgttttcaaaaattgagttgaaactttcgaattttgacttgaaagtttttgaattttgagttgaaagtttttgaaatgtgagttgaaagttttcaaatttgagttaaaagttttcaaattttgagttgaaagtttttaaatttgacttgaaagtttttaaatctgagttgaaagtttttcaaatttgagatggtaagttgaaagttttcaaaatttgacttaaaaaattcaaattttgagttgaaagttatcaaatttagggtgaaagttttcaaaatttgacttcatgtatagatttcttatcaatctgttataaaaaaacaaatcttatcttaattattatcattatctaaaactaaccgtattagttagcatgtatccaaaaaaaatcccggaaaaaataaacacagaaagctcaccgagtgacaagggcccgccacgtctctaagtcgctagtacgcgcgaattagcaaaaccgcaatattactccatcactcgaactctgatccgaaaccaaaaaatccacctcttttcgcaagcacttgcgccactcgcaagtcgcaagccaaaaatcacctcactgtttccatggaactctcctcaatctcagcttctctcctcctcatcctccctcttctaccgcttctctacttcctctacctgcaccaggaccccaagaagcagcctcgtgcccatggactcaagtcctaccctgtcgttggcactctgccgcacttcatcaagcacaagaatcacatcctcgagtggtcggccggcgtcctaaagcgcagccccatgcacaccatgtcgttcaaggcgcttggcctcaccggcggcgtctttacggccaacccggccaacgtcgaacacatgctcaagactaactttggtaactatgtcaagggtgaggccatcatcaccatgctcgaggacttccttggccgcggcatcttcaactccgacggcgagaagtggctgtggcaacggaaggccaccagctacgagttcagcaagcgcacgctgaggaacttcgtggtggacaccgttcagttcgaggtcatcgagaggcttctgccgctgctggagcgagcgggacgcgacggccggacgctggacgtgcagagcgtgctcgagcgcttcgcgttcgacaacatctgccgtgtggtgttcgacgaggacccggcgtgcctggccaaggacagcgtggcctcgccccacatcgcggagttcatgggcgcgtgcaacgacgcgcagaacgccatcttggcccggttcaattcgccgatcaagtcactgtggcgagtcaagaggctattcaacatagagtcggaaaggcggttgcgggaggcgctcgccacgatccatgcgtacaccgaccggatcatccgggagcgcagggagagaggggaggcacgcggtgacgacttcctgtcgcgctttgccgcgggcgacaagcacagcgacgaaagcctccacgacgtgatcaccaacctcgtcctcgccgggcgcgagacaacggcgtcggcgctaacctggtttttctggttggtatccggccgtcccgatgttgaggacaatatagtgcgcgagatccgcgcggtacggcgtgcgtcctcgagcaacggggtcacaagcggcgcggcgttcagcccccatgagctgcgcgacatgcactacctgcacgcggccatcaccgagtccatgcggctttacccgccggtgtccctcgacacgtacgtctgcaaggaggaagacttccttccggacggcacgttcgtcgggaaaggatggcaggtgacgtactgcgcgtacgccatggcgagggtggaggacatctggggcacggactgcgaggagttcaggccggagcggtggctggacgaggcgggcgtgttccggccggagagctcgttcaagtacccggtgttccacggcgggccgaggatgtgcctcggcaaggagatagcctacatacagatgaagtccatcgtgtcgtgcgtgttcgacaggttcacactccggtacaccggcggcgaggggcatccggggctcgtcacctcgctggcgctgcgcatggagggtggcttgccgatgcaagtactcctaaccaatagggggcaagcagtgtcgtgctaggccagctgttctcgacgacttcattagtcctgcttttgttgcgtcgctctcggctctcgcctgttcttctactgttagtccttttatcttctccgaactacgaattgttcacatttctgggagctagcatgagttgcatactgctgtgcttggctctgccatactaatactagtggattttaaacctcgagggaatattttcttattatttctatgtcacttaagtagttataaaaaaaataaaaagtaacaagatagattaacctgtgatatattactttacaaacatataagctaaaattaaaattttacaagttataataaaaacaaattaaactatatggtgaactaattgtcggtattagttccgagattgagatgttcaccgagtgggccggaaaggcactcagacggccacaccctctatttctccaattacgtgttcaactgtcacatctcatgcccctgtatggctgtattcatcgccggatcgccccgtcacgctcaatagtcaatgttattgtttacgagtgaccagtcacacatacagatttcgcgttaacagaatcaccagctaatgacgttattcgctcggtctcaaaattaattaagcactttgtttgatattgcttgaatttttattacgaactttttataattgtttgtttaagggttttttttttctgaaatgttttttttccaaatccattattgtttaataaacatgttctatttgcacaataaagctcatgccctctaattagttagctttttgttgcatacttattgcagtctaatcatataagaactaaaaaatgatgcaatgcttatgctaatgggtaatacctttatatatcaacatttttacaaatatgaatcaacttttgtgtaaacatcgatctaatactaaaataggttcctgttgtttatttattcatggattgaggggattcaaaactatgttaaatacatatacttgtagagtccaattctagtgtgcagtgtaggagacaacccataagtgtacgaggctagcgagaacacaattattggatggctaaatataactacaaatatatgcggttatgttgagaggaacaaatatatgtggaaacttaagatgccgcttaagattaagatctttatgtggtacttgtttaaggggttgtgttgaccaaggataatttggcgagacggaattagaatggtagcttaaggtgttgcttttgtatgaaaaatgaaactattcaatatctcttcatagattgtcattatgcaaaattcatatggagagcagttcagttttcttttggttttaatcttccaactagtatatttcatatatttgatgggtggcttttgggggttgacaagaaaaagagtaaactgatactggttggagcttcttccatttgttgggctctatggttgagtagaaatgatttggtttttaataaatcaccatctatttcatatatgcaggtaattttcagagcaacgcactggctccggttttgggcacaactacaaaggtgtgaggatgatggggagttcctaaaggttgcatgctgcaagttggagtcgatggttatgcaattatttgccaattatggatggaggttcacaaatagacttcaataaatgtgttctccttattttggcttggtttcctctgtttttgtttggtgtgtcctatttagctgaactacgctcttttctggattgctacaatgtaataattggctgtagctctttttaagcaaaggctgggatgttaaattccattatctaaaaaaatataactacaaacatatcattatctggaatgagctttttatgattgttcccataatttcatttttttataaaatttttagttaaatattaggaattatgtaatcgaaagtaaccaacccacaaatattttgtttagctagcctgcattgggcatgaattagttacaattagattttataatcgtttatctgaagcctataatgtctatccacttgtcataattatcacatattctatgaagttctaaaagaccctagaaaatatgtgtttcaaatatcagataaattatttgaaagctttttgcatttgtagcatggaatttgtttggtcactatacaatccacttgcaccttctactcaatatatgccctatggtgacaaaaagtaaggactagctggagtcaataggactcctcttatcctctattgatgcactatttttatctcattaaaactggtctactcagtgtctccctgctttgctttctctctcattctagttcgcgcaagaaaatttttgggttccaaagtctaaacaatacattgtaaattttttctgtctagtagatgacaattgtttggtgataatggttttcttgcacctccaagtcatcatgttgcatggttgtaaaacttgtatatatgctgagacacggagattaccatatgattcattgtagtagtgtttacagtttcgatcgtgtttagttaatctttcttttcatgtctcggtgtatcgtaacacataaatggattccaaacttaattcttcaagtgaatatgtgcatggtgacatgtttatagaaagttaatgtccatatatatggatgataagatctttttaaaggtttgtgcacagagaaaacatacttttttttcatacccgtaaggtatggaatataagcacatagccaccggcaagtatatatatatatatatatgtaccatatactaaaatgctattaaataccgtctaataaagtaatttaaatgttacatagaatatattctagagcacttatgtagaagatcgtttggcactcttcgattatttgagcacattttagaaaactcatgaattcgattgtttcctctaactggcaaaactgcatttttcgatcaatcacaaataaagatataaaattataattgttatggtagctagagtcaaaagccgaccttaaccaaatatgtcattctggatatgtattggcagtgaaaacataaagtaaacatcgattgtgccaatatagcccgaggggcattgtatgtatgtacatacgtgcaccatcccaacatccacccctctgccctcattcatgccttctccccatgtattgtctctcatgttttcatcatatattaatcaggaaccctaatttattataatctttttaaaataaataactatttttattgaggacccatattaactatatttgaacttctaaaataaatattgtattttttgttatattctgactttttttcatatcatttaaataattattaaaaatatgaaaaaaatcaatgatatataccttacctgttgaaaatatttttggtgaattttctttgcatctatgtataatttaggatttattactattaaaataccaaccaaataattttagaaaattccaaaatgatttgagaatgttaatcttacacaaattaaaatttaaattggatctacttaaaaaaacacaactaaattacatggtttgcatttttacatagttcaaactaccgttgtatatttgttaagtaatatttgataccataaagtatatagtttgatgtgattatttttgaaaaattgttgtggagttaattaatacatgtggatgtcatcttacgcaatgtattttgtgctaaaatatagtgaatataagacatccatgtaaaatcataataaaataaatgataattatgtatttttattagtaagatgaataatcaaacacatgctcaaaagtcaatagcggaaaaaagtaatataaaaatatttaggggtatcctaggttaaaaaataacagtagggtgaatggtaagaaaaaaaagggatgagtacgtactacctgcctacgtacgtacgtgtgaggtgttaagtaatatttgatacataaagtatatagtttgatgtgattatttttgaaaaattgttgcggagttaattaatacatgtggatgtcatctgccgcaatgtattttgtgctaaaatatagcgaatataagacatccatgtaaaatcataataaaataaatgataattacatatttttattagtaagatgaataatcaaacacatgctcaaaagtcaatagcggaaaaaagtaatataaaaatatttaggggtatcctaggtcaaaaaataacagtagggtgaatgggaagaaaaaaaaaaggcgatgagtacgtactacctgcctacatacgtacgtgtgagggagggtggaatatgtacgtgtactgagggagggagggaagagtagatgtacgggcagggactggagaggaagggataaactactggttttaatctaatctaatgctgtaaaataatggatccaccagtttaaatgaaaattgagggttagatgtttctcgtctattaaaacgccacgtggcggcttaggagtgtttataggggtgccacgtggcagtttaggagcgtttataggaagtttaatggacttttagtatataatagatagatagatagatagataatagatagatagatagatagatagaagatagtcaaaactttgtctaaaaaaaatcataaattaattctagtgcttataaactaaaacaatttatattctttacctgcaccaccaacaatacaacttttacatactccctccgttttttaatagatgacgccg

SEQ ID NO: 16171 - DNA, 10958 bp, Oryza sativa
ggccaatgggccttaatgatcctaatataaagtctccacaaatatattttgagttgatcaaaagacgtttttttttttcgattttgctatatctcactcgaaagattttttcttatctctcactcgattttctcactcaaatttacagtgtattttcttgtaagttacagtgtaatttatgaaacttacactgtatgtaacttttgtaagttacactgtaatttttgaatcttcacatgtaaattttaaattttgtatttgatttggtctttttcttgaggatatggtaatttaatgttcattatggtatttcttaattgcttttttctttttattatatctatcggattttaatacaaagattaaaaatctgtgtgatacgattataaaaatctttcgaaagatgtataggtactcccttttttttttgacagagaattcatcaagacgttgttgggctaaagcctggtagaaaaaaaggaataagttcacccgaggtccctcaacttaacagcgagatttttcgaagtcccttaaccacaaaaccagaaatctccacccctaaactatacaaaaccgttcactcaaggtccctaggcagtatatatgggtggtttcgctgacatggcatcctagtcagacaaaatttttttttaaaagtaagtaggacctacatgtcagccgcacgtttttttttcttgtccttctcttctcttttctcgcttccctcttcttcttcagtgaggaggccggtggcgggcggagtggcgatggcggcgtgcttccgctgcgcgcagtcggcggcggcggcgtccggccccgcggggcccaaccgccttcctcccgcgggacggcgctgtccatcgccgtggtgcacgacgccatggccgcctcgaggctccgcggcagtggcggggcggtccaagtcgtcatccggacttctggaggcggaacgtgaacactgcggcgtagtcgtggatgacggtggcgtcgttggcacgagcagcggtacggtccacggcgaggatctcctcctccgccatgcttctgggcacctggccgacgaacagccacatcctctcgccgtcatcatcctccgcatctccggtcattaccgcgatttctctctctctctctcccgtctcttttccttttctgatggctatgcaacctcctgtccgtcctctcctcgtttttgcctgcgcctttggcctttctatatcggacgagcactaaccactgattgattgattgatcagtatcagtgtcttgagtataagttaattaatcgatgagtagtaccaactaccaagtcttgatctcgagtagcagtgaatgtgatcgaatcatctgattgagcaaaaagcagcagcaacattgatgcctccgcctcgccgtccagcgcgacgacaatgtcgtgctcggcgccggactccaggaaccgcgccctcgtggaccagcacccacacccgacgaggagacactggccttccgcgtccgtcactgactcctctggtggcagcgcgggacgaggcggttccgcgccgccggcgaccgccgcatcgacctggcgtgggacctctcacccgcgcacacttcccggtctcgggttcgcctgagccttcctttgggtgtagccgacgagccgccgtcgcgccgtggtaccgccccgcagccacagcagctgtgcggctggaacagcggtggtggccccttctcctcctctttctcccccggtgagtatagatggacagactacatcggcgtcgtgcgtgcatgcatgctgcattcttggcgtattagttttgtgcatggatcttacgaaggtcgggggaggacggcgatgatggtgtgccacgacgtcgagatgccgttcctgcgggggatcaacgtgaaccggccggcaccagcggcggagacgacgacagtgaggggggcaactgtagcgaggaggaagaggagcccagcgcgacctcccccaacagcacgctctccagccggcagcgacgacgagaactgcggcggcggcggtggatctcgtgtaccgcggctggggcagggatgggagcagcagcagtagggagaagagaagagaagagaagagagaagagagaaaggagaagaaaataagatatgcagctgacatgtggaccccacatgctttgctaactaggatgtcacgtcagcgaaaccacccatatatactgcctagggaccttgagtgaacggttttgtatagtttaggggtggagatttctggttttgtggttaaggggcctaaaaaaatctcgctgttaagttgagaaacctccggtgaacttattccaaaaaaaagacaggttgaagcccatgggctggtttttctagcttgcagcgatgcacgctggttgccacatgcggatgtacaatacataggttgttgcaacgttcgcgggccgcgaacgtccacgtactagacgcccctcaaatcagtctctatcataagaaagaaaaatgaatttaggatatcgtaataagaaaaataaataaatttgactaaatataacccatggtgacgtatcgactatcaattaattaagcaaacggcttgcaacctctgattgccagctaaaaaaatccacgatatattcttgtcctaagtacagtgacttatgacctctaatcccaactacaggtctacagcgatcaaatcacttgcgccactagcaaaattgacgaactggatttactgtttataaatgaaaaccacttcgtcgctcactcgcttgtagtctccagccacacaaccgtaaaggtccacacctcttctcgcaaccacttgagccactcgcaagtctcaagccaaaatcatatcacagtcgccatggaactctcctcaacctcagcttctctcctgctcatcctcctgctcaccctcgtctacttcctctacctgcaccaggatcccaagaagaagcctcgcacccatggactcaagtcctaccccgtggtcggcacgctgccgcatttcatcaataacaaggaccgtttccttgagtggtcgaccggcgtcatgaagcgcagccccacgcacaccatgtcgttcaaggagctcggactcaccggcggcgtcatcaccgccaacccggccaacgtcgagcacattctcaaggctaactttggtaactaccccaagggcgagcttgccgtgtccttgctcgaggattttcttggccacggcatcttcaattccgacggcgaacagtggctatggcagcggaaggccgccagttacgagttcaacaagcgctcgctgaggaacttcgtggtggacaccgtccggttcgaggtcgtcgagaggctgctgccgctgctcgagtatgcggggcgccacggacggacgctggacgtgcaagacgtgcttgagcgcttcgcgttcgacaacatctgccgcgtggccttcgatgaggacccggcgtgcctcaccgaggagagcatggccgcgccccagagcgcggagttcatgcgcgcgttcaacgacgcgcagaacgccatcttggaccggttcaactcgccggccaagtcgctgtggcgcatcaagaagctcttcaacatggagcccgagaggcggatgagggattcacttgccacgatccacggctacgcggagcggatcgtccgggagcgcagggagagaagggaggcccggctggagcgccgcgacgacttcctgtcgcgcttcgccgcgagcggcgagcacagcgacgagagcctccgcgacgtggtcaccaacttcatcctcgccggccgcgacacgacgtcttcggcgctgacctggttcttctggctactctccggccggcccgacgtggaagacaagatcgtgcgcgagatccgcgcggtgagacagtcgtcggccggcagcgagggaacgcgtggcgcgacgttcagcttggacgagctgagggacatgcagtacctccacgcggccatcaccgagtccatgcgtctgtatccgccggtacccttcgacacgcacagctgcaaggaggaggagttcctgccggacggcacgttcgcggggaaagggtggctggtgacgtactgcgcatacgccatggggcgcgtggaggacatctggggcgcggactgcgaggagttcaggccggagcggtggctggacgaggcgggcgcgttccggccggagagcacgttcaagtacccggtgttccacgcggggccgaggatgtgcctaggcaaggagatggcctacatacagatgaagtccatcgtggcgtgcgtgctcgagcagttcagcctccggtacgccggcgacgccaaggggcaccctgggctcgtggtcgcgcttacgctgcggatggagggtggcttgccgatgaaagtgacaatcagggagtaatcaaacaagcgtgatgctaggctagctggacttgtcgactccatactttatgtgtgtatcattgctctcgcttgtttggagaaataaaatagaactggtgtcgtgctccggttttttacccgaatggtgaatggcccacacacagccacgcttttcgggattcacgtgagttctgcggctgtgtttggcgcaccgagcgaaatgagatgggcacgagttgtcggatataggattgcagatttgcaggagaagctatttgcacgagttgatgggctgcccatggcgcgcccacatcgagcaaatttgaatacttcgtctcagccgaaaagtatgccgtggcggagcggtgttggaactggagacaaggccgagcaactgatacaacccctggtgctcggtgttcatcggttcatcctctcgccttccccgctgatcaatgatgagtgggcaagaatctggaacgtgtccaactcggttggccgaatcggtgagcggacttgcttttttttccgaatgcgcaaaagggtgagcggacttgtcttttttgcgaacacacaaagatgagcgaacttgattttttttcttgattccactgtggcgtcaagtttgccccatcacacggactaccttttgtctttgtttgtcgctatggcctcgatagaatctgctaagagcaaggtcaataatatagcccgttgttggctttaaaaaccagccatgtcatatatagtaaacaatataactaatgtctataataaaaatactataacacgaatattttattgtttcatgggacccaccaccttctcctaccggctacctcccattctctttctctctctttctcccatcagttcatgtcttctcttctttgtttggttcttgagcaacagagatggcggcggggtggaaaatagcggcggcggacgcaggagatggcggcggccgtgcggcgggcgttggagacggcggcggctgggccgagcggcggaggcggaagagggcggcggccgtgcggtgggcgtcggagacgacggtggccgggccgcgcggcggaggcggaagagagcggtgggcgtcggagatggcgtcagccgtgcaggcgaggggtgacggggaccgtgcgacggatgtgggagaccgcggcggccgtgcgtcgacgccggcgaggctgagggcggtggtccagtggccgcaggagttggcgacgaaggcaggcagcgcaagcatctaggcgagccccacgaactcctcgaccggcacgtgcagtccggcgacaaattagtcgtcggctcactctctctctctctctctcttcccctctctcctccagatcatcacaaaatcttatgtggaagcagtaccgccggttattgtacctgctctaaggggataagatgcaggtaaagctaatgggcggcgcccgcccctcccccctatacggctatacactccttcctccttcccttcttctcttcctattacagtacactataaatttttttttaaaaaaaataaaagttggaaaaatttatgtatagaaatactatatataaaaaattgaatttaaattcaaatttgaaacaggtatgcagacttttgacttataaactttgggtctataaactaatatttgaattcaaattcaaatttgaatcgggtatgtaaacttttgacttataaactttgggtctataaactttaggtgtatagaaatactatatatagaaaatatttaaatttaaattcaaatttaaaacagatatgtaaacttttgacttataaactttgggtctataaactttagatgtatagaaatactatatataaaaatatttcaatttaaattcaaatttgaatcggatatataaacttttgacttataaactttgggtctctaaactttagatgtgtaaacttgaggtgtacaaacttttggtgcacaaatttactaaaataggaaagtaatgcggtaccaaaaaagaaaccaggtggagggaggagggaccgaaccctgatcgctaggggcgatcgatcgccccttagcaatctcgataagatgcctcccacatcacagctcttagggcaacaacaatgtatatagcaaaagtagtccatatagatagatccacttatacaaactttaactattgtaacattcacaatgtatatggatagcaaatagtagtaggaggagagaagaggtagagacaaataatatattttattctctatgggcagcccatatgcttatgagtagcttttgttatttctttgctatggactagttccacaatgttactaggtggctgaaacaaatattgtattgcttatggacacttttagactatattgtggatgcccttacagaatggtaacaacccgacagtgtccgtcacagcgtgggcctaagaccaaatagaaatttcatcaaataataaatacaccaaattatccttatttatgcatccaaattaacacagggagacccatacgtggttcgaaattctaatacacatatagtttccatgcgagaaaattgtatatctaccatcgtataaaatgggattcgctcaaataccattgtttaaatgggtttcgctggaataccatcctcaaccaaggtgtctttgttcaaataccatcccagacgaaaatgccccatagttcttcttcctctctccttccatcccatcagctgaatagttcgccggcgaccaccaccggctccactgcctcaccgccgtcgctcgtgtcatcttggacatcgtcgcgcactgcagccccgaccagactcaccagccgccatcacgtgctcgcgtggtctcggctggccaccgtcatgcgccgccgcccaaccccgacttgtcgtcctcgccggtcgtggtcgcggtcggtgctgccgccgccgcgacgagagagagagagagggggggaggagacgccccgactcgtcggccgccgtcacgcgccgcctcgcttgtgtcgtctctgccggctgccatcgcacgccgccaccctgctccgacttgccagccaatgacgacatgagcgacggaccgccggcgacctattcagccattggagggagagagggaggaagaagaatagctaaggggcattttcgtctgggatggtatttgagcaaagacatcttggttgaggatgacattccagcgaagcccatttaagcaatggtatttgagcgaatcccatcttatgcgatgatagatacacaattttctctttgcatgcaccgcaaactgctatctatttagcactgccgcattccaaagtacacactcctttcttcccttttagtagcaccttctcttttcatatgaaaagtttgagattttgaattgattttttgattcaaaataaaagtttgatgtcacagttgtatgatttgactataaagtatttgagtttttaaatgaaagtttgattttgagttgaaatttttgtaattcaaaataaaagttatggggccatggtcgaaagtttcgtatgatttgagttgaaatttatattatctgagccgaaagttttgtgaaaatgctaataaaaggaaaaggagtttataatgggaacatgcaaacaatgtgtagccacatgcaatcctatatactccttccataaaaaaaatgaatctagaattggatgtgacttatcctattacaacgaatatggtcataagtctagttataggtttattttttatgggatagagggagtagcgcaagggaggaagatatacttaaaagtttattagccgtgcaatgtagatcttgaaagaagacattaatgagatgatcaacaattgttatcttgttatacatggtgaaactattaatttgacatatgcttcatatcaaactgttatttcggtttatattcacgccctcgtgatatatgctcaatgggaagtgactggcgtgtgctttgtgtcacgcatagaaaaatcaatatttttttaagtacataagccaaacggaaaatgaatggaattgacctaagggaacattgaaaagctaagcacgttagagtagttatttacctgcaggatttttttatacttgtttgtgcccacaagttaatgaaatacatctatactttttaaacatatttttaaacatatattgccatgtgattatatgtaattgatttttggttaagatttattgtgtccacacaatatcttataattgtactttccgttaaatacatttgatgtacaacatgaattgaattaagctcaaatgcatagattgctaatataaaaatttgaaaattattaaataaaataaaattgcatgtagcgtttagcatgggtatattactagtcatccaaaagaaaaaacaaattcactcacgtgcactcctttgtaattggcgggaatatattctagttacttgaggggatgacccctcgtataccttttctcctaaatgcactgctaataggtttttaaaaaaaatctttaaaaagtaacgatgtagagtatattgacatctatgatgcatacaccaaaaaataatcttaaattcgatctacaccttgaaaaaaaaagataataatctccaatttctacagcttcagaaaataatctccaattttcatgattagcaattgttgtatatatttcttcctcttcatccgatagtttgctaggaccgtcttcttgaaaattaaattgtccattaatgatatatatataatgaattgctggacgaacaggtggtgtgaattttggtggtatggaggagaagataatcctgtatcttccatgtccaagtctcctgcagacatctttcacagcgcttcctaaatcaaattgaaggatctgatcgagggttgcatagaaggaattcacaagaccatgatctataatagtttggagagatatttcttcatggttgtatgtgggtaggttccggaatctttggagatttatctcagctttgagaaccaggaatctataggatgggtcagagattgcctgatcatctagccttaagagagggagcatatatatgattactcgtatggctgggtttctttctcttccttctaagagatcaaagaaataatcttggagtccaaggaatattttcatttgtctctccttaaacttttgccaaacaagatcgaggatgtcttgcccaaagcaagataaagtttgctccgtcttgaagcttaatctaggttggagattttcgtatgtggtactcatgggattttggcttttaagtttcttttggcaagaatctttgtaggcacaagatctacatggtgcttttggctgggtccggagtatatattgtggaaggaatgaattgggatgattatgcagtatgtatggtgtttggggaatggtatcatgcctttttgtggatgatgatggtttattatgtggaaaagattgcaataggttattgatatttatgtggaaagcaaccatgctcaaagcaagatctgttgagatcaaaatcttatctgagaataccttggtattcttatctgttgccatagattgttcaacttccatgggaagtttatcttggccatcacgggatttctcctcgcgataatctagtaacctctcctcatgatgagggatatcttgtagtttagcccttttttctgttatcttttgatctgagggcacgaaatttttgaaataatatgccaggccatttaaggcatgagctttttcttttttgttttttgcctgccacaagaggtttaataacccttgttgtagctctgttactctgaaattgtgattaagtcgttctccatggcctctgggcagttggggcagtctccatgaactcatattcgtgaaccattcagacttttgtgatgccatttccctgcatatatattcaaaatttttagtagcttttaataaatatctatcttcctatgatgtcttacctggcaagtccatagattttggaagatatgatgggaaggaattgtcatgtagatatattgtattcacaacttgttctcttttggtctgaacaagctggtcaagaatctcatctgtgttagacgaaaatcttaggctcacctgtttgcccattatctcaaattgaatatcttcgtttgtgacaaggaagggacgaatgagtgataaaaacggtgttcctaaaataacatcttgcttaagatttttaacgagtagaaaagatgttttaatgcaaacttcagatatgcaaatatagatttcagggatttgatattctactgttaaaagtcctccatctgccccacgaattctgtgggcggctttacagaaatatttatgagggataataccttctcgaatgcaattgacatcagcaccataatcaattaaagtgatatactgaaagtaggatccgtctataaaacgatacataacttctgtgtaccatttttgcttcatatatttttgaatggttccaacaacctgatcatcttcttgaattggttcgtccttttcttccatatggaatccttcttttaattctaacatgtatagacgctttcttatttcttctcaat

SEQ ID NO: 16172 - DNA, 607 bp, Oryza sativa
gcccaacaatattattatttcattatagcatagactatatgacatcactgtcagtccgcatgttgtgttttgtaacaactagcaattgtatgcttttcttgtcaggaacctttctctaacaagtattaacgaaacaatgaaccaaaataacacttttgacactcctctcatgaagacgttggtaatacttttaacaagtattactgtgtacttgtactgactatgattattctgttcaaatttgaaatgtgcagaagctaaaagtgtctttcaacgagatgaagcttcaagttgaatcaactcgatctcagtgggaggaagacttgaggaggctaggtgagtaatggattcagaaatgttttagaacattttgtcctttgatcgctaaacatttgcttaatattgcagaaagttattttgaggctcataatcacaatgcttaccacaagttactcgaggaaaatcgtaagctgtacaatcaagttcaagatcttaaaggtaatatgcgaataaattaacttcatttcactaacagtgagatatttgtactgataaattgaaacatcttttaggtagcattcgtgtatattgtagagtgaaacctttc

SEQ ID NO: 16173 - DNA, 769 bp, Oryza sativa
  unsure (1)..(769): unsure at all n locations
ctcggacaatgaacaaggggtaaccacattggaggaggcaccaacaccatccattgaattcatagtcaattcccctaaatttcctgagaaaggtaaacttttgagaatatcagacaccaatgcacttttacccagtttaaggacaagagtagagcacctgccaaatgattaattgggtgtaaaatcaagtgccctgacccaggaaaatttagcatcctccttgcatgcatgaaagcggtcatccataaaccttgaattaactgcaggcccagaaattgcaggtgtattcttggtgcataattgagctgaaacaaaaattagaagtaaacagtatattnnttgtgcaggatataannnaattgtgattacacanatataggtagaagnaatatggntgccacttctgnannaatcgtagtccaagaggntatagtacaacaatttagccgctaatggtaatgttgtttggcataggaatgctactctttttttagattgttttactccaccatttgtaaaatctactcaaatatgtcaagtaaataaaagtttcatgattttgtaagcgtaaagaagtaaaaattaactaaatcttatattgtaaaaaagctcttgcgatcatttgggtagctaggtcacatttaataaaacgagtaagatctaaatcaacataatctttgaaaaaagttgagaactactccctccgggtgataatacttgtcgttttggacaagggcacggtctccaaaaaacaattttgaccattatt

SEQ ID NO: 16174 - DNA, 966 bp, Oryza sativa
aatgccatagtatggagtatctattttcatatattgtggcataatactttaattgcttaactgtgtaagtaatgcatggtttatcctatcatatcatatggattagccccatgatgcattctgccatatggcacatgctttctcagggcaaaagcccccgttttttttttctacaatagaagtgcagcaggacattcgattttccctcctttttcaaatacacatctttagagcactcaaattgtgttcccaaatacctcattctacagttttgagatgaccttttatcatctttttttgtggtatatccatccatccctttacctatttccagtgttgtttataattatggactagagcacacacaccatccgaaaaacaatgagatatcagatatattaaggaattgagggaatacaagctcgtggtttcaccaaagttgcacttaaatagctgactttgacatactttttgaacagctgccggactggaacattatgtggagtctctaatgaaaagagcagatgtggagtttaatgtatggattcttctcctgtgtcttatactaatttaagaagccacctctctaattttgctaaatccacaatcaccatttttatttggatgtgggggatcttggcacaatgtccaaactccaatcagccccccctcccccccacccacccaaagtacttaagactgaagtgaaactgcagcctgagtttgattgtagttgacatgaatattgtcaagctttgaatttgttatttgtggaaaaatcagtgtggtttgcttccgtgtttccttgtaggtggttgtcacccaaatgaatgggaatgattactcatcgaactctgtccatgcatttcatatcggaaaaatgagaataaagcttcgaaaaggatggtctacaaaagcaagagagtcatactcgaccacaatgaaggtacgcgtgtagtttaaata

SEQ ID NO: 16175 - DNA, 26111 bp, Oryza sativa
cctggaccaggtcatttaatggtgccatagttgttaccacaagggcgtcaaaatatagactaagccattgaggcgtatgcacttcagttgagttttctacacatttggatataccagctatcactaaagaaattaggaatatgaaactttcaggaacaacaaaaatagaaaagaagtttgcagaatttatccaatcttgttctcagggctctgtttttttatggtgcatgctatgaatcacatcttttttcatgaaaagatgtgcatagccgcataggattttgttagacttgctgaagctgatagagaacaaaaacattccaatccaagcatttctgcaagtctgcattctaagagtatttttttgtaacttatgttttccatggtcaatcttcagttgtgtgggagccgtggtgggggtaatgctgcagctacggcagttttctggcaggcaaggaaaggcctgtcctacaccttagcttttgaaacggacagggataggaacgcagcaatcatgcttgctcgtaaatttgcctcaaattgcaatgtaagtgcttttgccttaaaattgcattttgtttctaacgataatgtggtcaagaatccgtttcattcacttgatgttaggaagcaagttattttatacccttttgtttgctcaatgcagattacgctcactggtccaggtgatgaagttcatgctggtagctgaatttacagtgttcacggtgtgacagcaggagtatacatgtaggctgtgaattgtgtactgtgtcagtttgtgttttcgagagtagaggttgtacactaggctttcctctttcagcatacattctcaaggcaattctttttatttgcctgccagcagctgtttgtggtgttcgtcaaacatgctgtgcaaaatgatgattattcttgagcattatatctattaacgttcgaaaagtgatagtttgcttagaaggagcttcccttgaataatcaagaaatgtacatataatcacttccatctatggtgcgtaactggtcgcacgaagtcagtggtgattgtgttgtattcaaaggatcaactattgtgttatctggcaagtgattttaatagggcgttttgccacagtaattcttctaatggagtcatttgtttgcctcatggagaattcacccctactgaaaaccttgtcctgttgaactaatgctgtatatgaggcattctgataaacccctgtaaaatcgtcctaatttccagtttgaccgttttattctgttcacccacattttcagtagtactacggcataggagtatgcactaatgtactccgtatcctccccgagacgtctgtccactgtcatagtcacatgcaagtcaattcaagtcttgagatacactaatcttcaatccaaagctagctgtactggccttttgtcagtgcacaatttggaccacatggaccacatattcacatgcctctctcaagctctcagcaaaattctcagcagtgtacagtatactcttgtatgcggtgtacttcctcgtgggtgtaaataaggcttttgcttaattccatcagaaattgctgctccactcttctcgctcaaagtgttctctcttttattttggagatgcttttcttgcccaaagttgagctcaagctcactttcatctcctgggaagtttgcacagtgccctgtatgacacatgctcgctcaaatcaacctttttctcttatgatttttcatcgtcagtaaattccaagcaggtctgtatatgttaataaaaagaaaactcgaatgaaaatgaaacttccagcctactacgtacgagtacatagtattgtgttgttaatggcaactccactaaaatggaaggcttttccagctcgatggctcaatccatacccatacctacacccaacggctagtttcgcgtggcagccgcggccaatcatagccgtccgatgctccgcttcctgaccgttgcgattcgaagccctcccgaccgttggagcggccgctccccctccgctccacgtaaaaaaggcaacgccacccgacacagaggacgcgccctgccctagctcgctatatctcgcccctcctccacgcgccgcctccaagaactgtataccaccacgcatcaatcacacgccgcacgccgacgccgattggttgatttgattgattgattgggcaagaggaggaggaggaaggggattgtttgctgctgctgctgctccagagctcgccggagccgcggtggctgcagcgctcgacggcggggaagaggggtcgcgggcggcgcggctgcactcgttcttcgcctcggtgatctccgggatcttcggccagggcgaggaggaggaggaaggggagatggcgacacgcagccagaacgtcgctgccgctccgcagccgccgcagaacagaggtgagcgaaaacagcgtgtctcagatctttggggctttggcggctgcgcggattcgagttcttgtcgtgttcctcgttagtttcctgttcggatcctgtcccaagattgggttttttttttttacacgagttgccttatctttgggtaggcttctcttccccccaaacttggtactcatcggttcattgtccagctccagcagttgatctttgttcttgttcttattatttcatttacctgctttttgattggatttctgaagaaaagattccaatttgatccctatttggtggtgttgttcagtccgacttctcaaaatcgcgaaattctcatagcgtctgtctcctgctcaatttcaggcaatgttgccgctctgggaaagcagaaggccgtcgtggccggcaggcccgacgcgaagaaccggcgagcccttggcgagatcggcaacgtcatgaacgtccgcctaccggaagggtacgtgatacgaccaatcgcttagcctcacgctgtcataatttcttctgctctttatctgaaaccttcacttgtgttcatgtaaacagcaagcctctgcagcaggcgccggccggccgcaccgccaactttggtgcccaactgctgaagaacgcgcaggcaaatgctgcggcaaacaaggtacatcggccaaccaaatccttctttcattctttgtcttgattcttgaagcatctgaatctgaaccttactgaaactattgggtctgcagcagaatgcagttgcacctgctgccgtggcgaggcctgcgcagaggcaggccaggaaggcgcctgtcaagcccgcgcctcctccgcccgagcatgtcatcgagatcagctctgattctgaccagagcatgaggcagcagtcggagggcagcgccagctctgtccgcaagtgctcgaggaagaaggtcatcaacaccctcacctccgtgctcactgcacgatcaaaggtgggttatccactgaaaatttcaaaaagaaaaaaaaaattctgcataccaatcactgacaggttatcttaagttcttaacctgtatttactccatgctaatgccaggttgcctgtggaatcactgacaaacctcgagaagtgattgaggacattgacaagctcgacggtgacaatgagctggctgtggtggactatattgaggatatctacaagttctacaaggtcgctgaggtaactgagtcgctctctctgcttgatccttcttcgatgcctacgcaaatgctgtatgtgcttggtcactgaaaggtgcaatctttcctggccttgctgcagaacgagtgccgcccgtgtgattacatcgacacccaggtggagatcaattccaagatgagggccatcctggcagactggataattgaagtgcatcacaagtttgagctcatgccagagaccctatacctctccatgtatgtcatcgaccggtacctctcgatgcagcaagtgcagcggagggagctgcagctggtaggtgtctctgccatgctgatagcttgcaagtacgaggagatttgggccccagaggtagcaacatttttagcccctttgctctgcactgcccatttctagcagggacttgttctgattggatctctgtctatgtatttgcaggtgaacgacttcatcttgatatcagatagtgcatacactagggaacagattcttgcaatggagaaggggattctgaataagcttcagtggaatctcaccgttcctacagcatatgtcttcattatgcgctatctgaaggcgggggcgtctgcagataacaaaagtgacaaggaggtaaagagccatggcttctgtttgtttctgtttaccatcggattatatttcattgctaagcaacaagtttgagcgtgtactcaaaatttcttttggtgaatgcagatggagcacatggccttcttcttcgctgaattggcactgatgcagtacgggctggtggcatccctgccttccaaggttgctgcctctgctgtctatgcagccaggctcaccctgaagaagagccctctatggactgacactctcaagcaccacactggatttaccgagtcacagctattgtaagcactacatgactcgatgacttgtttaactagcatcactgaaattctccattgagcagatatactgaactttatttttctgcgatgatttcagggactctgcaaagcttcttgttacctcgcactctactgcccctgagagcaagctgagggttgtgtacaagaagtattccagtgagcagcttggaggagtggcacttcgctcaccagcagtggaactctgcaaataaatggagattagctttgtctcgtatttcgtttgcttatttggtttagagtgcaatggaaggcgagtctgacattcattaggcgtttgcttgttttggagtcaagaaagtttggaatcttgacacgcttgctatgacttctaatggccaggatttggcctttatgtgataatacaccttggtgtatataaactgtcatctgaatcttatcaataacggttcttgataagtatgaatgatgatcgaattacatgtttgcatacaacaatctcgtgtcttgaatcgatcccatactcctcgaaatgttttaatagctctggcaacctaaaaaaactggtaatcaagtggtaccatggagatatggtttgcatctgtagtctcttgaagaaggttatagccactggtaatcaagaaacttgtgtctgtgatgtttgccaatcgaaggtttactatcatattcttggtgcctgacagtagcagttttgaaaccttagataatccatgtaattttcaactcacatataagatttataaaaatgaattaagtatagagcaagatatggttataatagagtaattcgaataaggttaaacaaatgatacattaattagactttcatcggcacattcaaaatactggcgttcatcttgatgggcatatcatctccatcagtgaagccagattacaatgcgaagatacacccttgtcgactgctctatgagaaatctctttccactcaagagcgtgcctccttattgctttcatctcagcttcttcagatgccatcagcctcttaacagcccttgcaatctcctcccttctgatcaggcgatccttgtctgtcgagtccctcaagttcactccaatcttccactcttccacaattagccggccattaattggttgatcaaagaacaatggtaaggtgagcataggtaccccagcaaagacagcttccagcgtcgagttcattccacaatgggtcaggaagcccccgactgaagggtggcacagaaccttcagctgatcacaccatggaagtatcatgcccttgttggtgttaccgacaagttctcgcactcgagtggattgttcacgaagaatccacaagaatctgacctcacttgtggcaaggcccaaggcgatctcatcaagctgagaggatgacaccgagacaaaactgccaagagaaacatatagcactgagttctcaggttgacaatccagccacgcgaagtaatctatccgtccaggagcttctccattggacttggtatgctcgttttcaagggtcatatacggaatgcagggcccaattgggtacactgggcaggtgactaatgattcaagagagtcgattacactggcctcaagctcatatatggtggtgaataggaggcactgtgcttttctgatgctagagatacatgctaggatatactccactgttctctcactgtgaattaaaggcttgagatcagataacattattgaacttgaagccaagcttgagatatagtgctcaagtctctgatcagggttatctgctgatcaaaagtagataagatcgtaagagtgaataattttgtaaactgttagcagtagatgattcagatgcacagaaacttacctctctcaaatgttagtacaaaacaaaaaaacactaagactactcaagtttggtacagaaagtggattcatcttaatagagaaattaaaaagaagcgatacctctcaagattggggtgaagtggcgatgtgttctgcgattaaaccccgactaggggatttgttgattggagagccaaaatgagaaagacaaccattttgacgacttaaaagattttgttagctgaatcacgtgagctttgttccagactcgcagtaatggatttatgtgaaagaacactaacaaattgttctcctatttgacggtgtttcatttaccacgctatattcacacctacaactgcctatattcaaccacctttttgaacgaattaaacccaaagcactcaaaacacttcggaatgtgcgtataagtaacaaacaaagctaagtgtctgcgcgagttcattccgcaccttgtatagtgtatagatttcgatgatctcacattttttccgcaccttgtcagctctgcttcagaaaccttgagaccgcccaacacctcttcaaagaatgtccctttgtgcagcagatttggactgaggttgggcgtcagatcaggccacggcgcttccaagactcatcagaggacagtacactgcttgactggtggcatagccaaacaagcaatgcagagaaaattcagaaaaaaggactacgctctgctttcctgacggtgctctgggaaatttgtacggaaagaaacaaccgcatcttccgaagcacagagtcgacacagccggcgattgcaagcaagattgtggacgagatgcagctttggggaatggcaggcgccaagggagtgcagaatgtaatatcgcgagagtagttcttttatcaccttaatgtaggcgggaagtgtttttcaagtactacaccgcaccccctgtacagtgtttttctaacctctctataatataaaaccagctccgctgggttctttcaaaaaacattttttctttacccctaggggttgtattttctcgtgctatattcaatgaaaaggcacactaatgctatttttccgttcagaaaaaaaaaacaaacaaacaaagcaagaagtaagtaacattgtattcacagcaccgagtaatagccaacatatgtctctcttggagccttatctagtaaacaggcagaaatcagattcagtaaatctcctaactcatcagttcatggatgtaacaatgtgggtaaatctctaaattgattcgtatgtgggtgattcagtaaaaaatgagattcaggagagggtaagcttgacagtaacaggcaatggaagcaatgaagagacctcacctgttgtggcaccggcgaccggctggtgcggcggtttagcgagccacgacgggaggctgtcgaagtggtagtaggcggagaagaacacggcggccatggggaagagggagcagacgggcacgcccctccggttgccgacgtccacgacccacggcacgtagaagtcggccacgaacgccgcgacgggcgccgctgtctcctcctcctcctcgagccggagccggtcgagcagtcgctcgaagggcgcctccatcctggcgccgacggcgtcgaggaagcccgcgtggtcggcggcgcggccgttctcggaggggatgacgttggggatggcgcgcagccgcacgccgggcggcgcggaggaggaggagaggaggccgagccactcctcggtgactacgaaggtgaccgtggcggcgccccgcgcggcgaggagccggctcaggttcatcatggcgttcacgtgcccgcgccccggaaacggcaccgccacgacatggcagcggcacggctcgtccccggcggcggcggcggaggtggaggcggccatcgcgctcgcaatctctcccctgttgtggctgcgtgcgtgcgtgcgtgcgtgtggttctcgctctcccctctccctttgtgtgtgccggcgccacgctgcccacacacgcatgcccacatgtgcacgtgtcgatggatattgatacgatcatgtgtgatggcatgatcataatataacattttgagtaattctcatttcggatcatatttcattactgatagtttactttaaaacatcttttaatcgacgttcttattttggacagggtagtcttgttttttctttttcacttttgactaccgaccctcgtctcaaacatatgaacgattgtttgaacaatctagaatacgtcgattcctactcatcaataaactcttaaatctcacagctatatacaagttatttctttttcatgtaacaagttagatgtagataattaaaattaaggatggtctaaaacaccatgaaaataaaaatacccaatccaaaacaaaaatattggttaaggaactattcaaagcaaaacattgataataaaatattatttcgtgaccttgggtaacagatcaacagaggataggcggaaaagtatcatttttcccgcctattctaagaacgagatgagttcgagttgtaaagcccaatatatggtatggtattttactatgagattaggactggcttatatagtccccaaacataaatgtggagttataatcttaaccccgatggtgcacaggaagttactacaatacccctatgatgctagaaacccacattgatgtggtcctccagagttcctgccgctagtttgtaagtgtggttggagcggcccagcgatatcttctcgagaaatattcctcactagcaacgtaaccttcaagcttcatttgccatgatcgaatagtacatttctcttgcagtgggctcaaatattttcttttccgaacaccggtcatttagtatttaactgtcacattaagttagccgcaagtaaaaatcaggttggtcagtaaaagggtatctgccataagtaaaagcctcttaggctggtaatctaagagagtgtttcgatagaacagggatgatgtttgcctcgtacaacagattacctaaagtaaaattttctcttccattattctccacgtggatactgatacacaacaagcattcacgctagtacatttatttacttttttggtttaattcacgctgttctctcactggaaattaagtctcccgtcggcgagatctttcacgaatccgttcaacgagcggcgcgacgagccaccgtccggtccgtcctgcacggcgccacggcaagcctcgcgcagcagcgcggccctcctcctcatctctcggctctcgccgtcgtccggatccatcagcctcgccgcggcggcacggatcgcgtccctgccgacgacgacgccgccgccgtcgtcctcctccctcctctgctccgacaggttgacgccgatcctccactcgtcggccacgacgcgggcgtccaccacctgatcccagacgacggggagcgcgagcagcggcacgccggcgaacacggcctcgagcagcgagttccacccgcagtggctgaggaagccgccgacggagcggtggcacagcacgcccagctggtcgcaccacggcaccaccaacccgttgccgccggcgatccgtcgcaggtcaccggcgctggcgctgtccctggccacccagaagaacctgaccgcgctgtcgcgcagcgccacggcgacctcctccagctgcgacggccacatggagacgacgctgccgaacgagacgtacagcacggagcgctccggctgcgcgtccagccaggcacggtgctcctcgtcgtcgatcttgccggcgccgccgtccagcggcatgtccgagattgaaggtccgactgggtacaccgggaacggaaccgcctgcgtgattctgtccatggcgcagggttcgagctcgtagaaggaagtgaagaggacacactgcgctttacgcacgttgacgaacgcctccgttgtcagcttcattgaccgttcccaagaccggaagatcttgacgtcagagagcctgactgatgagcagcctgggacatattgctccaaggacttgcggcttaggtctgcaaagaaaagaagtagagcatataataagttatgcaatgttaggccctgtttagttgcaaagtttttttttccaaacttccaactttccatcggatcaaacctttcatacacacgcaacttttcagtcacatcgttccaatttcaaccaaacttggaagtttggttgaaattggaataatgtgacagaaaagttgaaagttgtatcaaaagatgcaattgcaaatatgcatgatgataggaatgctttagcataagaattttaaaaatgcattgtgactattagttccatacttgtatctttttatgactgaaaactgaaatatgtttcatccaaaaaagggggaaaagaggaaacttctcatgtactagaatcaaatacaaatatattgtggaataaatcactcattttccattattttattgataacaagtacttgtagtcactgaaaaagcaaaggactttacttactcaggacacaccgacaaagaaatataaagtttatgagaaagggttgtgcataataagctaaggaagggctctgtgtttgtgacctcatttaatacaagtaaaaatctctgttttggcatcacggcagtagacacgtttcagcaaacattcctaaagttctttcgactgcatctaacttcaacacttatgaacctatgaaaaagttaattgatacaaaatgcattttggtttagttatatccaacttcagaacttatgaacctgtggaaaagttgactgataaaaaaaaatgcattttggtttagttgtcctagtaatcagattatctacttctttggtttctccgcaattctacattttaatagtgctgtaggggcaactaatttatcatttatggacaatgtagcagaataatgttttgacaatggtgtacttcccaaaattgaggacctcaaagtcaaatccctgtaagtttcagcccctatcttcattaaaagaaggtgcagttttcatcttaggccttgttagatccaaaaaattttggcaaaaaacgtcacatcaaatgtttggacacatacatgggatattaaatgggaaaaaaccaattgcacagtttgcatgtaaattgtgagacgaattttttgagcctaattacgccatgatttgacaatgtgatgctacagtaaacatttgttaatgacagattaattaggcttaataaattcgtctcgcagtttataggtggaatctgtaatttgtttttgttactagtctccgtttaatacttcgaatgtgtatatgcatacttcaaaaaatttacgcccaaagaactaaacacactcttaggaaagaacagtaggacactatttcaattagaattcacgaagtagcagaattcactgactgtgcatttataatttgatttcagaaacattaaaacataagatgattcagttagaaattgtctagaccaaactgaatattgaaacagtatgtttggatcatccaaagttcttggaagcatacgatatcttaatttgtttcaacaagaacatacccctatatttgaaatccccaatatttgtcattttcaagagtagaaaaggtgctacacactcgaaatttgacgtagatgtctagaaattattgtggaaatctcacatgaagtcggagacatcgtggaaactacagtagtgttgatttaaagagagaaaattcaaagcgagaaaatcggagacaaggactgaagccaaataccttgctcgccctcccggtcatccaccggcggccagaggtggatgttgtagagcgcccagaagaacgtggccgccatggtccacagcgagcacaccgggatcccgcgcgccgcgccggccggcacgccccacgccaggtaggtgtcggccacgatcgcgtcgggcctccgctccagccggtcgagcagctgctcgacggccacccccatcttggcgtccacggcctcgaagaagccggcggggtcggcgccgcggccgtgctcggaggggatgacgttggggatggtggcgaggcggacgcggcccgccggcggcagcgtggcgggcacaccggcggaggccagcagcccgtgccactcctccgtgacgacgacggtgacggtgagctcgccgtccgcggccgcgaggaggcggcacgcggccagcatcgggttgatgtggccgcggcccgggtacggcaccgcgaccacgtgccgggacacggctgtcgacgccatgctaatctctatcggactatctctgctggaatttgtgtcttcttggtggaactaatataaaggcagcacagattggagagcttttgatacactgtagtacttgataagtgatacatagacccagctgtgaattgggaggtcagagcaaacaaaggagaacaaattggcttgtcatttcttctgctcccaccgtcgtagcaaccgacgatccaatcctatatgtccaaattcgcagtggttgctacatattgagatgaagagagtacaaactagttatataaggtttactttgttgagcccaaatatcgatagttatgtgaggttcactttgtgggacccaaatattagtggggtggtgcttgtgactctgtctagcgaacatttcttgcttccatatcccaaattacatgctattccggagttgaactccattgttgctcttctagtgaacaattaacagcaaaattatagcccttaagggtttattcggtttggaggggatccggtttggaggggatcgaagagtattagaggggatgtggaataaatctccttcaatctcttctttatggggattaaccgaacaaggtctaacgatgttatatttccctacagtactgccatggtgtcaccttattaaaactgattatatttaatcttaacatagtatttaatcttatattgaaaaaataatccctgtgcgttaggtgcactgtacacttagttctcacataaacagataagctataacagtactgccatggtgtcaccttaccaattacagtactagctctctactatggtttccaagcttcacaagcaacgccgcttctcttgtaaaaatgcctctagtttacttcagataagttacccaagctcaaggctgggaagtactcatcaacaaaatcaccacaaacagatcgtactagcagacctgcagcgatcatcatactttaaatgaatccactatggtcttgagaactttctccgacgactgccactgcttgtcgctggcacttgcgacgaagagcaccaccgtgttccccttggcagtcgccttcgccagattgtgagaaccggtcagtgccaatggagtctctagcacatagctgtagtactgcacctcagaagaattgcccatgcatcagagttcagaaacatttagcactccaaagactgttgattcaaatagctgcacaagtagtgtgcaagttgttagggaagtgatcaagtgaagcttacagtttggccatcgatcttctccacggaggtatcgacgagctcgtcggagtcgaaggtgttcccggtgacaaaaggccccagagaggcgattagcctctcagggctaccgatgtcctcaatcgtggcgttcggcctgttcgtcaggcggatcaacggcgaggccaccacctgcaccttgccctgcttgtcgtcctcgaatttcacctccacccacggctcggcgcacttgggctggcagtagttgccggacagaatgttggccactcgcgtttgcttccaggtgggtggcagaatgaactcgtaaggttgcacattgcctggaattggtgaacaatcatattgagtggattcaacacatctcagtatgtcacacaactaaatcaatttctccaggcagagacgacagctaaccaaatcagaagccagaagccaagcaagcacttaccagctcgaagtgcaggagtgtccttggaagtagcccggaagaacacgaacccggggttggacgccgccggcggcaggaccgcgccgacctcgacctcacgcgcctcggccggcaaaggcgccttcaggaacgccgcgcccaatgccgcccccagcaacagctccctcctgtggctgacaaccgccgcgaggggcgccggccgcggggcagcgccaccagcggcaacgacagcggcggcgctgttgtcgtgggtggcagaagagcgccccgagcaggaggtggacggccggagtgcacggagtagcggggagaagacggaagaggaggccatgaatgaggacgcgtccgcgcgggctccgtgtcgtgtctggtccgcgcgcgcgagcgccaccggctctttatccagacgccgagcgcgatatttttctctctcgcaggaaacgagaccgcaacgacccgtagacgtacgtacgcgcggctcagccgtgtcctcttgtcaaactggttgggataagataaaggagcggagcccggcaaagccgagcggcagcagagagcacagctcggcaacaccatggcgccggcagcgctagccgctcccatcgcgtccatttcccccagctccgccgggagggtcaccgccgccgccgccggcctccgctctgccaggatggccagctcacctgtagcccagcccattggtattgattgctccttcttccttttcttgccctcgcctctcggccttcttcacggatgtcacctgtctaacctttgttgctgttcttgcaaaggcgaggcagttgtgttacggcccaaccagatgttcagatcagtgctgcgacagcggaggcgtctggtggtccgaagcagcagctcagatgaaaccaattccaccaccgaagagaaggtatatccacacgaccacacgcctgatgaattgaaaaaaaattaaagcctgaacccaactgtgacgaccatgttttgttcacagacgccattcggatacacgaggaaggacgtgctgctcatcggcgtcggcgtgacactcttaggctacggcctcaaatacgggctggaggtgacgtctgttctttctctcttctccatcactactccagttcgctgcttcttggctttgacttcatcatcaagtacacttcactgacgaacatgtatgccttccctttcacatccttgccacaactgaacacagctggtcggagtcgatcccttgcaagcaggaaacgccgtccagctgatcatcgtgctcgggatgacggtggggtggatctcgacgtacatgttcagggtggccaacaaggacatgacctacgcccagcagctcagggactatgagaagcaagtcatggaggtttgacacttgttcattctagtatgcagtgtttgttactaccaagagtatgagtgactgacctgaagtttcttgctctttgttccagaaacgattggagagcttgacagaggctgaactgcaagttctgctcgagcaagtagaggaagagaagcagcggctgactccagtgagggatcagggtgttaccttcactaggaaaacggaggatcaggcgaatgccagctagaacaccttgattctgtaattagctagctctcctgcactgttagatagcttgaattaagaactagcggtggatgtggatcgtacgtcatacgaatgaccagctaatgtcttccatgtttgtgcatcattctgaaataaaaatagttggtaattctgcttatccagatttccagacacgtttatctttggataacccaatatttgaacaaaataaacatctgaatacataaattgctttcacaacaaacatttcggcgtgctccaccactcttacactctaaacttgctaataaaacagtaatgaatagataaactacttgtgcagtagaacaatatcattatttaaatctcatcagaactgcagcgaaaatttttttgttagaaataacgagataaatgcattaacatatgaatttccatgttatacttcaattgctttggtattgtgtcgggcaaagaggaatgtgcagaaaaatccagagggttctgagcaaccgtaggaagtataacatggaaattattcatcactttatctactcccaataccagggaaaaaaaagaactagatgtaatggtatatgtatcttacgaatttgattgaatgaatctgaatctttagctgacgttgatcctcagcagggagtgatcaaatcccagcatagcatgattcactaataaaaatgcctcttatggttagtacaaggtaaaaacaactgtaggatgcatgtagtactacattaaggttaacgaaatttccttggaaacgatcttgactgaataattctttgtttaaggaaaagaaatagggtacaatacttgcactgttgcctattaagcagcacggagtatatgcacttcacctgaaggttaacaaaatttccttgcaagtggtttgtactgaatcgccatttatgttaaggaagaaaaatatctatacaatacttgtctatagaaacactgagctcatgaagattaacaaaggaaatgcgatctttactgaatcacccttctttaaggaaaagatatatacatagtgctatcaagtaacactgagctacatgtattacaactgaaggttaacaaaatttccttggaagggattttgactgaatcgcctttggtgaaggaaaagatttacacattactagtgctcttgagcagcagtgggttgcatgtgctacattgaacatcaacaaaaaaaaaaatctcctaagcaatgtttgactgaatcatctagtgatgtagagagaaaatatcagataagagtagaagattcccttggatacataccatgttcttcgacaccttaatctcagagagtagatcagacgagcacttcgaccttcttcttccccttgaggaagacctccctgtcaacaagctcacgcatgtatccatcaaactccacaggaactccaccattgagcctcttcatctccagaaaccacttgctatctctcgcccagagttcctcaaacgcatctaggtaatgcacactgctgtactttgccttcagcgcatccaacaagaccacgttgatgccctctcccgcaacatacacctgccttcctcctccattgagtctctcctcaatccttcttctgaggttcccatcattgccaccaacatgaacagagtcaaaatctacttgcatccttgatatgataccatcaacaatgtccatcaagcttggcgccgtgcgtattgctccctgcggtggacggaggacatgctcagcttcgccctcgcacacattgtaccaataattccctggctccacgtccccaaatttcctaacgatcaggggatccctcgacttggagaacttggtgggcgcaaccctgctgtcctcgatgatgcggactccaagctgaccctgtgctccccacttgtcccaatcctcccagaaccgcttgtgttcaacgatcccgaccacggattgcaggtgctcaatgtcaatatagaaggcgaggcgcttgccctcctcgggcatgcccccggcgtaggcggcggcgagacagacgctgagatcgaggacgagggtgcggttgaggtagcgggcctcggcgatggagcagaggagactacgaagataatgcggcatgggcttgcaccggtcgccgccgccaaggtaagagaggtacttgcccgcggcgaactgggagcgcgagagcgcgggtgggggcggcggggcggtggcgttggtcccgccgcggcggggcttgcgggcgagggggccggagtggtattccccgatggaggtaacggagtaggcgcaggtgacggggtcgcgggcgacggagaagcggcggtagtccttgtagttggcggaggcggtggatcgggcgcgccaggccatgtcgcaggaggacgacggcgggtcgccggggacggggcggccgaagcggttgaagtggacgtcggggaaggcgtcgatggcgcggcgcatcatgaggtggaagagctgcgggtcggcgcagtcgagcgtggaggtggtgtcgcagctggcctgatcctgctgctccaggtgggacgtggtgggcgtcaaggcggcggtgggaggggagagggagatggggaggttgcggagggtgaggaagaggaaggcgacgagcaagagggcggcggcggcgtgggcggaggaggtgatgagggcgccccgccccagcaacggccggctcgggtccatccggcgacggcgacggccgacggcgatgagatctggtggctgattgtgtaataaagccccgtctgcaggcggcggacggtggtgaacttgtttctaggaagacgacgaactgttcctcttaatgggcctaacatgagtgggcctaagacgaaggcccatgatttggcccaagaatcgcatctcgtcgtggataagacgataaagcaacattgtgtggggatagccatagccctgcaccgcacctcgactccccaaacatggcgctcgccctcgtctcgccaatggcggctctctcactccactccgggaggatctcagcggcggctatcggcggcggcctccgctctcgcagggcatccccgatgggcgccgccgccaccccgttcctccggagctccttcgtctcctcctcctccacgtcatccgcctccgcctcccccgccgcgctctctgccgcggtctcggcgtcgctgaccttcacctctgcctcctcatttgctggtgagaatgtgtactttactcgttcctgattcgcttcgttctgttgctaccatttgggttggggaactagatggaggagagagttgcctgcaaagagaaagggaggaatgaacttttgtgctgctggtttcggctttaagtactgtacaatggagtgtttatactgtcagataggtagcgtgtacagttaatcagtgcttaatgtcagaagataactaaactaaactagcgattttaatgcaattgatatatttgaaagttctgatggtattctggcaatttcctgagaaatcttaaattcaaactctgccgtacttgttagctgctgtacgcagcttgttataatctgcaatgtctgatcctaaagcccacgcattcttatagttaaccatgtgctagagaattttgcttaagatgtggattccgattaagattaaaaaaaatcacttgtttacacatccagttttttagtgtaagaacgtgtatatatattcataattcagtgattagttctagatggttccatgttaggaaacctacacggctgaaagtttcttttcttcctccatgtactgtgatactgatattgtgatttccagtagtgccagatggactgtagattgtagtacattcttgcgacagaatcatgaaaacatcacaaaaactcaggaaactccactttttggagcgagcgcatgagcttaatttagtaaactcattatgaaatatatcatctaacataattatactacgaactaacgaaatcactgaatcaagaacgtttaactggacaactcaactttttaaacagttcagttacaattaatagccttgccacctaaagcaaaaccaaaatgctcctaaaacaagccaataacgttagattaaaggaactattgcaatgatattatccttttggaaaatgaactgtactttacatactagagtttttttccaaatgatcttagagaacaaaaacacaaactaagggcaatcaaatagccggtttctgtgctgtactgttgtatttagcaaatccatgttcttatgtatcaaaccatatttgttccaacctacaaatgatttcagtatcctaatatgttacatatttcaggttcatctttgggaattgaattcagctacaacagagttacaacaggaagatcccggattctgcagattagggctggaaaggctgctctgtgcatgaccaagagaaatagatctaggaagtcgcttgcccgtacacatggttttcgcagacggatgaggactactgccggaagaaaggtcctgaagcgcagacgcgccaaaggaagaagggttctctgcacaaagacgaactcccccactgggaagaaacgaatgttctgattgaatcgcattctaagtcgctctttgtcacaattgtaagtgtatttttttatcccacgttctcggttatactcaaccataacaattggtgcaaatccttcacccggtgtccggttaatgtgtgaagtacattatcaacacaaattcaagttagcctttttgcttgtgcagtatttagtagttgtttgctgtgggaatatgttctccttgatctgcattgccatggttttcctctgatctatcttgactgcattctgagcatagattttgccaaagggcctaaatgctaacttgagcagttgctcaaataaactcatcaatttttctattctgtagtagaacgtcccttttattttctgatacagtccagtgaattttaatattcagatcatctcatcatagtcactccatgctccactgtgtaacacaatttatccacctcctctgtgccaatctctttggtacacacttatttgtaaaacaacctgattgcccatccaatcctctgtcaccttataattttgctactatcaggcgaaaaaatggataatatccagaactcaacctggaataaatgaaaggcaacaagtagcaaagagaacatttacattctaacaaactgaatccctcctcttcttcactcgcatcggcaagccgccttccatcctcaaggtcaccgagaacacaagccctggccgtccctcgccgccgacgaacctgaagctgaacctctcgaacacgcacgccgcgatggacttcatctgtatgtatgccatctccttgccgaggcacatcctcggcccgccgtggaacaccgggtacttgaacgggctctccggccggaacacgccgtcctcgtcgagccaccgctccggcctgaactcctcgcagtccgcgccccataactcctccaagcgcgccatggcgtacgcgctgtaggtgacctgccatcctttgccgacgaacgtgccgtccggcaagacgtcgtcgttctggcagcagtgcgagtccatggccacgggcgggtacagccgcatcgcctccgtgatggccgcgtgcaggtagtgcatctcgcgcagctcgtcaaagctgaacgccgccgcgtccgtgctcccgctcgacgcgcgcaccgcgcggatctcgcgcgcgatcctgtcctccacgtccggctggccggacaccagccagaagaaccaggtcagcgccgacgacgtcgtgtcgcgcccggcgaggacgaagttggtgccacgtcgcggaggctctcgtcgctgtgcttgccggtcgcggcgaagcgcgacaggaagtcgtccttgcgcgccagccccgccgcgcccctctccctccgctcgcggacgatcctgtcggcgtagccatggatcgtggcgagcgcctcccgcatccgcctctccggctccaagtcgagcagcctcttggcgcgccatgcccactcgaccggcgacatgaaccgcgccatgaggatgttctgcgcgtcgttgaaggcgcgcaggaactcggtccgcgcgttcgtccccatcccctcctcggtgaggcacgccgggtcctcgtcgaaggcgacgcagcagacgttgtcgaacgcgaagcgctcgagcacgtcctgctcgtccagcgtccggccgtcgcgctccgcccgcgtgagcagcggcagcagcctatcgacgacctcggacctgacggtgtcgaccacgaagttcctcagcgagcgcttgttgaactcgtagctggcggccttccgctgccacagccactggtcgccgtcggagttgaagatgccgtggccgaggaagtcctccatgactgacaccacgtactcccccttggagtagttctggaagttggtcttgacgatgtgttcgacgttggccgggttgccggtgatggcgccggcgatgaggccgaagcccttgaagttgaaggacatggtgtgcgtggggcagcgcgccacgacgccggccgaccactcgaggaggcggtgctggttcctgacgaagtgtggcagtatgccgacgatcgggtaggccttgaggccgtcggcgcgaggctgcttcctggtgctgccatggcgcaggcagaggaaacagagcaaaggaaacagcaagaggaggagcaggggaacggatgaagtcaacgagagctctgtgcccatgtcgaattggtgattttggattggacgatggagatgccagcctcgtgaagtccgcagaggcgcagattatggagtgatgttgcttatttgattaagttagtcgatttgttgagtgcgagaattttcagaatatgccatcgaattcgcactactttcagaatatgccatccaattcatgctactttcagaatacgccatcggagcacgaatttcctttgttccgtgccactctgtctcttccgttcgtagcaccgtcgtcttctccgcccggcaccgccgtcgtcagtccgccaccgcccgcgccgacacccgtccgtcgccggcatcgtccatcctcgttggcgtccatcgtcgtcgtccacggcatggcgtgggcgcggagggaggcgagcgcgacgcgagtactagcagcggggcgagcgcggccgcgagtgctagcagcggctgcggcggcgggcgaagctgactgtctgcgtctgcgtctactaccgcccgggactggacctcgtgtgcgcgccttgtgaattttgaggcaccgttcgttccagggtgtttggggagattgagtctcgttttccgcgcgcacgcttttcaaactactaaacggtgcgttttttgcaaaaaatttctataggaaagttgctttaaaaaaccatattaatccatttttgaaatttaaaatagttaatacttaattaatcatgagctaatggctcacctcgttttgcgtatcttctcaatctcctcaatccccttcccctcaaacacaccctgagagtagagggcggccggtaaaaactccttgtatgttgttgctgctgcacgtacttggtccagatgatgagtgtgaattggcaaggacggaagggaacggaatgggtaggtagtagttggatacttggattgttcagaggaggacgtcggacttggcggggagtcgcttgtagaagttgaaggggacggatggtgagcgcggccgcgagtgttagcagcggctgcggcggcgggcgaagcggcggctgcggctgcgggcgaagcggctgcggctgcagaatggggcggcggcggggaaggggtgggggagaagccccttgtggatggtggggcgaggcggaatgcggcagctgtgtacaatgggggggcggcgtccgtggtggtggggaggaagatgaggaggacgaggacagggcaccctcgccggcatgctccagccggaggacgcgatgcgcgggcggtggaggacgacgatggcggtgacggcgaacggacaacgccgtggctgacacgggcgcgcgcggcgcgggcggtggacaacgacgatgccgacgactgacgccggcgcgggcggtggcggactccttccctccgcgcccaccgagccgtggacgacgatgacgacgacggacgccgacgaggatggacgatgccggtgatggacggacgccggcgcggctgacacgggcaccggcggcgaacggcgccgggcggagaagacgacggagctatggacggaagagacggagtggcacggaacgaaggaaattcgtgctccgatggcgtattctgaaagtagcacgaattgggtggcatatcctgaaagtagtgcgaattcgatggcatattctgaaaattctcaactgttgatgcttaatcaacggtccaacattgaactgggttactactttggcctcaataagttagacgaaaaatgcttcgtgttcttatccaaatatctcagtcacctcctccaccacacattccctcttctcaaagtctctctcttttcaacgcctctacacagggggttgcaagccaaggcgaggcatcgtcgctggtgtcgacaccggagcaaggcggcacgtgatagggaggaggtactcgacctcgctggcggccacatgacggcagcggggcaaggctgcgcgtggtagggaggaggcgatggacctcgtcggcagccacacgacagcggcggggcaaggcgacgcatgggagggaggaggcgatggacctcgtcagcggccacatggcggggtagacaacataggattgaggaggaggtgctggacctcgccagcgatcacacggcggcagagtgcagataacgcaggattggggaagaggcgctggacctcgccgacggccacacaacaacgatggtgatgtggcagaggtgctagatttggctgtcggtgaggactggacaatgcgactggtcttgggcgaggtcgccaaccttgtgccactattcttctcccacaagcatcaatttcttgattctagcagctagccgtagaagaagacaaagatgggttcattttattggagttttagtgatgttgcagcatattgttttatcttgttgcattttattgtattaaggtgtttaattttgtttggatttggtgttgcattttactgattcttagtgttgcaagcaacctatttcagatgttgcatttgattgaaacaattttgttcaagcaatgaaacatttttcctcgattgatgaaacatctgaaacattttcatcgaaacatttttcgtggagtggtgcaacatgtgaaacactttgtgataatatagtgcaacaccgtccgatcttttgtaatagatcggacgtctaatttgtagcagcctccaagttgagagtgcttctagatctaaatttctacacacttttgtggacttctatgtttatgaactgtttttctttcttttttttttgcaaacccggctagagatgccgaccaattttattaaggattaggagatagtttcgtatggtaaagcaacaaacatagttgtgcatatcatctactatcctttacaacacaccgaagaaaagaggagaagatgaacaatgttaaatgtggcaaagaataatggtcatgaaattagtttgagctaattcaaatcccatgagaagcaacggtctacttcttatctacttcctccacctcagaataggttaatctattacgaatgtgatatattcgtcagatttacagaactagaatatgtgacatcccgtaatagattaacttattctggtacggaaaaagtatagtttcaagggaaatcccccccccaaaaaaaagaagactctttgatcacgaagggccagacgatgaacattggatgcaatcagaaacgagtttgtcctcgtccttggttcccgcgccgctctaccacgtaagagctttgattgggataatattagaattttcccaacatgggcacgccgaaagtcatgtggacttcgggagctcatgtagtcatatgtaatgatgatgagagagggtgtcatgtggggaatgcactacgtccgcaggcgcaaggatcagcgacaacagcaaaacggcaaacagtagatacgcaggatttgttttcgtttgtttcagagtctgttaaagtttgttagtttgatctttatctctaagagtttgttagatggcatt

SEQ ID NO: 16176 - DNA, 513 bp, Oryza sativa
atgtccaaaacagaactagttctcagaccagatggagactagcaaaagatctttttgaccttgaaagatgtcaaattttctttaagaaggttattctcttcttactttcttggcaacatagctgtcaaggctccaatcaacatagcaaccatcagtggctcctgcaggcattagcagcacaattcactgaatcttcatacggagcaggtgcaaagaaactagcatgtcttgataatgtacgcttttcacactgttaataacagacacaagcacaaagatttaatttgtgaagaaaaatgtttcatcacacaaacaatctaattgaaataaatagcatgagaaagaactgaataaacatattactcaatataagaacaacatacctccccaggcgttaaattcccaatcaattcctgctatatttttttctgtgattcctaaccctggtgcacctttacgaacaataaactaaaaaacagggatactgttagcaacccaaacactggagagcaa

SEQ ID NO: 16177 - DNA, 755 bp, Oryza sativa
aaacccgacacctgggtcggtgcttgcgaactaaatgaatttccaaaatcgcggaccgaggaacgtaccgggtgtacggtttcccgctcttgcacttaaggaccgtttccttggaatttcattcgaacataagacaagtacgaccacatgggtggaatgggacacccctggctgagtaactagcttatcgggggagccatgatgccaagagacatgtggattcgccggggtggtgtcggggaggacccctgggcttcctggcacagtatggtctgggacataatctggtgttggtctgggatccctctcgttggcatatggtgaacctgtgtcggctttcgaaatgccttgtcatgaaagccttaaggtctctagtcgtggccgttctgcacgggctggatgatccgggttagtaatgtcgtgtgggaaaagtgtaccccctctgcagaggttattaaaacttttcgaacagccgtgcccacggtcatgggcggatgtgaggtgattcctatcgtagtttttgtttgactactgccttgtgaaatttgctgttgtggaatgggtttgatgtttggaaaatctgcggctgatgggatcagccaggcccgggtggccgtttgaaagctgttggccgggtgccaatcttgatcaattcaaaagactgaatcattgcacatactccgaccggacgagacgcactgtctcatccgtgtcgtttgagaagcactcccttagttgtttcagaaaagagttta

SEQ ID NO: 16178 - DNA, 678 bp, Oryza sativa
agccattcaataagtcaagcaaagataagcagtcccaacatttgggtataaataatttgcattcccattcatcccccacattgtatcatgtctactgattgttatctatgcacactcatcaaaatcatgagtaaatcagtagccagagaatccagattcacctcgacgagttcctccttggcctcatcgacgccctggacatcgtcgaaccccactcgctgcttcctcggccggcgccgcttctctgcgccgccaccggcggacatctgccgctgtatgaaccacatcatcggcagcagcgacacccacagcgtgagcagcgtgctcagcatgtccaccagcagcctccccgccggccgcggcgccgaccggtagtccaccccgccgtcccgcatcagccccagcaagaacccctcgtcgtgcggcaccctcctcgcgtagcacggccacctcgccgccgccgcggcgcctctgcgggcctcgcccgcgcccgcgccggcgtcgtcgctgccgcccccgtcgtccgcggccctgcggaagtagatgcggcgggagtcctcctcgaacgcgacggcggtgacggcgcccgcgcggaggccagccaggaggtccgagtaggccacctccttggccgcgttcttgggcagcgcgaggcgggcggcgaggaggaggaccgcg

SEQ ID NO: 16179 - DNA, 563 bp, Oryza sativa
gtggcttgcctcgctcgagatcttgagcttgatcctcgaaatcctcgtactacggtcttcgggctccgaaactacacgcgaaacgggacaactcagcaaacggcgaaaataaagccttattattgacctctaagcgtgccattagatagatctcgagatttgaggaattttggaagttgaacggagtcaaacggacttacggttggggagatattgaatttctaagattattggatttttggtctaaaggaaaaggatttatttaaatcctttttgaaaaagaaaagaaaagaaaagaaggagggagggaaattagacttccctcgggcggctagggcacggcccgagagaatggggcggctcggccgaccttaatgggctggctggcctatgaaggcggcccaaggcgcgcgcgcgagcggggaggggagagagagagccggtgggccgggtccatccctcgtggtcccgggtgggacccgcttgtcggcgactcggctcaccgtgagccaagtgcacgcggggcgtgctagggtttggggagggaggcgcggcgcatgcgc

SEQ ID NO: 16180 - DNA, 1672 bp, Oryza sativa
actttgtttctgtaactcatggtgatgtaattgtctatcagatttctaaatatgaaattggcattagacgacaaggaacgtgaagcatcaaagctaagagatatcgcgaaccgtgtggcctctgaaaagagaaatgcaagaacgaggtcacctctaaccaccaccttgtcctcgaaacctgaagctggtcaggattccagtgtagacacttgtacaagcgaggtaccacatactagaagcagtttcttgcaagttacattacagtatacaaaagattactaatttgaacatatgtctaccttgttccatttgcagatcagaagctcatcatctggaaagcagagaaggttccgctctccattgtcagtgagagaactggacgagaagtcacctgtcatcaaccgggagttatacttgagtgccaagttcaagactccatctcctccagtaagaagttcattgtctgccgagagagttggcattgccaaaagcgtggagaggtctgaaaacatcgactgcacaccagtatcaaggattgaagtgcccccaaaagtacagcacagtagctctaggaagaccccttcatccgtcctgacggctcaaagcttacggaaattccgagactccgaagaaaatagaagcgcaaagccatcggtccgagaaagcatgacaaaaaccaggctcgacagtgcaacaaagccgcctcagaaagaagagcaaactgcaaacaagaacacaggtactagagtgaggtcagaagccaagatccccaggaacatatctgacatagaaaacgagtttgcaaacagtgagcccaccttccattccaaccgaaaggcatggaagctcccaccacagtccacaagacagtcgcagagcattgatcttaggtactaagattcttcactggtaacaacatgacatgttttccagttttcctgttgcatacaaatgcatctgtagatgtctctctctttttttttgtgagttcgcttacaaagatgtctctctttttttttttggtttgggttgtcacttttggcagagcctctgtccgggagatggaacctctgactgaagggaagcctcgccggagcaaggcgccccacggtgatagaaccaacgtccccttaccggagacccggcgcagcgtctctctgccccgcgggaagatggctctcgtgtgaaaaatctagttttttcgtcaggcgaatttcattgtaccctgtgatccggctatatctgtaggtcttctacggctgggtagacgaacctgagaggaacacaatcattcattggtttgttcttttttttttcctttcatttttgaagttcgtgtgtctgtttcgtacgaacctcacgcccttttgtacaatgtaaatgtagcaattgccattattatatctcattttcagtggcgattgccttattggaagctgaaagcctgaaaccactagcactttgtatcagtatcaccgttcgtgcagatgttcggagttctaacaaatgatttgctcctggtctttgctactgcagtgcagcagactacaaggcttgaaaagctagtttggttttacaaattttgctatcgattttatattttcagcgaaaagagagagagtttgttttttttttcgaggaaaaaagaactgtttacccccgtatgagcttt

SEQ ID NO: 16181 - DNA, 1249 bp, Oryza sativa
ggtgcgcgaatgtcgagacgcaactagatggttacagggggacatgatataacaattaacaagggaggatcaatgcaacaaattaggtgggtccgccaatctgccttgcagacgggacgacagattaagtgcgatcctatcaatgcataatatttttcaagcaacataattaaatttcaaatataggctcaagatgttcaaaggtggcttgccttgctcgagatctggagcttgatcctcgaaatcctcgcactgcgggtcttcgggctccgaaactacacgcgaaacgggacaactcaacaaacggcgaaaataaagccctattaatgacctctaagcgtgccattagatagatctcgagatttgaggaattttggaagttgaacggagtcaaacggatttacggttgggaaggtattgaatttctaagattattggatttttggtctaaaggaaaaggatttaattaaatcctttttggaaaagaaaaagaaaagaaaaggaaagagggagggattatagacttttcctcgggcggctagggcgcggcccaagggaaaaggagcggaccggccgagctaaatgggccggccggcccaaggcagcccaagtgcgcgcgcgcgggaggggaggagagagagggccggtggaccgggctcaccgtgcgcggtcccgggtgggacccgcttgtcagcggctcggctcaccgtgcggagggagcacgcggcgcggcgctagggtgggggagggacgcggtgcacgcgcgcggtctgcggaggaacggatgcggcgggcccacgcgcagcctcacggctcgcggtggaacgcgcgcacgggaggggctgaccggggtcggcccgtcccgacctcggctgggccggcgccgacgtggcgcctacgtggctgccacgcgggccggcgggaggtagacgacgacgcctgccggaacggacggcggtcgatagcggcgagcgacggagcaaaccacggcgatacaggcaaaagcgagcacaccgggtggttgcacgtgacgaggggagacgagccaacggctcggattcgccggagggagcttgaaggcggcgaatcgcggcggcggcaaccggcggcgggaaaaggggaaaacggcgacgaggtcacgaggggccaattcccggtggtgagagcatctacgcggccacgggaatccgatgctagcgtcggattgggcggagctacgccgagcgaggctggcgacgagcgggtgcta

SEQ ID NO: 16182 - DNA, 664 bp, Oryza sativa
agccatccacagcttaaccaatgcattgcgtttgaaccggtagttccgtggaaacatactacagtaagcaaagcatcgccggacctgttcgttaagtttctggtagctccgccactgttcttgtatgatgtcagtacacggtacttcattatctctaattttttgccaagagctggcatctaaatttttgcatagcctgtctcctactcgccttgctgcaaccggtaatcttcttagcttatttgcgatccctctgccaatcgaatgtagtttttgaagtttttggctatcaagtactctcacaccatcaagtgcataatgcatgaatagatcaaggaaatcattatcatccatctcagaaatttcaacggggctcttggcacctagggacatggctgtaacgccccgattttcgttcgggaataaaaatcaattaataatacattttctagaaattaaataaaagttaaatcaacttaatcaagtgaattattgagggaattaaaaatttcctttaaaaatcattagctgagaatattttgtaatattctttgtgccctaaaatactctccggatttttccgcaaatttttcggagctcaagaaataattttaaagtcacaaagatcatttaaccaattaaataaaaagaaaacaataaaatt

SEQ ID NO: 16183 - DNA, 11106 bp, Oryza sativa
aagatccaagtgaagaagcaaggcaagtcacacattccccttgagcatgttgatcccaatttacaaatgttttactgtttgcaaataaatatgcatgttttgctaattacatggggtcagggttttacctatctgctcgcttgtgccatgtttacttgatatctgtcctttgtcaaccatgggtaataaatcgcctagctggtgttactttgatgacctagctagaactatatgcttagccatgcttaattaccactagctcagtcgatgggataattgcagtattagacattttagtatcttggtgagctgcgtgctcgagacatctggccatgcttcatggtcgtaattattcaactaaaatgcgactgaatggtgggctgtgggtgcatggttttgctggtcgcatccatggcagttaaggaccggttcgcgggatgccttggaagaatttatcgtacttaccacaagccagcgtgggcaacggctgggcttgtagcgtagctttcctctagccgacgcatccaggcaagggtgggcgtgatggagtttggatgggccctgcgacggcctatgcggcttccggattcacctaggcacgagaggggactgcccgctgccttgcgaggagtgggggtgaaacctgaggtgtggtgtgcttggttagagggggttatgcgaagggtcctgtcacggcctctttccggtatgtcgtggtggcatgtcggcgcacggaaacgtgtcgtggggctgtgtcttgtgggtacagttgtacacctctgatcagagtaaaactattcgaatagccgtgcccgcggttatgggcagtcgaccagattcaccgtgattagtctcacacttaataaatcgacccaatacactgtagtttaggtgggttggttgggcctgttcaacgtggtgtagcgttgatcagtggagatttaatgttactttaattactcaacagttttactgttttgctcaataaaatgttttacaaccgcctttatgcaaatagacacaaaccatccttgtatccccttgcacgtctgcatcgttggtgtggcttgctgagtacggtggttgtactcagccttgctattattcccccttttcagaagtgtagtgcttctgagctgaagatggagttaaaggaccaaggctcagaccccagttgagttttgcctgtggagtggagctgaagccccgctaggatcgttttttttttccgctgctgcttttgtttcggtgtgaggactaagtgcctcttctgtaagtattttacgcttattttacgtttggaactgtatattacttgtcgttttgtgtaccctgactggtcctagacagggatttaatacgcaaaatagtctggaaatttgggttaaatttctgggcgtgacaatggctgcatctttggacaaagctgtaactaggatcttacttccccgcttcccaaaattcagtgtattacgtacttggtcccgttcttgctgagcaacatccgactggagaccatccagcgccagcaagaaccttttgtctctcaattccgcttttagcttattttctagggcatcaagattttggtacttataggatggtcgcccaatggctccttcgagcatctgtctgtaaattttatccacactgaaactttgagaaacatcaacccacatgacaggtgaaaaatggccatcctctttttcatactcacagacatattgtgcaaggattgtcttcccggatccagcaatgccatagatgccaattgttgttgaataacacgggttgttgctggagcctggttcaccgtcccctgctgcttcgcgcaacatatttactatctttgtacgatctacatctcttccaaatactcgccccgtagctgaggaagtagtgcccgacatcgtctcctcgatagttgtctccgtcattaataattctcgattcacaagcccgcccttagttagtttttgtagcttctctaggcttttcttcagcttactggttgtgtagcttcttctggcttttcttcagcagctcacgtaaccatgagtcggtattagagggagagctgacctgcattaagtttaggcatggcagagtcatgtaacatgaaacgtgcttattggcccaaaggaaaattttagtagcatataagttttttttttttggacttgtagttttatggctccttcagaacgcatggatgggcacatgaatcatttctttctatataagtacaatccactaagtacagttatggcaataaagttctataagtgagccatcggaagacgactcacgcgtcgcctcctctcgggcgacacgggaggcgcccagctcgccgtcgcccgccgctccctcccttctcctccttcgcctcaccgctgcccgagcggccggcagcaaagtcgcgcggccgcaaggacggcggcgacggggcttcgctcagtctcaccgcacaagggcaggggggactgccggcatcgggaggcggaaaccgcccagatccgtgccgaccggctggacctggcgcggcggttgctggtggcggggtacttcgttcgggcggtagcatttggcgggggtggcggcggagtttggaggcgctggtggtggaggacgaggctgccagatccgtgccggatctggcggatctggcggggaggcatccggcggcgcccgacgctggcgggaggatgtcggcgtctgctgggggacggtggagccggacgacgactggcgacgggggcagcttcttgtccggtgacggagggtgcggctggtagcgacgggcgcgacgacgcggaggccgcgacggtggcggaggggcacgaggccgcgcctgcggagttggccacccgacgaacagatcgggcgggcgagcttgcggcggtggcggcggagctcgcggcgatgggtcggcggcagcgggtgagcgacggcggctacggcggtgcgcggctggtgatgacgacgacagcggtggctgaggcagccgcgacagcgcccgtggtggccggcgcgaggctctcggtggcgacagcggcgcgcggctggtcacggcagcagcggtggttgacggcgcggtggctatggtatctattactctagcgggtgaatatcaattttcgcaagcgggactagatttatggtattatctgtagctattttttgcaaatggtgatttttcatagtccgactggaaaaataaatggtgacattgggaaaaatcgtttttctggtagtgaaaagtatttgcaagttactctagcgccatcaccattggtggaggttttgcacatctcaacatcatatgtcggagttttacttaagattttaattatttctatctagaagattattcttcgttatgaatttctaaataatatttattggctttgtggttacatgtaaagctacacacaatgaattcgaaaacctcatctcatcgtcccttatttaaaatttgggtttatccagaaggacatttgtctatctttttcttcggacgagtttacgggtcggacgtccgatcggtttagagaaaaatcgggcgccgatgttagtgcccgatttacgtgcaaaactattttaaactgatttttctcttaaattacttatccaaatcatgatccgattgcaccattaaatttgttacaattaaatcttcaaaacaaaaccacacatggatatattccgacgaaaaattttttaagcttattattgaattatttttaaatgttgcacgatgttccattagatatatcggaattgtttcactaagtagattgaaaatgtttcactcgtttgaatcgggtgtcgtttcaccttatataaaaacaatgtttcagcaaatagcgaaagaatgtttcaattcactgcaacatttgatccatacatagtgaaacattataagtacactaggtgaaacatttttcggtggaacaaaaaatgaaatgaattctcttaatagggggtttccaaaatatgtgggttttttttgttgcaatggaatatttcagtgcactgcaacattagatctatacatagtgaaatattgtgagtacactagatcggggggaacgcccgattggctccacccccgtcgggctcccgagccctgtcattctcctttttcttttcatgctttagaatgcatcacatccaacaatttatttttatctattcgacaacaatgcgtaggttgtcttctagcaatagccaataaggcttttgatgggaatctatgagtaaaacagatgattggaaaatataggtaaaatacaaaattaaccacttggataaaccacgtgaattttaggggagaattctaaaaaatccccttgtcttgaaccattccaaataaatttcatatgatttttggaagttctaaatttcaatcttttgttccaaactgatcaaatactcggtagaatatttactgtatgattcaaacactaaatttcttccaaatgagccttaaaaattcctttctacgatgttttcaagcaactttgtactaaagcttcagcgtttaatcttgaaaattaaatgaaaaaacaactgtcacgtgtttgaactaaccatgtgcttaaaaaaatggcaaaatttgcaagctggatttcaccgtcatgtcacaattaattacttatatattattcccatgcatacccactctagtctccaggccattctgaatacctaagcaaaattgtaaaaatggtactccctccgtttctaaatatttgacgccgttgacttttttaaatatgtttgaccgtttgtcttattcaaaaattttaaataattattaattcttttcatatcatttgattcattgttaaatatacttatatgtatacatatacttttacttatttcacaaaagtttttgaataagacgaacggtcaaacatgtgataaaaagttaacggtgtcaaaaatatttagagacggaaggagtactacttttatctcccccagtcctgaaacttcttgtggtgaaggtggaggagggggctagaaggtgtaaagtatactaccattgtggactaacaagtttatctgagcaaggtccaaaatagagttgctaatgatggaacaatctccgaattcagttgatatatcttatcatcctcaagcttgccggtcttttgccatttgatttggccacgtgccatggttaatctatactttctgtaaagttataacccactaactctaaagtttcacatgcaaccataccacatcatcacccactaacaataattacatattcaacctcatgcaaacatgcaagagcatccacaatctatttaattctacaaattagcacgcaagcatattcaatcaccacatctcacatcatttccacaatagttttacaaatctctattatttttataatatttaatatatacttataaacatgttctacattaaagtgcgaatttcatttgtttcttgataaatatcgataagccctgagatttgattttttttctttttactcctacctgaattgtaacgaaaaataatattgaaaattacttagtaattcccacagcaaacacggggaatcccctagtttttaagataaatcatggccatgggaattatgggcttgtttggtttagtgctctacgaatactagtattggtagtgcaatgtatcaattcttttttattattatacggatagtaaatcagaatttttattatagtaccaaattagttttaatatatctaatattgaacgtattttgatattttatttttttataaatatggttagtaatttgaattagaagggggaaaaaaaggtcacttggtttggtttgcagccaaagcgacaaagctgcatgtggagggcgaggttaaggtaatcgtggatgtccacgatgtcctctgcgtcgtagaaggcagatctgaggctctgcacccacttgtccagatacggcatggatgtcatgtgttccatctgcctacgcagctgcggctcaagacatgccaccaggttgcgcagctgggcttcttggtcgcagttgagcaggtcgatgcctttgttcaccgccttggtggtcatgggcgacacgatccatccgatcgtcctgatcgcccacccaaccgccacaacctccaacgccatgacgatcgagactcaaagtaaatgctgcttgttggttaattgaacgatcgatcaatataatcgtctctcgtcgacggagttggagcacaatgcaagactatatatgcttggtgccggccggatttatggaacgaggacctagctatagcttaactcaagtcaagtcaaccccggccggtgcaccatcagtgaggctatctgtggaaattaatctaaaggaaaatcaacccacgtggggtttgggttgttcccccaccttatttttttgaaaagtactcattttattatatagaaaagacagagattagggaaagaatccccagtacaaattgatcatacaccaaaccatcctttctaaagatgagacagactgaactaagggaaacaaattcctgatgtagccatacagtgataatggatgagatcgacaggagtagcggcgttgccgtgacgactacatccatgggccttcattgacgtgcacaccgcttgacaaaccgataatcccctttggttgcctccacgggaacggcacaaattgaaggtttgttgttgagtcgtagattttggtgtgagcttcaccggactttaacagttgatttccacggagtttatcattgaatctgaggagcactgacttgcaatcctgcgaaacaagattgctcggacggtctgccctcaacccgaacgacgaacccagcatgggtaccactgcatagaaacatcaagaaagaggtccccaaactccggccaaccttagtcaagaactaggatggcattgattgatctgctgtctttctacttcagcttggagctcaacaaaggaggatgaggagaaattaacctggtggccagctgcaattccttgatgagcaactatcatccccagcccatctaccaacagatcatgcaagcaccaatccgaccagcaccaacgcagcattctcgagaagcacaggctgccaaatattttgttacctgctgtccttgaatccgagagctgtcgccaccccaacaaacaccgtcgccgccccaacatctggagggggagaggccggagacggagagggtgggtcatggtgtccggggacaaggcagccaacgccgcaactgtcgttgcgtgccggccagatgcagggagggggcagcgccaccaaacttgtgctggatctgacaggttgaagaagttcctttgaccgatctgccttcccctcattgcaactcctcctctgtttttccaaactaaaccctcggcgactaaaagcgactccttccgtcgccgggacgacggtgccgaactccggcgatccatcgacttgaacaaacgggaagaacccgacgacaggaagacccgactacgagagaagaccaacacctaagctaatagattactaaagggacgaaaatcccgccccctcccctcacgccggcgatcggagggtcgccggagatggaagggaaggggccgggagaaaaggggattttttttttctccggaaacgcctgtttcaggttgttcccccacctgacacccaatccctccctgtgaatccccctctcgtccacttgcgcgggtggttggtgggattattagcagatattatccctgggtttggatagagggggattagaagggatcactaccattcaaaataattcagaaatgataagaaaaaaaattgatcatgaaaacagaaaaaaaatcaatgtgcaaaataattgtaaaaagcccccaaaaatagaaaaacgtagatttaccacagacgaattctgaaaaatagtccagaattttttttaaaaaatcataattttggatagattaaattctacaagcagtaaaacatccaaaataatcatatgttttccatagatatgctagtcacagacaagagattgagttgtcatactagtatagcaatagattggaaattaagcgcatatatcgtcttccacattcggccctgcatatactgatctgttgaaacagtacaattacagactcctaaatctgcagttctgctaattgaattaccattctactacgaataacagttctgcaggcaaaccccaaaagaactgacgaaactaaaactagtttatcatcaagcccttgaaaacaaacttttccttgtctccgaatttttcccaaaaataaagagagttcggcaactaccaccatcagcttccaaatccatcaaaagtcatgtctcttaatcttaaaaacctgaaaaacaaacaggaaacattatggacacctgaatagtcatatgaaaatttgtttggaaagtgacaattattctgtgttaatttggaaaactaaaataagaagtgagttatcatctacaattctggaacaaaaatatttttaagacaaggaagaaggtcaggcacgattaagcccagtacatatactcacaattttcagcttttaagcactcaaccatacttgctatagaaaacaaggactatttggacagataaagtacttaccctgatatacatcatctctacttgtctttgtctgaacggaccagaaagccagcgtctcatttttcatattgttcttccctgaaaggttaatccttgaatataagcacagaacttgcaatgccaacagttgcaatatcaacacaaatgagttatatgtcgatttgtccgtactccgtagttctgcactacatatagtaataattgagctagtcaatgatattcatgtttttgtcatatctgtgagaccatgggcagtggcagcactgctgaatgtggtaaattcatcagatatatcatataattattaattatgttcgtgatagagcaggtagctccttggaaaaagaaaagtatgcataatacctgttatatttgtgtttcttggagtatcaaccaataatgtaggacctgtccagcaaagaggaaatcggtcaactttaaatatctataactacctgacaaattttcactcaagtttcatttgcaatttcctttggaatgtattacattacagagagtgcacttctaaagaattgttgaataggcatttcacacttttcacagctattatctcacaacatttcttcagctaaactgttaattttgttgatcgaatcatatcaggtgaaccttcaatgttggaacaaagccaacgaaaaaattgatctttgcaagcagcaggacaagaagctgtgctctgcacctctgcatgagagaagcaactggaacaatgacaggctaatactagcacctaacactgaaatggagctgtctaatttcacttgatcctgtcaactgtcagtatacaaagggagatcgtgcaaaatcagaaagactggtttggcttctactcgctcatcttaatgattggtgggagaaaggacagacaccgagcaccaactaggttagaaatatgactaatacttcaatccatacagccactcaatacatcaactagcaacaaattcatccactagaaaagtcacaaaatcttttcatagtaggaaaagaggagatcaagaatcagacctgcttcttgatgtccgggctgttgccctcgaccttgccctctcccgcaaccggtgaatccgaagcgaggaaggagagatggcgagcggcggcggctgtagcgggatggagaccggcggtgaccgagggcgggaaggagaccagtggtggctggagatatgctgctcccggacctcgcgccgcctccaaacctagcgccgtgaggagtcgaggaagatgagcgccgtgtatgctcgggaagaaaaaaatcgtctccgagacgatttttctgtaccgggggtttggcatggatcgggtggagaatttcccccaccccacctcgggccaggcgaacgcgtacatgcaccacggaagaaaattagatctggccgggatggcacacggggatttcggcccattccccccaaacctagcctataagaacgaggcctgagagatctattcttaaatcatttgtgttgatcaggaaacatgcgtatgggacaaattgatgtgttcgcactatattatcttccatagtcgacctaattttttgcacatttaattttggggggccataaacctgcacgaacggcgttcacgaatcaatgaatcatgggctaacacttgagtaagaaattatcgttgttctcagtcaaattatttgacatttgattttgttttgtatccgtgctagttggtggctcactactgcttccggttcaaaattttcctctcgttttgtgagattgaggtgactagacttatgactagtaattattaagacccacttttgaatcaaacggaagttgtaggaattttggagaattttatcctcataggattatttttctagtagatagctccttgaataaaaggaatagacacaaatgaatcctatggaatacctcttccatgcaagttttggaggaaatttaatatgaagtagaatctcatgaaattttcttttgactttttatctctcctctaattcctgtgtttttcttgtgatccaatcaaacgaccattcttattatttttctgtgttttgcaatgctttatttcagtgccccttttaattggaggaaaaatggaagaaaaacaaagaaattaaaatcgtacactgttcatgcctttaattgctaggaatgagtaaaggaaaaatgtaggaaactttcctattcctatgattctggaggaaaaatataggaaatttaacattcactctaagctaaagttctagctatctcgcttaggatcgagacaaatctagtagctcatggtcacttttctattcaattagtgtagattagatatgtataagtaaataaccaactcaattaactccaataatacagacccatttacggtccaatcaaacactgtgttttccaattctctgttttgcatatgtttcatatcctatttctttgtttttcctattcttacaat

SEQ ID NO: 16184 - DNA, 1719 bp, Oryza sativa
ccatatacccacaatgattgattctccgactggttacatgggataataaatcatatggttagaatatgtataggataagactcgggtattgcgttgtcttgtgtatcaagtaaataacctgtaatcttagtcggttatgattgtaaagtagttatagagatttaaaccgtaaagataaagtctctatcttgtaatcccagcttctccaactatataaggagggcaggacgccttattggggggcataaccacaattgagatcgtcagatcaataccacaatcagcggaatattttcccagacaggagtaagatattacttctcattgagagggtctgaacctgtataattttttttatctcataacccatctactttcctacttgttcgctaccccttttagtattgctgaaatatagttttgacagttggcgcgctaggtaggggcagcgtcaagttttctcgccgactagtgcgatgggatctacatcaggcatcgacgacttcgccttcccccaagagcaggtgtatcgctttggcagccttgacttcatcaccgacaatttcggcaagatctcttttcttagctcggattcaaaccagtcggtaggagacaaccactccactccgtttggtttatcaaatacggcagagacctaccctaaagttttctcccttgagttggcgtcaaaccactcgggtgagatcatgaagacctcaccttcttcaccaagttccacttcagacgtgtcggcataccctcaaatcaccatgcgactaatgtggatgtggattttcattcctcaagaggacaccccttcgttttttttaaattacacagttcaacgcagatactcacaacgcacatccactcacccctatgaacacacgcaaaccctacccctacgagcatcttcgaaactgagccggcaaatccatcttggagattgacgaaatcaccacaggcgcctcgctgtcgacgggtacatcgcctaccactgaaaacacaaagccgttaaatcctggaaaattcgctcccacgaggagtccaaccaggacctaaggtgctactgagactcttgtaaccactaaatagttatcaaaatattcgaaaaaaattgacaacatagatttatatgaaatatatcactccacaaacatgcaataccaaattcaacttttataatttgtaaaaaaaactgaaaatagttattgtacattctcagctttatttgttattgtacatgctgctgctgctgctgattcgactcggacaagaaatgcttttcttttcttttttcttttcattttccaaattcgagtttttttggaagtccaccaaagtcgagttctggcgggagccgtggtcaacgtgggccgaaccaacacgttacggcccaatattagtgggccgcacggagcacaatataagcccgttcaggcccaaccgtacggcaaccacctccgatcccctctcctcactccgtctcggcggcggcggcggcggcgaggcgtctccgacgaaaaccctagcatccctccccccacctcgcgtctgtctacgaagccatggtgagtagcaaccactcccacctctccgttccgatctgctccagatccatctgaccgatttctgttgttcaggagaggcgagatcgcggcggcggaagcagcagcaggaatcctcatggagctccggtggaagaggaggaggagctgg

SEQ ID NO: 16185 - DNA, 1734 bp, Oryza sativa
tgaaggttgctctgttgggaggcactagattggaatatctggtctttcaacaggctagttttataggtgtaaactaggaaaatctatcaatgcaatgacttgctgtagttcctatcaatgcaaccttttgttcttggtgatgttactttactctgttttcctctattttgttttgttgatcaatccttgctccttcctcattcttctctgaaccttccccctttctctctgcaccttctgtttgagcagtacaagactagtcataactaatcaccatgtctgtggcataacgacttgactgaactatatgatttaacctcttttgttagttatccctttatgtctattcaaaatttttaactatcattatgttgagttctctctatttttctaactagttactatcattgattaaaaaaaaaacagtcatcgctttaatattttctgctaaaattctggcaccttcacgacaatgcccttttctctttaatgttatataggtataacagagccaataaaagctggtatcagagatgcaaaattgggtgtggggaagcaagagcaagatgacttcttcacatcagaagataatgtgcaaaggaggaaattaaacatagagcttgaggagactgaagaacatataaagaagcgcgaggtgtgcaatcgaacactgattccttaatattctatttcttcagggttgatgcttgcactttgaaatcttatatctagctgttggcattacatattgatatttgtatcttattcatgcaagagttgctagcatcagccctcatgatccttgagcattttgggcattttttatttggtggttctttttcctgcttggtgcaaatcatgacaatccaggtcatagcagaacgcgagcagaaaatacgtagtgaggtcaaggagatacagaaggtgttcttttgcagtctctgtaacaagcagtacaaattggcgcatgaatttgagtctcatttgagctcatacgaccacaatcataggaaggtaatgtgtttacttggtgcagcgaacttctcttctactgccttttcttttgtgaagtatgggtgcacatacatatattcccccttcactcttacatattaattgttcaggactatatttctgataagttcactgtggttacaacagaggttcaaggaaatgaaagaaatgcaaagcagcagcagcagcagccgtgatgacaggcagaaacgtgagcagcaacgagaagagaaggagctggcaaaatttgctcaactgtatccatcccatgttttagtcaataacaatgataactcaatgatgtgctaactatgaacaaatgtgctgaatgtttattgaacttgcaatttccttaatgggacttcagtgctgatgctcatagaaagcagcagcagcagaagcaagaaccatcagagagctcatcagagagaattacaatgaagaacttgcctaacccttcaaatcaggatcagcgtaaaaccttgaagtttggcttctccaaaatggctccttccaaggtaccccacatctgaacaacatattttgttaaactgatatgaccatttatggaagtaaagtagttgtgtgcttgcatggaactctgtgaatttgttttatcttttctatattctccattcttttttcattgctctagtttgccgttaagttgaaactttcttaggcttttttgttaaactgtaatttcctctcagcatatgt

SEQ ID NO: 16186 - DNA, 703 bp, Oryza sativa
acacccttcctccgtactctacagtcgggcctagcaaggcttggttgctccagttcactgtaagtaaataagttgttattatcatacatgcttatttgcgaccggatgagtgttttgtactaacatttcattctcaattgtaggcggaccttctgcaccctgacgctgatgattactcggtccgacgctcccttgaggcgtacctgttgtggttgttcgggtgggtgatgttcactagcacccacgggcacgctgtggacttccggctagtccactacgcacggtccatcgcggatgctcagccacaggacgtgccgcagtggagctggggttctgccgtgctagcagccacgtaccgtgccctctgtgaggcgtgcacgaagactgacgcgggagcgatcatcgctggctgccctatgttgcttcagctttgggcagccgagaggtttgccataggttgaccagtggtggacagcgcaccctacggggttggtcgcagcgcgcagtggccagaggacggtcccacgatggggacttactggtgtcgacgtggggttagtgcaacttcgctgcgttataagtttatcagtcgtcttcttttttttttcttcacataacatgtctaattccgatcatgtttattgcagcgtcgttacgctcacgtccaggtgagacgtggttacccggacttcgtgttcgagtt

SEQ ID NO: 16187 - DNA, 660 bp, Oryza sativa
acacggctggcctattatgccgccgctgttgggcgtctacgacttcaccgccggcctgcttccgtcgccgccgagtggtgcctccgcctacacggctggcctattatgccgccgctgttgggcgtctacgacttcaccgccggcctgcctccgtcgccgccgagtggtgcctccgcctacacggctggcctattatgccgccgctgttgggcgtctacgacttcaccgccggcctgcctccgtcgccgccgagtggtgcctccgcctacacggctggcctattatgccgccgctgttgggcgtctacgacttcaccgccggcctgcctccgtcgccgccgagtggtgcctccgcctacacggctggcctattatgccgccgctgttgggcgtctacgacttcaccgccggcctgcctccgtcgccgccgagtggtgcctccgcctacacggctggcctattatgccgccgctgttgggcgtctacgacttcaccgccggcctgcctccgtcgccgccgattggtgcctccgcctacacggctggcctattatgccgccgctgttgggcgtctacgacttcaccgccggcctgcctccgtcgccgccgagtggtgcctccgcctacacggctggcctattatgccgcgctgttgggcgtct

SEQ ID NO: 16188 - DNA, 3218 bp, Oryza sativa
ccccgcacgcgctacctccaccaattccgccaccataatatccgtgattgccgccgcccaggccattttttcctctcttcatcctcgctctcgcccctcgccataaaaaacgaggtgatcgtcacagcggcaatcctccccgcaacgaggtggcacaggcatggcggcctcaacatctttgtgttgcttccttttctttatttggtgcactcactgcattcgactattaaactctcttgtttttatttttcactaattatttttagagattatgcataactttccgtttggctaatattgtgcattgttttaaatgatgtttcacatttcagttacaaatggttcatcaaacatctagtgtgatatgccaataattaatttttttaagtaatgtttccccctccatcactaatgttgcatgtatattacaaaactttcatcattcaattacatagcatggatcagatgttctgaaccatagtctcttctattaggtgttgtcatctcatattttataaaactgatttaccttaatcatgttttaaataaataaacccatgaataatgaaaactgagtttccacaaaccagggaaatcatttttttaatcaaaaactactccatgctgtttttactttttagccattgcttcgttcgtccaccccacctcatcgctagcaccatcaccttcttcaccaactatattcatccttctaagacaagagccagtggaccacagcagcattttcccctccatgccacgcattgcgctcccaagtcattcctcaacagctttggcagcatcaccatcaatgtctaacatctttgtcaacaatgaccttgattgtgtcaccatctccatccttagtgcaaccttacatgcatgggcttttgctaattggtgcgcgcgccagatccgtatctagcgcgagcgccctccacccgctgccacgggtctcttttttttagcgattttttctgtgcgtttttccttttttttggcgatttttttcttttcattttgctcttttttattattctttttaaaaatttcagcacaagtgcttttaaatattttgtgttataactttttaaatcatgacttgaaaatttttaaatcttaacttgaaagttttcaaatttagacttgaaagttttcaaatctcgagttgaaagtttttaaatctgggttgaaagtttttgaaatttgagatgaaagttttcaaatcttgagttggaagttttcaactctgagttgaaagttttcaaatctcgagttgaaagttttcaaatctgggttgaaagttttcaaaattgagatgaaaagttgaaagttttcaaaatttgacttaaaaaattcaaaatttcgagttgaaagttttcaaatcaggtttaaaattttgaaaatttgacttcagatatagttttcgctgcctgactgcgacatactccgtactactatagtttagataagacatgataatgtttttagggagtgttacgagatgcaacgagtaactgtatggagaaggagcaagcaagatgacagtgaagaggaagtaaaaccttgcttgccgaacccttttgcccttccaacccatcttctggagccgacgttggaggaggtgagctgcgtgtcgacggaggcctgctccagcacctccgtgtcgaggttctccgtcgggcggtggctcatcggcagccggaactcctcaaaatcatcatcctcctccaggccgtacactccatccccctcctcatcctcctccaccggagctccaggaaaattcttaatgctgttgccgcgatcgagttctccatcaactccctctcgacatacttgctaaaatcatacccgctccccttcttgctgaacccgcgtagctctgtggtctatcctgaacacccaaaaggcagaacaagctggatcacaggatcggtcagatggatctggagccgagccgacgaagcaactatccgagcggatcgaaacggcgaggtcttggttgtggatactcaccatgggaaagaggggaagagatgcgtgctagggttttcgtcggagacgcctcgccgccgagaaggagtgaggagaggggatcggaggcggttgtcgtacggttgggcctgaacagggttatattgtgtgcggaaaaagtacaccgaaggcccctcaacttgtcatcaaaatcgtcccctaatcttttctaaaatgacactggacccacatttcatagacacaaatgggcccatttgttatccactagaagtgtcaaaacagcgaagctccaatgtttgcctgaactcttactctcagaatgcctttatgcttaaaattgatctttctaaagcttttgatagattggaatgggattttattgactctgctcttcaaaggaaagatttttcatcatcatttaattaacctggttaaatcctacattagttcctcttctttttctgtaatcattaatggtcaatcttatggttctttcaatgctaacaggggtataagacaaggctgtcctctttctccttatcttttttttcttgctttaaatgaactttctgatcaactcaataaggttcttcataatcaacacatcaatggcattaaactaagtgattctggacctgttattcactctcttctttatgcaaatgacctcatcattacaggtacagctaatattgaagaagcttgtcagataaagaacatcattgaaaacttttgcaggaactcagtgcaaactccaaattatgataaatccagtataatgttcagtaagaaaaccccttcccacattcaagaggctataaggctcattttccctatcaatctcatggatgccaacactagacatttaggtcaccctctttttgtcaccaatagaaacaagtttgttatctataaattcatcattgataaattcaaagccaagctgaccaccttgaaggctaataatatgtctcatgcatgccgtctgaccttgattaactctgtctttgcttctttacctgtctactatatggctactattcttctcttaaaaaatattcttaataaaatcacagctattattagaaaactttggtgggcaggtgttagagaaggacatgacaaaaatcctttatgcttgagagcttggaaggacatttgcaggcccatttcaaagggaggtcttggtattagagatatacaagctgttaataaaagct

SEQ ID NO: 16189 - DNA, 733 bp, Oryza sativa
agtggtagctgtataaaccagatgtagaggcgagggcactagtcatcagcagacgagacgaccggcgatgaagatggtaaggccaatcaacactggcagaatcatgcagccatggaagtgaagaaaccagtcggcagccatggcaaacgtaggcagcttgtgttgaagatactaatgcctattagtagtgacagcgatgtagccagccgtgaagaagatagcatcagttggcgttataacaagccagccgtgcaggcggtgacaccagtcagcggcggatgcggcggccggtcataataggccagccgtgcaggcggaaacaccagtcggcggcggcgaaggcaagccgatcggtgaagacgtagacgcccaacaacggcagcataataagtcagccgtgcaggcggaagcaccagtcggcggcggacgaggcggccggtcggtgaagacgtagacgcccaacaacggcggcataaaggccagccgtgcaggcggaaacaccagtcggcagcggtcgaggcggccggtcggtgaagacgtagacgcccaacaacggcggcataataagtcagccgtgcaggcggaagcaccagtcggcggcggacgaggcggccggtcggtgaagatgtagacgcccaacaacggcagcataataggccagccgtgcaggcggaaacaccagtcggcggcggtcgaggcggccggtcggtgaagacgtagacgcccaacagcg

SEQ ID NO: 16190 - DNA, 7837 bp, Oryza sativa
aagcactactttcaggcccacaaagtcactgtgccgtcgcagtaccctttgggcgaagtgctacggggcaaggaaattactggctgactcagcaagtgggcggcggagctatctcccttcgacctacattttgtcgcccgcagtgccatcaagtctcaagtcctagttgacttcgtggccgaatggacacctgcattctcccctgaacccgagcccgttgaacagccttgggtaatgtactctgacggctcgtggtcacacaagggggcgggcgccgcggcggtactcactttgccaaggggcgtgccgatttggtatgctgcaaggctgcagttcgacacgaccaacaacacgatcgaatacgaagctgtactgttgggcctaagaaaggcgaaagagttgggggttcggcgcttgcttatccgaacagactccaaactggtggcaagtcatgttgacaaatcctttgagacaaaagaagaaggaatgaaaaggtatctagaggctgttcgatctatggaaaagtgcttcgccggtataacggtcgaacacttacctagaggtcagaatgaggaagcagataccctggcgaaatctgccgcctgtggaggcccgcattcaccaagcatcttttttgaagtcttgtacgcaccaagtgtgcccacagaaagcctggacatcatggcaatcgaccaggcagaactgggcgaagatccagaggattggcgaacaccgtttgtcaagtacctcaagaacggctggctcccggaggatgaagcagaagcgaagcgcttacagctcagagccacaaaatacaagctggtctccagccagctgtatcgctccagggtgctccaacccttacttcactgcatctccttcgccgaagcagaggaaatggcgaaagagatacaccaggggctgtgcggtgcacatcaagccgcaagaacggttgcctccaaagtgttctgccagggagtgtattggcccaccgtgctgaaagtttgtgtcgagcaagccaagaagtgcgaaagttgccagcggcatggctgaagccaaacggcacctcagtatgagctgcaacctatagcaccagtctggcctttcgccagatgggggttagacatcatcggcccatccccagtggcgcgaaatgggtacaagttcgcaattatggccatcgaatacttctcccgttgtatcgaagccgaaccactcagtgcgatcatttcggtagctgtacagaagttcgtgtggaagaacattgtttgccgtttcggagtgccaaaagaattcatcgctgacaacggcaagcaattcgactctgataagttcagagaaatgtgcgaagggctaaatctggaaatcaggttcgcttcggtcgcacacccacagtcaaatggggcgtccaaacgctcagatggcaaaatccttgaggcgctaaagaaaaggcttgagggggcggcgaagggtaaacggccagacgaaatgctatctgttctctgtgcccttcaaacgacccccacaaggccaaccaagttcagcccgttcatgcttctctatggcgatgaagcaatgaccccaactgagctaggggctaactccccaagggtaatattctctggaggtgaagatgggcgcgaggtgtcactcgaactccttgaaagggtgagagtcgaagcactggaacacatgcgcaaatacgccacaagcacttcggcaacttataacaaaaaagttcgaccgacagagctattgcctggtcatctcgtcctaaggaagaaggcgaacccggtggcggtcgggaagcttgaattgaagtgggaagggccatacctcatcaagtacaggtccaggacaggctcctttcacctagcgacgctggaaggcgaagagttcaaccattcctggaacgctgcttcccttaagcgtttctatgtctagaatgggtggcacccaaatcgccaacttgtaaaaatatacatattgttatgtaagcctttcggcactatgtaagcccttaggcacaaaaatgcaaaaaaatagaggaaaatgaaaaaagaaaaaaaactggatgtaaggctattatccaccctggaggcctgaaccagtataaaatctttgtgtctttcgcctttttacttgtgtgaatgataattcgttgaaaaaccccaaggcaaacgcctgatcagcgaaaacgccagggggccgaaacgaatcggccgaagaatttctcgccgaacattgagaccgcgacagcttgttttgggaaataactaaccgaacaccgttatactcgatctatgtgaaaacacaagcgcttctttcggcgcgggacaccaccgatcgaaaacggaagacgaaagctaaaaagtcagcagacctatttcgctaatatacgcaaaggggccgacatgttccaacctaacgaaagcatgaaaggtgacaatgcgaaaaatagcgaaaaggaaataacacacatctttattaaacttcgaaaaaataatcgaagagtacaagccatacaacatggtacaagcaaagaaagcaacagcttcacagcctacctcacaaataaattacatcttcgcccccaaagcaatccccactccctaaggaatgattcggcgaacatggctcgtcatcactactaatgtcatacacaaccctaagggggaagggggcgaaacacaaactagaccataacgacgctgggcgatcatttcctgacgatcggtcctctgatggtttcaccaaaagcgaaccatttcctcccggtgttctacatgggcacaatcgtagtcctctagggttcgcccggggtgcgtccacatccagccggcaactttcagaaccttctagctgttgccgtttattatcatctcgcagtaaacgagccgaaaaggacgcctaatcttcggcaaacttttcgccgcaacaaacttctcgttatcgtttcgccaattaccagtggggggccgaacgcatactttccggccacaagcctactaataaagcacaaaagaacaagtgcaaaaggaaaaagttcggatgaaatcaataccactgtccaacaggataataaggttggcgaaacactaatttttccattaacgaaaagtcataagagctacaaggcgaaaacggctaaaagccgaacatgcaaaaagcctacatacacagcagggctaccaacaaaagaaaaaaaaagaaagtcatacgagggcgaagggcctcacacctcagggtggtctcggccttcatcttcctcgcccccatgctcagtagcgggatccgacggcccggggtcttcgcctacgttggcggtagtggtgtctttggccttcgccatcttctcaagttgctcgcgtaggcgggtcttcgcacagtccttgccgccatcctcccaaaagccctttcagaaggcccttaaagccgctccggagacctgggagttttcgggccagtcccattcacgagctcggagaagttttccacatggccgcaaccatgctcgtgaagcaagctgagcacgaaacccaccaaaacacgcgcgcagcagtccccataggcgctagccacttcgacaactgagccggccccttcttgcgtccactcagaaaagtcgaaagccatcccgtcatctcccggggcacccttcgcgcgcgcgccaagatcgttgagggccagcctaagagtgtagtaggcttgcttggcggactccgctgccggtgccatggtcgaagcaacagcttcggccgggacaagacgagcctcaagagacttgatcttctcctcggccgcagcaagttgacgctcccattcggtatcccgcttgttcgccgtctcaagctccgcgcgaagagacttgacttcgcccgtgagagttttgttctccgcgttcgtcttctttagggcgttcgctacaacacgtcgtttgtcatctttatggcgaaggtcctcctcgtttttccggagacgaagctggtacccatccagcctctccaaggcggacttctccgtgcgtaaggggaaccaaattgtatctacagtcattccgatttgagaaagtggtcaaagtggagagagatttgtaggtgagggagaattggagagatattagcagatttgttacagctgagattccattttggcgccttggcggtaatattttggtgggagaatttttagatccgcgggaattatttggaggcaaattgagactcccctgaaaaaaaaaactgagactgtattcttttaaaaaagaaaaatggttttgactacgaattatcgtatcaaaaaaaaattatattttcttttctacctatttggtgggaaaagtttttagattggtggaaattatttggaggcaaattgtgctgtagaatgagactgtattctttattaaagaaaagatggttttctacaactatgaattatcctattttaaatttgtaccgtcaaaaaatttcagttaacttctgtaccattaaatatttggtatgaaactttttagattggcgggaattatttggaggtaattcgtgctttggaggtattgtaaataagattgattgtagcgagagagattgagcgagagcgagagattaagggaatgaatgagcggatcctttattgataacagtgttacaatatataggagggagagaggcggcaaccgaagacgcgatggtttgggaaccatcgcatctgttgctagaatcgccgtgaggcgagaagaggtgtggggcacaaccaaccgtcatgtccctgaattggttgctgctctatccaaatatatggatgagatcacccaaatatttcataacactcccccttgatcgaatccagctttgatcattgctcatttattgttccagatatctgtaaagataatcttagaaataattatagttagtatattaaatacatcacgtaaaactcctcgaaaacccagtgggaaaaataaggagagaaccgtgatatattattgactattgttagatctcttatgagtaaagctcatagtatgatccaaaatagtatattatctacagttatcatttagtaaaaaccccaatgaggaaaagccaaatgataagacatataacttatgttgatattacctcgttaaaaactttggatgagaaaacctaaagggtaaaactcatacaaaggaaaaagagtataatatgacgaaaataggttattttccagagagaggtactccccctgaatcctgcaaatttttaagtcgtctcataccaattccctcgacacatttaaagaatgtggagtatggtaaagattttgtgaataaatcagcaagattatcacatgacttagtttgcaagatgtttatctctccatgttgctgaagctcatgaggataaaaaaatttaggagcaatatgctttgtgatgttgctcttaatataaccagtttccatctgaacaacacaagcggcattatcttcatagataatggtaggtgattataatgaaccaataccacaagatgttaatatgtggttaaccattctgcgaagccatacacattcacgtgatgcctcgtataatgcaattatttcagaatgatttgtggaagtggctaccagagtctgtttagaagacttccttgaaatagcagttccaccttgtaaaaatacgaatcctgtttgtgatatggcattgtggggatcagatagatagccagcatcagtatacccaattaaagtaggatcctggtcctttttaaagaaaagtcctagatctcttgtgccattaagatattggaagacattcttaactccagtccaatggcgtttggtaggagcagcgctgtatctcgctaatagatttaccgagaaagcaatatctggtctcgtactatttgcaagatacataagtgcgccaatagcactaaggtatgggaaatcaggtccaagtacatcctcaccatcttcctttggtctaaatggatctttcttcacgtctagagatcgaaccaccataggggttttggaaggatacgacttgtccatattgaatttctccaaaattttatgggtatatgcactatggtgcacaaggattccagaaggtaaatgctcaagttgtagacctaagcaaaatttggtttgacccaaatccttcatctcaaattccgtctttaaatgatgacgtgcttcattaatatcttgtgtattgccaatgatgttaagatcatcgacatataccgagataatacaaaatcctgtgggggactttttgataaagacgcacgggcaatcatcatttttagtgtatccctttagggaaaggaattcacttaatcagttgtaccacatcctgcccgattgttttaagccataaagtgacttctgcaacttaacacaatacatgttacgatttaccttctgattcgggatatcgttccatcaggaaccttcatgtaaatatcagaatcaagtgacccataaagatatgctgtcactacgtccatcaactgcataaatagacgattttgtactgccaatgatattaaatatcggaaagttataccactcataactggagagtaagtttcgttgaaatcaacgccaggtttttgcgtaaaaccttgtgctacaagccttgctttatatctcaccacctcattgttttcattctgtttccggacgaaaacccatttgtatcccccaggaaagataccacgaggagtaggcattacagccgagaatacatctcttttgtaaagcgaggccaattctgtgtcaattgcgtccttccatttgttccagtcagagcgcttttggcactcttttatagacctaggttctggatcaacttggaggcaatcagcaatttgttcaaaaaaattagtgtcgacaattgtagctcttctatcaaaagattctccagtttcagagtagttgatggcaatttcatcaacccttacagactcaccatgatctcctgaaacaatatgtctatggtcttccgaattcctagtcttagcattgtgcaccactgagctaggttgcagactatcacgatctgcttgatatatagtatcaattcggtgtgtaccaactaaaggttggtttgcatttaccgtctttctttgcttattagcaattgtttctcgctgagtggcctgtcggctcccaaaactaacgattcggaaaccgacatgtttaactgtatcaagccctggatcagtagattgatacaggttcaacaatctggatcttcatcgcatacatttggtaaagactccaaaggagatatctttatataaaataataggacatttacaagtttgtggctaactattacagcagaggctatacgatgactcaactctgccgttttactatagaattaaaccatctaactacactagacttgaagattaggtttaaagggaactaacttatgtgattgaactcccagcttcggcaaaaactccaattaaactctgaaaaagaggggttgaagcaagggtgagtacaacgtactcagcaagctattatattaaccaataatgaatatatgaaatggtaatatctgtgtagagctaggtttacttgcagaaagctgagaataaagaggtagaaatcctgaaatgcttgatatgcaacagtatttaagaaaatcttgaattatatttctaaccaaagtaccatatgagtcccgatgctcaatccgtgagcacattcatactgcagtagatgtacgctttacccgcagtccacgacttgccaataatcattagcttagtcatggcccatattaggttattaacaattgtggcacctggttcatgaactcta

SEQ ID NO: 16191 - DNA, 2183 bp, Oryza sativa
gttcaaggacaaaaattggaggatttcttggaccataattcataataataaaaatggtttttaaactaaatttgaataaaagagttttagtcgaaagaaggtttaatatttgaaaatagaatttcaacaagaaataccaaatatgtttttaaatgaaaaacacaaaagggattaaataccagagaggttttatgcgagttagttttaggagctccctctaattatattttcctaggtttagaaggttattaagaacataagaatcagcatgatgcaagattagaaaatgacacattttcagaatgttacatggccatacttcttcctctctttttagtgagtggaagttgagtagttttatttggtacctccactctttctggcgcattctgagcgggaatgaaagatttagtcacacctttataattggtaaatgcatctggcaggttatttgcaagtctttgcaaatgtataattttctgaacttgaagttcagtttcagtagtacgtgggtctgaggctggaataccctgggcatcccaatcaatttcctggcattctttctggtacttgaagtctccccctaatgccgggaaatgttcctcatcaaagatagagtcagcgaaccgggcagtaaatagatcacctgttaagggttctaaatactttatgatcgacggagatttgaatcccacatagatccccactttcctgtgtgggcccatagctgtacgctgtggtggtgagatcgatatgtatacagcacaaccgaacttacgcaaatgggaaatacttggaggatttccacgtactaactgcattggggaagtttcatgatatgcagttggtcgtagttggacaaggtcagcagcgtgcagaactgcatgaccctaacacgacgaaggtaatttgcaattcatcaataatggtcgagcaataagcttaattcttttgatcaatgattcagacaaaccattttgtgtgtggacatatggaacagagtgctgaacctgaattcccaatgccatacaataatcatcgaaagcatgagatgtaaattcggcagcgttgtctatacggattgattgaatcctatgttcagggtaatttgccttcagccttataatttgagacattaatttggcaaaggcatggtttcgtgtcgatagaagacacacatgagaccatctagtagatgcgtcaatcaaaaccataaagtacctgaacggtccatatcttggcacaatagggccacatttatctccttgaatgcgttcaaggaatttaagtggttcggctctgattttgagataagatggtctcaaaatcagtttcccagtagcacatgcagtgcatacaaaatcagaggatttggaaaatttgtcagtgatcaaatgatgaccaatagagttgccaataatttttctcatcatcccgataccggggtgcccaagtcgatcatgccaagtgtggaatgcatcaacattttgaaaaattactttatacgcaacatgtgcaatgggtttaatgtatgtatagtacaatcccgatttgagagatggaattttctcgcaaatgcatttgccatatccgttttgtttggttaagagaagaaattcttctcgattatccatatgggtttcaatgtgaaacccattttgatggatatctctataacttagtagggtacgggttgaatcaggatacaataaagcatcctcgattataatttgtgtacccattgggagtgtaataattgctcgtccggagccaactatcacagtatcgcgcccagcgatagtcaaaactttgccttctctctttttgagagtttgaaaatatttgatctccctaagtatagagtttgtggtaccactgtccacaagacataattcctctccaatcggagcgatatccttagacatctataatgaaagaagaattgcttgattaagaattctttatccaatatatatacatacatacaataattaaaacatcaaatacatagtatgacgtttacatatgttaaaagtacatactctaatgactagcaagccatacaactttacaatataagggagttcgtacttatctacttattacaaccaatactgtttggcaaacttataggatatcaatatactgtttcaagcacactgagataagagcagctgatctcc

SEQ ID NO: 16192 - DNA, 3296 bp, Oryza sativa
cggaggcggaggaggaggcgcgacagggacgggtgggggaaccacaaccggagttgcagtcacacggcggcgagggtagtggcggcggccaccaaccctagccctgcctctgcgggatccccggagtgtcctcctcatcggtcggcgaagaagatggcggagccggcgtgcgcgctgatgtcgagggaggccaagaacggcatccatgattcaatgaaaggtaggcatcgtaccttctgtttttcctgttcgctttttctgtagatcaaaaagtgatgtttccttctttcacttcgcgatctccttcgcgagagcgaaaagtgctgataacgtattgtaaataagattgattgtagcgagagagattgagcgagagcgagagattaagggaatgaatgagcggatcctttattgataacagtgttacaatatataggagggagaaaggcggcaaccgaaggcgcgatggtttgggaaccatcgcgtccgttgctagaattgccgtgaggcgagaagaggtgtggggcacaaccaaccgtcgtgtccctgaattggttgctgctctatccaaatatatggatgagatcacccaaatatttcataacaggaggacgctccctcctggaaaaaaatagaaccctctaaaaaattgaaactgcattctttttaaacaaaaagatggttttctacaactatgaattatactactttaattttgtacctgtcgaaacatggattcggcaataataaaagggggtagcgcacgagacctaaaagtggatggatgcggagacaaaggatttagacaggttcaggccctctcaatgagaggtaataccctactcctgtttggggatttaaatccgccgggtgtgtattgatctgacgatcaggttatgtcatcatgccccctagagggcctcctgcccaccttatatagggtggggggcaggattacaagatagaaaccttaaccaatacggtatcggtttcctaaatctactttacaatattatcaaaccaggactttaggccgttccgtaatatataaggaaacgtaatacccgagtcatgatctattacatattccatagatataagttatcccctatgactagtcggataaccatgccgtatgggtatggggtacccataatatccacagtagcccctgagaccttcgcagtcaaaaagataatcttctctcgaaccagattactccaaagccgagtgcttcaatcatctttgtcatggtctcccgagtacttttaccaaatctgaagactgtggagggctggaaaataaagtcaggtgcaccgactagatgcacctaataggtgtagcccccgacaatgtggttaattgaacaaaccaagcatatagtcaaggaataataatccaaccaaccgagtggttttgataatcgtaatcaaccaaagtgacttgatatcgatatatagcatatgcggtgtgaatcctccaaataacatgatctgggtgatataccaactgctttgtaaaatatgatgagtgatatagcaaaatagctataaagaagcttgaatgctgtgaataaagaaatttccaaagtattgggcatacgccatgcgcacactgctttaacagatgtgcttaagtccctaaaagacacatggtttcaccacacctggaaatatatggcatatgtggtataacatccgagtaaataaactcataaaggatttaccaaccgcctagaaaatgaccacaatatataatcagcctaagccataatattggtcaataaaaatgcacacttacgtggcaaaaagcaatgatattgtatccaatcaattgcttgataaacccaaacagcaccttgactatataaaaaagtcagcgggacagctatataaagctttactgtttgacaccttttaagatgcattgtaccaactcctaaaaagttaagtaactgcggtataaaaggattttaaggtattgggcacttgatcacgcgcactttggcctaagcaaaaagtgcctaagtccctaaaagaacgtgacaggccacacctgaaaatatgggctgcagacatattaggcctaggccaaaaaatatgccttcgacaccctttaaaggatgacgcatgtaacatgctcccgagtaataaatcttccgggtaatatagaccaagtgtagctcatatgaatagcttctgatcggaatgattatcccttatgggatactccaaaataaatataataattgaatcccgactggcgcaagtattcggttgatagcccttacggagaataataattggtccagtctttgagcatagaaaataaactcatgactatgaatccatgtggaatgtatccggaacaagtccaaattggagatataatcctcacgcttgagttgatgagcccctgagcatatagcttgttcttctgtcatagtcaaaattgtccattgatggtagctgacacagttggcatagagacaagacgaccaacatagagataatattgcccaccagaggtggcaaaaatattggtggtagtgaagataatgataccaatcaaaagtgatgaagttgcacagccgtggaggcgaagaaaccagtcggcaacagtcaggtcagccatcaatgaagatgaaggcgcccagcgataaagttgtgtagccatggcagcgaaataatcagtcggtgacagacaaggcagatcaaaggcgatgacgaaatccaccaatcatgaagatgaggaaaatagtcggcgacgacaaacgtaaccgacagcaatgatgataagcatcaacagatgatcaaacatgatgacgaagttgcctatcaatagcagtagagtaagctatgataaagaggtttgacaggatgttgatgaagatgacgatgtcggtgatccagtcaatagcggtgtaatagccgatgataatgacgaagacgctcatcagcgtttgcatagtaggtcaaccgtgaaggcggaatagcaagttggcaaagtcttagtcatccattagcaacggcggaatgtcagagctgatgaagcagatgtgctggtgatgatgtcagtgacaataatccatcaaactgttgtagatgcttcacttggaggaaagtatatgctgttgttcaactcattgaatctgatatgagttgattggttgatgactccaaactcccagacatgtaaatttaatcttgacctactgctctgaagcgaagacaaaattgatgactcccagagttgacttgttggctgattaattgattgcttcagcttgacataaa

SEQ ID NO: 16193 - DNA, 1401 bp, Oryza sativa
ccggtcggtgaagacgtagacgcccaacaacggcggcataaaggccagccgtgcaggcggaaacaccagtcggcggcggtcgaggcggccggtcggtgaagacgtagacgcccaacaacggcggcgtaataggccagccgtgcaggcggaaacaccagtcggcggcggcgaaggcaagccggtcggtgaagacgtagacgcccaacaacggcggcataataggccagccgtgcaggaggaaacaccagtcggcggcggtcgaggcgagccggtggtgatgttctgactgatccattcctggagcgtaagagataagcttaaagccatgaatcccttttatgcatatctggatctggatcctgcagaacaaacatataggatgagtagtatctgatataaatataatactcgagaaaaaatcaagtattttaaaatatttataaatatgtatttctcctcttgtcaattttgatttccccgagcagatgattcattacgtttaaacgctctgtccgactagtcatagcccccaagcaccgggagtcggcctaggcacttcccagacatgcatacgagtgacatgagttcgccattaatggaacaaagtttcacgaatcagaatttactactcgggtacttttgcaattattaagagcagaaaataaatttatcttatctctatgcttttgatttattccgaataatacttagcaccttgcgttactcggtccatccaatcgagcccccgggtgctaggaatcggcccaaaggcaaccatccattggcacaccaaacggaaagcataggaagatagaactccataactcgataggtacttttgtactcagattatgtcgcaagcaatcaagataaatattataaaaaatatgatataacatctgtagcccccgactcactactcaatggaagaccaattggtgtagtgaggcagaggaaaaggaaaaatatcatataaagaataaaataaatgatgacttagctttgtaatattccccttggtgatggcagaagtggccaatgtgggaacaaagtcgtccatcaataacaatgaagacaccagtcggcggcgacgaaggcggtcgacggtgaaagcgaagatgcccgctaatggcggcataataggtcagtcgtgtaagcggaaacaccagtcgacggcagcgaaggtgagccaacggtgaggatgtagacatccaacaacggcggcataataggccagccgtgtaggcggaggcaccactcggcggcgacggaggcaggccggcggtgaagtcgtagacgcccaacagcggcggcataataggccagccgtgtaggcggaggcaccaatcggcggcgacggatgcaggccggcggtgaagtcgtagacgcccaacagcggcg

SEQ ID NO: 16194 - DNA, 3129 bp, Oryza sativa
cccatcaacggtggtgtgaccaaccgaccgtataggcggggacaccagtcggcggcgacggaggcaggccggcggtgtagatgacgatgcccatcaacggtggtgtgaccaaccgaccgtataggcggggacaccagtcggcggcgacggaggcaggccggtggtgaagtcgtagacgcccaacagcggcggcataataggccagccgtgcaggcggaaacaccagtcggcggcggcgaaggccagccggtcggtgaagacatgaacgcccatgaacggtggtgtgaccgaccaaccgtataggcgatgacaccagtcggcggcgacggaggcaggccggcggtgaagtcgttgttgctatcagcaatggcggtggcgaggacaagccggcggagtggactcgcggccgatcgaccggaaagctgagacgcctcgagtccatgaccagcatcaatcgcctcaatagtgccgcgtagttatatgcgaacaacaacaaaaaatagcaagaaattaatctgagattaaaaatcaatatgataaataatgataaaaatcagattgagtttccccctgactgatttggatcaagtcagagaagaggagcttgaagaagcggtcgacggaaaggaagtgaaaacttccaaagcgaaagcgaagtcggcgactcatgaaattgattccatcgcgctcgttgataggaaactcgacgcaacccctacctggcgcgccaactgtcgaaacatggattcggcaataataaaagggggtagcgcacgagacctaaaagtggatggatgcggagacaaaggatttagacaggttcaggccctctcaatgagaggtaataccctactcctgtttggggatttaaatccgccgggtgtgtattgatctgacgatcaggttatgtcatcatgccccctagagggcctcctgcccaccttatatagggtggggggcaggattacaagatagaaaccttaaccaatacggtatcggtttcctaaatctactttacaatattatcaaaccaggactttaggccgttccgtaatatataaggaaacgtaatacccgagtcatgatctattacatattccatagatataagttatcccctatgactagtcggataaccatgccgtatgggtatggggtacccataatatccacagtaccatcaaaaaatttcccttaactttcattccatcgatttttcctgtattctcttatgtacacgtatcatgacttttttctcttttaactttacttcctctatttctggacactattcatattaaaactttgacaactcacggtttttttaaataaagatgctataataatatcggtggcaatatacattgcacttctctaagtcgtctaaggccacacttgcttttcaaacccccatagggctcgttcggcgaattttttttatttataattttttttattaaaagttttacaaaaataatttttcattttgaaaattgacggaagtagtcgcctaccgccctctgggagggcgatttttaaaaatcgccctcccagagggcggcgaaaatgacgtggcagccggccgttcgctctcgggcgacggccgtcaacgaaatttgcaggcggcccccttgccgccctccgctagggcgattttatattgtgcggggggccgcctgcaaatgggcggcgagggggggcatggaattttgcaggcggcccctttgccgccctccgctaggtcgattttgtactatgcggggggccgcctgcaaatgggcggcgagggggcatggaattttgcaggcggcccccttgccgccctgggggagggcgattttatactgtgctctatatttttgtataaatatcaatagttatcaaatctttttatattgaaaactatacaagattaaaatctccaagactggtaaaatataattttattattttttagggcatatttggattgttaccgtacaaatattttgttagtgccaaaatataagcaagttttggcactaccaaatatttggtaaggtaaaattgcatttgatcatatttggtttgctgccaaaatgtaaaattgtagtgaagaatgttctacataatctcaaatctagattacgtattaccaatgaataggcttccattttcgtgtgtggtgtgctagtgggaaagaagatatgaagaggttgccttcagattgtcaattatatagcgtcgttttcactgcaatatatgtgaactcaatgagatacattattcattagatgtgacaagacgatcacgcgtgggcgtgattcactttatgtcaacaggcagcgccgaaagttgatagtgataactcgagctgccgcttttcatgtgtgctgttgtggactgtgcgcgctactggatctgacactaccgtgaagcgccgaaagtgtgttgtcgtgagcataagttgttctagcaccatatgaatgaaaagaactatgtagacgagacaaacacaagtagtactgcagtagtaatagcaaaagtagtactgctttacaagtttgtaagccaaaagaaacggtcacataaggactgaagaggtagaacactactgacgaggcctctacccctgtccctcctaccctgcgccctaatgtgcccctgggagtacgtgagtcggtccgggggtacggcacggccaacccgtcctgcctgtacaggtgtgacctctggctgctcctgagtgtgcgcctctggagctcctccaagctgagaggagcctagtacgtcgtggtggtgtgcaccgtgcaagtcgtcgtcgtagaactggctagtaggaccagtcctactggcgtgagacgaagaggccccagtaccgaagatcccggctgcaaatcctgctggacaaggaccatcagtttcgtacaagtatttaacagtagtaataaaaagtaaagtactgtgtgggcgagggatcgacgctccgtgagaggaagagctggcgaacgcgcccgaagaggtggcgaacgcccttgcggagctcgcggaagcgccggtcgtgcctgcgaacgcgctcgaaggcagacgaggtcctgcgatgaggaaacgtgcagttaaaacatggtgacatattcgtgcaaaagctga

SEQ ID NO: 16195 - DNA, 1471 bp, Oryza sativa
agcaggtacgacacgtcatgcagtgtcggagccatctccccacagggaaggtggaacgtgtgcgtctcaggtctccagcggtctacaagagcggcaaggagtgaccggtctgcatcccaccgcttcgctgggtcacggtcgtccgccgccgcctcaacaagcctacaaagtggtagaaggcctgccgcacgcaacctgtatagagcaaacttcaaacataagtacaacacaaagcaaagttgagttgaaatgtgaacatacgcgtaccaaggaacgtgacgggggtcgacacgcaaccactcgcgcgacgtgcgtggacggaaggtgccgagctgtgcaccctcgactgctgacaggaacgagcggtggttcctgtcaatcccacggttcaacagcgccggtgtgtcgtacgccatacctgcatcaaataggttgatcagaaacatataaataattagttcaacataagtaataaatgttcataagcgaattactaacacatattaaacaagagtacaaacaaacaaaagtgtttagtccgaacactcatcacgataacattatgatacaacaccgaatagttcgcattactactagtacaacaatagtcggaggtactcactacaacaacattgaattgaaattacacgatagaagtatttagtccgaacactcattacatcacaacagcattttatttcctaaatcgaaagcattgttacaccatggaatcgcctgatgcgcgacgacgccttggccttgcgcgcctgcttgttgttccttcaccaggtggtcgcctaccatcacttgcctgtccagatggactagcatctgcgccgcttggaacttctgcattcttcgggcatttcttgtaagtatggccgcgcagatcacacttgctgcagcgtaaagtcctcccacctgcttctgactcatccatatcatttctgatgcgtctagtttggcgtcgaccctttttcacccttaacttagatggatctggaatataaaaaacttgggcactcagcgttgtgtaagatcctgagatcccgaacccatatatctcctcactccatgtatgaaagattgcttctttcctgaaataatttgagacgtacacattgggagatatgccacaatcaccggcagcagcaaggacgtgtgagcaaggaaggtgatgaagcttcggcttcatacaactgcaggtacatccaccatccgccttcaagacacattcctgcacggcttgcttgcgatagataccacgcctgctcctatcaacacacattatttcataccgatgcacttgtgtgccttgagcaacaactcgatgtctctgtgcctttttgattttatcttccatgtactttgtcactacgttgccaaacactatgttgttatcggccatggacggaccaattttcttgtatcgatccctaaagtacgcttgcgtaccgtgaaggatgaattc

SEQ ID NO: 16196 - DNA, 696 bp, Oryza sativa
caccagtcggcggcggcgaaggcaagccggtcggtgaagacgtaaacgcccaacagcggcggcataaaggccagccgtgcaggcggaaacaacagtcggcggcgacgaaggcaagccggtcggtgaagacgtagacgcccaatcaacggcggcataaaggccagccgtgcaggcggaaacaccagtcggcggcggtcgaggcggccggtcggtgaagacgtagacgcccaacaacggcggcgtaataggccagccgtgcaggcggaaacaccagtcggcggcggcgaaggcaagccggtcggtgaagacgtagacgcccaacaacggcggcgtaaaggccagccgtgcaggcggaagcaccagtcggcggcggacgaggcggccggtcggtgaagacgtagacgcccaatcaacggcggcataaaggccagccgtgcaggcggaaacaccagtcggcggcggtcgaggcggccggtcggtgaagacgtagacgcccaacaacggcggcataaaggccagccgtgcaggcggaaacaccagtcggcggcggtcgaggcggccggtcggtgaagacgtagacgcccaacaacggcggcgtaaaggccagccgtgcaggcggaagcaccagtcggcggcggtcgaggcggccggtcggtgaagacgtagacgcccaacaacggcggcataaaggccagc

SEQ ID NO: 16197 - DNA, 1688 bp, Oryza sativa
atagtttttagaagctcttgattattatcatccactcggaagacatccttgaggtcaccacaacacacgatctcaagggtttccaacgcacagtatgcataggaaggactgttgtcatataagggaagcacatatatcaacctggggcagcaatttaggtgtagcactttcaaccagaatgacgaatctgcaggctcaaaatgtatctggcccgttgtgctccagtcccagatgtggcgcgcccttgctagttgggatgcccagaatgtctttaggtaccagaaaatgctgttactaccagtactaggtggagtgaatacaacgccttcaatgttagggcatctctccactctgcaccactctaggttataccatctccgtgcctcatttgaatggcttgtgatacttgcgacagacaagctgtcatgcacgtgcaggcctgaagctctttcacagatggaacctggcaaagatggcgacgacaatggtttcgtctgcatcctcttatcatcttgtaagctaatgtagtgagaggtgctgccctccgatttacatggccacatccagttgccgttcatggttgcttgtagttgcaagtgctggatcgtggagtcgacatccgcatataacttcttgtggtcagcagttggtcgtcggcttttggttgacatcaaccaacgttgttcagccctgctaatggcaatgggccttctcttgcttattgttccgcctaattcagaactatcagtagtagcagtagcaacactagcaggaggggatgagatctcgatgcatggtgcatccaagggatatttcgtatcatttagcgagcgaaggagtcttctgtccctcactgaaatataccatttaaattcaacgggtgagaatgatgatgattcaactacacctgtagcatgaccaagttcagtgctactagtgtcgatgtgcagaacctccaatgatacatcttgttttggccatagtattgcacgaagctccttgcatccaagcagtaggagctccttgagagaccagttgcctcgcattgaacgtaggtcgagggttttaatacaagtgcctgagacgtcgagttgcttgagcctctcaaacactcctctcaaaagcacactcttcaactgggtgcatcctcggaaggagatgctctctatcttggctgtgacatcaacatcattgtcattgctgctgctagagaagctaaatgactcgagtgatggcggtaggtcatgagggtcaattcgcgtcaactcaaaacaaccatccagaatgattgtcttgatgattttgcagctagacaggttcgggaataatgttactgctacttgatcttgctgcaatacttgtgactgatgttgaacttcagttattggttcggtcgcgacttggagcttgacaaggttgagtagcccaaggggcttggtgctgcttccgacaccagtactagaattgttgtcatcacggagtagatggcttatgctccaatgcttgacccccttcacatttagctccctaagctcaaccattagatcttgtgcctctactgatagcagccaataccagtctgtgtaactcaggtcaagcacccatagcttctggaaacatgctccactgctaatactagtctccttttcagtgtctccagcactagtactatttggtgatgagcctga

SEQ ID NO: 16198 - DNA, 4663 bp, Oryza sativa
aaatttagcccaaatttccagactattttgtgtattaaatccctgtccaggaccagccagggtacacaaaacgacaagtaataaacagatccaaatgtaaataaagcgtaaaatacttacagaagaggcacttaggcctcacaccaaaagagaacgacagtagcggaaaaaggcgatcctagcggggcttcagctccactccacaggcaaaactcaactggggtctgagccttggtcttctaacttcgtcttcagctcagaagcactacacttctgaaaatggggaataatagcaaggctgagtacaaccaccgtactcagcaagccacaccaacgatgcagacgtgcaaggtgacacaaggaaggcttgtggctatttgcataaaggcgattgtaaaatatttcattgagcaaaacagtaaaactgatgagtaattaaagtaacattaaatctccacttatcaacgctacaccacgttgaacaggcccaaccaacccacctgaactacagtgcattgagtcgatttattaaggtgggactaatcacggtgaatctggtcgaccgcccataaccgcgggcacggctattcgaatagttttactctgatcagaggtgtacaactgtacccacaagacacagccccacgacacgtttccgtgcgctgacatgccaccacgacatactggaaagaggccgtgacaggacccttcgcataaccccctctaaccaagcacaccacacctcaggtttcacccccactcctcgcaaggcagcgggcagtcccctctcgtgcctaggtgaatccagaagtcgcataggccgtcgcagggcccatccaaactccatcacgcccacccttgcctggatgcgtcggctagaggaaagctacactacaagcccagccgttgcccacgctggcttgtggtaagcacgataaattcttccagggtttcccgcgaaccggtccttaattgccatgggtgcgactagcaaaaccatgcacccacagcccaccatgtaatcgcattttagttggataattacgaccatgaagcatggccagatgtctcgagcacgcagctcattctgatactaaaaaaggtctaatactgtaattatcccatcaactgagctagtggtaattaagcatggctaagcatatagttctagctaggtcacataagtaacatgagctagtcgatttattacccaatgttgacgaaggacagatatcaagtaaacatggcacaagcgagcagataggtaaaccctaatcccatgtaattagcaagacatgcaattttatttgcaaacggtaaaacatttgtaaattaggatcaaaatgctcaaggggaatgtgtgacttgccttgcttcttcaaacaatcttccgaacacttttcctcgcgaccgcggacttccgaaacgacggattctacacgcaggcacgcaaaatgaggaaaaactctaataaaaaccaaggaaatagtacataaaaactaaacaaacatgtagagctcaattttatatgaattttgcaagttgaatggctcaattcggagttcgaatcaattagatatgaattttagaagttttgagccatttaaatgaatttctagaatttttaacgatttattgcgcaattaataattaatttcttaaaggaaaaggactgtcgctgacgtcagcaagagaggggccgacgccgataggcgggtcccacacgtcaacggcacaaggggagggcgcacggtggactcagtccatcgcggcacgtgcgcgggcgcaccacgtggacggccacggcggacgagcggcagcggtggcgccggcgtggcgacacgagggcaccgacgcggggcggcgccgagcggccacgtggacggcccagattcacccggggtgaatcgggcggccacgggcgggcaggagccagctcgccgaccgaccggccaggagcggtgacgcgcggcccgatggtcactggcgacgaccaccggcgcggcagcacgcgcgggtgagcggcggagggtagcgggaaaggggaggggagctcaccgagcggcacacggccgaaggatgcggccggcggcgagatggcaacgggaggcggcgacggcggagctcggggcggacggagacgacgacgctccggtgacgagctgagctcgggaacaggcggacgagcggcagctgcgccacaggatggaaggggaactgttagggaggacggggcaacgacatggccggccggagaggaaaagaagggaggaagggctcaccggcgcacggaatagcggacgtcccgtgagtctccggcgatgggaagaggtggccgaggttcccctcgtccctgcggagccgaaggagagcgacggcgcgggttggcaacgaccggagcagcgggacgggacggctggaggcagtgaacggcggtggtagagctcgggtcgacggtggaaaggtggttgcggcgatgaaatggggaaacggagcagaggccggggtagagcttggcacggcgttgccgacgacgcaaacggcgaggtgcggcgacgactaacgcggcagcagcggccggctgaaggcggcggcggcgggggagagaggtggtgcacgaggcggcggtgttccagaggcggagaggggaaatggagtagaggccgggctgcggcacggcgccgcgaagccgacagtggtggcggattggcgcggcggtgggtggagcggcggaatcggccggacggagctcgccggaaagcggtggtgcacgggagcggcgtggggagggcgttagggaggcgcggggagctcgggaaaaatggggaaatggaagaggggaggccgaggatgcttttatagcctcaagagtcgacggggaggccggttggcggcggatttgaagggagaaaggggcgccggcgacgtggttgagtgggctcggggtggcggcggttttcgcggggagaggtgggggaacgaggaggacgtgggcggcgaggtcccacggacgagcgcgcgcgcgcggggtggaggaggtgggtggaaacggcggcgtcgtggggcggctcgggcggccatggcagcagttggagctggaggaaggggatgacaggtggggtccacgggtcccacctgtcggagagagagggagggagaggccggctggggaggcggaacggacttgagtgagagagagagccgagcgggccgagggaggacgccggcccgagagggagagaaagggggcgcgcgggccgcgggagagaatgaagacttgggccgaaaatggcccaaagaaaggaaggggggttttatttgttttctttttattttaattgattcaatgatctttgtgctattaaaactatttctcgagcttcgaaaattcgcgggaaatttcagagattattttagggcacaaagaatattacaaaatattctcggccagtgatttttaaaggaaatttttaattccctcaataattcacttgattaatttgctttaacttttatttaatttctagaaaatacattattaaatgatttttaatcccgaacgaaaatcggggcgttacagtaggttgtgctttgtctcaaaaccttcaatatatcttagaacaaaatgtcatacactcatctgccaaatatgcttcagctatacatccctcaggatgcgctttattacgcacatatgacttcaacacactcaaatatctacataaacatggaaatgagaaaaaaaagttaagaaatatatattggataacaaattcaattgtatttgtaatataaacatacctttccacaaagtacatcgatcggtaacacacaggacctcctatttcagcctctgttgctaaatgagcaactaaatgcaccataacagtaaaaaatctaggaggaaatatcatctccatacggcataatgtcattttaatttgttcatccaacttccgaagcacatctatgtataggacttttgcacttaattctctaaaataaccacatagttcaaataatacggatgtaacattgtctggaagcacacctcgcaaagcaacaggaagaagttgttggattagaatatggtagtcatgacttttaagtcctgaaatttttgcctgaccaacatttacacatcttgatatgtttcctgagtagccatccggaactttaatatcatggagaactttgcaaaattgttgcttctcatttttagacattgtataggtagcaggaggcaagtaatacttattgttagctttttttttaggatgcaatcctagccttatattcatttcttgcaggtctagtcgtgcctgtaaattatcctttgatttgccttccagtcttagaagtgtcccatatatattatcacaaacattcttctctatatgcattacatcaagattgtggcgtagtaaattggactcccaataaggcaaagaaaatagcccactaacacagttccatgtttttgacttctcaaaatcattaattgcctttattttactaagaattgcagtttcagaaaatgcaataggctctggtctatgttcttcaattccatcaaaagaaattcgattgtaacggaactcatggtctaggggtagaaaacgacgatgtcccatgaaagaatacttgcgacaagagggatcca

SEQ ID NO: 16199 - DNA, 1953 bp, Oryza sativa
ataaatgtttttttaagccttggcttaattgggaagtatcgtaaaacttttcttggggttgcccttcttctttccttctttgttaaagtagttttatcttctttgtttttccaccttgaagttccacattttgaacaaaagtcatcatttgccttgtctttcctgtaaagttgacagtttttttggacaaacatgaatcttgacataattaagtccaagctttcccattatcttcctggcctcaacaaatgttctaggtaaactcttaccatttggaattgcttgttgcaggatcgctagcaaatcatttaaagatttattactccacttgttaatggattttatgtaaaacaagactacaagaaacgaaagccttgtaagttcacacccttcccataaaggttcatgagcatctcggagtaaatcatagaacgcttttgtttcagagtctggcccactgttagaagaagttggtgcatcataatcattcactggagggctgctgcctgtgtttccaaaagcatcttgaactagctgttgcatattattatcaattctattttgtgattttatttcactgttagcagagatgaatgatgcagtttcaccatgacaaccccaaggattataaccaagtaacattccattgtacactaagggagtgtttgaagagaaggggattgaggagattgggaagatacgcaaaacgaggtgagccattagctcatgattaattgagtattaactattttaaatttcaaaaatggattaatatgattttttaaagcaactttcctattgaaattttttgcaaaaaacgcaccgtttagtagtttgaaaagcgtgcgcgcggaaaacgagacacaatctctcctatctccacctaacgaacactccctaaatgatcatacacttcatcacgccttagtaaccacttattaacacatttcttgcacggacaccggatcttatcattaggattcttttccctatatgcaaactcaagaaaaccctctattccagcaaggtactcatcacttggtctaggggaaagcagtaacttcttaatagcatttaaatccatcggttttctgtgatgggataagaaatatggttagtacatcagtgttcctaatttgacaaccacccactaaatttttttgatataattttaagttcaactcaaaattagtctgtctacagaatatatatatgatgtgaggttaaccgcacctggactcctgacgttgtgatccagtacatacggcggctatattggacatattgcggagcagcagatgggtagatcaggcatcggtgaagaggttgggcctgaaaaaagcactctggataaatgaaagtaatctgaggcaacatgaacagccacatgataaggacattacatgacaattgaaaactgaaaatacagttccacaagaacagtttgcatgtcaatcttgattaggagcagaggagataacaggacctacaaatataaattttagaacatttgtgcactacaaatatgtccctgtgattagctaactggagctctgatactctagatatacagcctttacctacgatctgaacaaataaatgccagatataataggatggaagataaaacaaaaacgatgaaatatttcgtttgcactgaaacaaacaagtaatagatagaggtgtgtctatacaggtcaaggatcgaacacctggtgtgcataaaaaacagagtgctcctaacctggcgtagtttgcacttgcagatgagaggtctttgggcacaaccaaaatagctgatgaagatgcagtagagagaacagggaagatgccagccgcccttgggcagagcatcagcaggatatggggaacgccgttcttgggagcggctcgatggagcagctctgcacggtgcggcctcggaaccggtgcagcggtgctggcggacagcgc

SEQ ID NO: 16200 - DNA, 1580 bp, Oryza sativa
acacactatttgacaacttctagcttcgaggctaaaacaccattgggtttgttcggcacgtggtaagcattttccctgggagaaacgccaccaggggggtattggatgaatcccctcccatcacccaatcccctccaccccagggatctggttcccttggtcattcggaatgcaaatggtggggaaggttaacgttcacttcagacattaactcatgccaaacaacattcaacactgatatttaaatttcatatcactgaaaataccaagaaaactaaacagatagtcttgaaatttaaaaatagcattaccgaaaatttgaaatattgtaaataaaaaactaaaatttctggagaaaataagaaattctgaagattgcctaaaaagattatgaaaattctgaataccgcatagaatgttctaaaaattgcttgcatcatatccattcagtcaccacaatcagtcacccattcacaatacatgatttactcatttaaacatcatattcatcaccacaatcagctaggataagccactgaaaactaattacattcatttcatacaaacagaaagtaagagtcccaaaaatccaaattctccgtaagtgcaagagcagaaggcattactgcaaggctatcagtagctccattacctgctgcgagtgaaaaatgagttatcgtcagtgctctgcattaggcattaatccatgctatgaatagaactatagtataaaaagtagcagaattacagggaggaaatatacatcagtagaagagcatttccttgaacaatcgacgtcagaagggaactatttgtatagaaatatatataaatataagtagatcacattagcagtatagcatcattagcaaaataggatcagtgctcaagcttatactgagttcatggcaaagcacaaagaggctgaggggggctcctgagtatttactccgtacaggaaatgacatcgatctatctatgactagacctacagagattgatcgaaatttttacacattccaagtagtagtgcatccaattcatcccaatcccatgaattagcacatagtaaaagatgcagagcagggaaaaggaaaagaatcatatcgtcatcctcttcctcccgcttccgacgattagctcttgaacacatttttgtactacacacaagaggaaataggagtattgttcatgcatacagcactcatcatgacagataatgtttctttattaaaaacaaggacttgacagctttgcataaaaaccatcaacaaatacaaacactccatgctacacccagatatagtctactgtcatagaactgaatgaagaaatgcaacccggtgactgatcaaagataacacactgcttccaaaagtacacattggacaatgtataaagctgttccctcctttgtagcaaacattattacaattatattgcaacagtgaattaggaaattttcataaaatcgagatatccaatatatttgatcataagtcaattgttaatctaataaataagagggcaatgaaattctgtaacaaggaaatttagtactaaataatactactagtctg

SEQ ID NO: 16201 - DNA, 1168 bp, Oryza sativa
gctcacctcatcacaggtatgctcccatacatcttttgcatttgtactaatatgttatgtttgagtatatatgttgcgttttagttttagttccatatattttagcacatctgtagcacacagcacatatgtgtagatccagagcatagaatataaagtatgaattgagacatagacagtagtgttaattgtaagatgtagtttagtttgatctggagaatgtaacgtacttttagaaatttagagaacaatattgtagagaatgtaacttagggcgtagtacagaaatgcgaggttaacgcagttattgttttcatcaggtacaatgtcaagtaaggtcacatttcagatagttcacggtgaaggaaatattagatttggtccagatggtgttgatctgtcagattttgtaatgacatctaagggcatcgataggcctgcggagagaacatttcagtcaatttatagttggttgttgagaggatttagaatagaccaagaagtctacacaatgtcagtatcagttgtagtgagtcgtgcaacagaaggttatttttgggaactaatgccgatggacagcactgctgcttggagatatttgtgtggaaatggcttttgaacggtcatggcccctcgttatatttgtgtcggtacaagagaaagatataaatgtttcaatgcaaaccgaagatgtagagggtcctatcaatgcaggggatgttgttggaccatcgatgcaaaatgaggaaaatcaaccaagggaggagcaggccatgggcatggcggatgagggggagagagtcggtataattgttgatgaaatggagaggaaagattcggataatgaggaagcggacgacgacgcatcatccgatgaggaaggtgatgtaatggccactgattgggcaaatgaggacttctctggacttgttatatcagagggtgatcatgtaccctgggagtataaggagaacgaggtaattgagggtgcaaggtatgctcataaggatgagatgaaggaggcggtgaagcattgggcagtttccttgtagagagagtttagggtggtcaagtcaacaaattatgtgtatgaagtgaggtgcatgaagaaagattgtccgtggcgtgtctatgcatataagggtaaatggaatgattattggaaagt

SEQ ID NO: 16202 - DNA, 2521 bp, Oryza sativa
gtcacaggtgaggggataccagtgacgggccactgaatagaagcccgtcaaaggtatgaccaatacctttgacgggctttttttatctaacccgtttgaggtgtgttgggtctataaataccccccaaactgccaactgctttccatcccgaccattttactgttcacaaatcggttgggagggcaagggggcgattttttgctaaaattcaaggtaaaaaacacattattctccattcattctcaacatatcgatcatcatttatttttctttgtatgttgttgatttcagatggatcgtagatggatatactatgcgcatcgttcgtctaccgagtatagagagggggtcactgaatttgtcacatttgcggataatgacagaaaaagtaggatgagcatgcacatgttgtgcccatgtagggactgtaagaatgaacagatgatcgaagacaaggatgaagtgcatgctcatttgataatgaatggattcatgaagaaatatacctgttggaccaagcatggagagcaagaggcgcctgatgtcgcagctgaagaagtgttggatcaggatgtagagaacaccgccgcagctcgagaaggcatgttcgtaccttctgctttaggtggagagaccatagatttggacactcaatgtctatctacaatgttgcatgacattgaagacgcagaggacaatgacagagattatgagaagtttagtaagttggtggaagattgccagatgccgttgtatgatggatgcaagtcgaagcacagcaggttgtcatgcgtgttggaactcatgaagcttaaggctagtaatggctggtcggacaagagttttacagaactccttgaactgttaaaggatctgttgccagaggggaacaatttacctcagacgacatatgaagcgaagcaagtattatgtccgttgggcatggaggtcagaagaatttatgcatgtccgagcgactgcattttgtattacaaggaatacgctgacttggatgtctgccctatctgtggggcatcaagatacaaacgagcaaagagtgaaggtgaaggaagtaagtcaaagaggggaggcccagcaaaggtggtgtggtatctcccaattgcggagcgcatgaagagaatgtttgcgaatgacagtgggatgacaactgttgaccttaacaaggttggatactcggacgaaccttttgtccttgccaatgatgtaacgcaagtctttttcgtgaaggacatatctagcaaaggaaagaagggcagagggcctgatgagcctaagcgtcaagtggttctcccaggcaaaagaaaaatcgtcggagttgaggacaagactgacgaggattacgatcagttggatgggcaaccccctttcacggtgacgattgaccctagcatcctcctatcaaatgaagacaccccttactcacgcagcgatcacaaggagggaacaatagtgaggagaaagtacgtgcggtcaaccgtcaccgccgatgtaatgccgtaattattgtgtacacgatgtaaactattttggatgtattgattatccatataaatcaattgatgtatggcatatgttaattacgcacgattattagaggtttcaacaagtttaaatcatgtatatgttagttatatgtgatacttacaatttttaaaagttttaaatcacacaggtggcaatttcatatgtatgttaattagagtttttaacatttaatttactagcattcatatgctaattataattgactagaggatttttaaaagttttaaatcacgcaagtggcaatttcatatgttaattagagtttttaacatttaatttactatcattcatatgctaattataattgactggagaatttttaaaagtattaaatttaatatatttttaaaactatcattcatatattagagtttttcacaatttaatttactatctttcatatgctacttatatatgactattcgaatttttaaaaggtttaaatcatgcatgtggcatttacacatgttaattagagtttttagcatttaatttaatataattcctacgctaagtatatatgatgattacaatttttattaattttaaatcatgcagtatgtacatacatatcttaattagagtttttaccaatataataatatcattcatatatatgctaagtatatatatatattggaatttttattaattataagtcatatatttgcttattacgatttatccacttaatttattacagacaaaaataatttttcgaagtaattgtcattaatctttgtactttaaataatgttaatgcattaacttctattttataaacacatatgtaagcgaaaatcatatgcagtgctataatctttaggcccggttcttaaccctaaccgggtttaaaaagaattttgaaatagcgggaaaagatatttactcccggttgttgagaacaacttctcaacaaccgggagtaaagatcttttctttactcccggttgt

SEQ ID NO: 16203 - DNA, 14938 bp, Oryza sativa
ccgccaataaaatcgtatggccgccaaggatattctgttttgcttggcggctagtttgaaccgctaagaaaatcttgtgactttagataagaaaatcaactggccaccaatataatcttggcggctgttttgtgaccgctaagaaaatcaactggccaccaagaatattccgctttcttgtagagactttagataagtggtaagattggaaaaagcagggcccaacagaaaaactacaaaactacagaagaagagtaattttatgatcctcgaggaggtaccacgaggtatcaaaaatttagtgtaaaatttggtacgtagtatttaggtaccaagaggtaccaaatcttctattatatactaaaagtccattaaacttcctaaaaacgctctcaaactgtcacgtagtttcctcaaaacgctcttatgtcatcacgtggcacatcgagggagttgagaactccctaggggcccgcacgtgcagcgcatgggttagttccataacgtgaactaacgaagattagttccatatataatcgtgtttggagacaagattcgaaattaagcaaaatctaatcacatatggcatgcaagattaggcacgtgcagcgcatggatttgtcatgaataaacgaagattagttccataattgtgtacacaaggcaatatttcaaatctatctcatagcaaaatttaaatcacatatgacaagattaatttcatgagtcaagattacatatacatacatatatacatatatacatatacacacaccggcttgcatacatatatgtacagctcgccagcaacaccttttaatcctccgcaacacacaattttggtggctacatcctcccatcctctacaacacgcaatttgaacacaggtgatctttgtaataagaggtctgcggcaccagcccagcagctgatgcccaatctaactaatcaagggaaatagagaggacatgaccagaagaggaagggatagagagagagagaccagggcggccacctgctgagctgggagataactcccaggaggatgttgaggtgaggacggaatataggagggggacatggatatggcgctgcaagctgcaacagtcattattaggccatgttcggttaatatctatgagagagggattggaggggatttgttccacacctattatggtatggaattattccccctcaatcccctctaatcttcttcaattcccctcctaaccgaacaaggcattagggagagggggtcggggaactacaaaagagtccagtactccaaagtaaagcgtgtggtgtaagatcattagccttagcttttggattgctatcatggacaaattaagttcatttaatgtagtataagcacaacacatgggttggccataagtgacacgtacaacatctccagacgttatcatcgttattactagccaatgtttttgatcaattcctcatggttttgtttcatgcgcgtgggatcaaggcaatgaaatcactaatggttaactgcagttttttcactaataaatgattatttcatctagatgtcttaataaattgtaattaacattcctgtgtttttctgtgcttcatctaaatatatgctcttttcaatcttttgttttacagacgctcctaataaatcaccagatgacacgctacaaacactctacattatcacatgatttaaatccgtgagcccattatcttagatcctttaaaactaaaccattcaattgctaaacttcttcgtgtacgtacaacggtgtataagaaaaaaaaaacttattcctaatctaatgcacgtgtacatatatacgacacaatttctatgtgtgtggaccttttgtattgacaattgttatgcataagaagtttttcaaccataaattttttcaccgagagacaaagtcataatataaaaaatcgtaataacaacaaaaaatgatattttaaataagaggcccgcgcaactgcgcgggctaccttactagtttactaaaaaaaagtagtgcctcgtgacacctctttaaggaccgtaaaattgctcctgtagtatacattgatctgtaagtccaaatttgtgagttttggtcgaaatatatatgattcatcaattcaaaattactaacttttcgtactctggttaatttctgtacagaaatatcttgatcgatctgtaccgtttctcttctcttcttcctatactggcctactgcatgtatatgcattcacgaactcgcaacttctgtgccacatgccacgtgatatgctggatggtagtatctgctgcgctacgatgcacgtacgcaacggctgaaccacctaatcgagcttttttttttataataaatcggtatttaggtgcgccaatttcattgagtatactgggagggaaaaactgtataggaagaagagcgttacaaaagaaaaagaaaaggaaactagaaagtattttctaaaaaaactaaggattgatatgtgcaaggcattttgcttctactagggcccaagttttggtctcctcctttattttcgtaatgagagatattgtcaagagctctatccatatctctcatattgtcagtagtagcatagtgcaaacacctttcctaggtatcctagggtaggttgccaacgctgtacaccaggtatgtgacgtacatggaataattgagagaaaaaaagtgagtaaaatggctcaaataaaagtttaaaaaattatcttgtttgttttgtgctaaagctaatttgagaaagagtgataaatgcaataggtatatatgtatagtgtttatttttcaacctatgtgcttgtgaatatattgcattataaatcatttgaaatcatgaatccttattgctaattcgagcttaattataatatctttgattcatgtttataatatagtgcatgtttgttaactagttaatgaatttatctctcttgtcttgcaatacatgatcatgaattgttttaggtacacttcaaagctctcgaaagaaatataaaatataaaatataaaatggttattccaagtggcgatcatgacatcattgcatatgtgcttcattggttattattctcttttgcattcttgatgaaatcattgttaaaggaggagaaatatacaaaatgcatgcttcttgaaagagggagaattgaattgtttcaattttaaaaatagtcgattttgtgctttgattgcaaattgatgggagaaattctttcttttaaaaagggggagagtttttctttttcacttttgagatttttgttttcatttttcaaaaacacaaaattgcattttgaagatgttgccaatgtgttcatcaagggggagaacgtgaaatcattatcatggttaatatttgtgatgaacaattggctatgcaaatgatttaatcaaagaattagtttgaaaagatgtgtggatgttagtgtgagtgcgtgtgactaatgtgggtcaggttgtgatatttgtgcccagaaatgtttgctttatctgattgtgtgcaggtgacttgaggtcagccttggtcaatggtgaggaccgggattatgttcagggaaaaacagaggtctagtgcggtcgggataccatgtgagaagatgactaaagtcaggattcttggaggtcaacttcggtcaacggtggggatcgggactagactcagggaggagttgagatccagacggtcaaggataccgggtgacgaagttggatacaagatggcatacggtggatgaatactgtatggatgagatcttcgcaatgggaagggttgaggctagaaggatatcgacttttgagagagaaaaattagggtttacttcgaggtttcaatcctagttcgtgagttgagaggggagtgttttaggtacactttgtaaacatatattgatgcaataaagttgatatactttcaagtgtttcgtcgatacgtgtttttctggatcctgacggttggaccggaggcaagtctgcagtctaaccactggcggtcacacccgcggcagggagacggttcaaccggcgacaaggcggcggttagaccggctgcgtgcgagtggttcgaccggcggcaatagaactacgtcgagatttccatcgatttgagggtaacttttattttcggtaaaagcttttggggttttggttttccttgccattcacccccctcctgataggcttggttattcgcgttcgatcctacaaactgcaacgaaccgagggagctaacgagatacaaggttttcacgagtcctatataattagctcggcttctagtctagtggcatttgatgaccctgtggttgacctgcgtggtgttcgtccccggtcggtacagcctcagcgggcacgtcgcgtccaccctcctcgtccggccggcgtgcaccggccggaacctcacctcgccggtgatcttcagctccagcgacgacacctcctcccccgcgcgcgcccatctccttcaccagctccgtcaacgccgcgccgccgagatgagccgccacgccctcgtcggtcacgccgaacctgtccgtctcggccgcctccaccctctgcccggcgtccgcgagatggacggcgtggaggagctcctccctggtggcgaggcggagctcggcggcgagcggccgggtgtactcggcgcggacggccatgttggggttgtgcacggcgacggtgagcgagatgccgtaggccaggtcggtgccgttggcgccggcgaggtcgaggcgtgtcagggacgcgtcctccaccgtgacgccgacgttgaagacgacgccgtacgagaggatcagcagcgcggcgaccagtaagagcaggagggtgcaacaggacgcgcacatcacgcagctccccggcccgcccgccattgttgcgatgacgccaagaaattacctacgtacctacgtgatcgatggatcgatccaccaatgagaacttcgccggaatcaccagcgtttatatatcggtggtagtgctgcttcttattatagttggccataaggcccgaggcccgaaggcccggcccacggcatgcctttttggcccggcccaagcacggcacggcccgacttgggttgggcccatgccggcccggcccgaccgtcgggccgtgcctgggcctccctaccagcacgctgggctggcctggcacggtcgggccggcccggcacgatgggctggcaggccagacccggtacacaaagtatagggactgaaaatagacatataaatgtcaatgtctaaagaataggaaccttaaatagacttattttagctatttatataccacagcacaaagaagagggaggtaaaatagactttttttagctatacaatgtcacagcccaataggagggagaaaatttagacttattctgaggaaaagcacgatggcccatcgtgtcttcgggccggcccggcacggcccgaagcgtgttgggccgtgcctgggctgtgagtgcggcacgtgggctggcacggcacggcccggtgcgtcggtcgggccgtgccggcccgacaagcctcggcctaggcacggccgggcctgggccgtgccatgccgggcggcccacatggccatctatacttcttagcttgatcgatgatcagattcggaccagaactgttttcttttccttttcgttttccttttcttttccaaattcgagtttttctttttcagttttgctaaaaaaaacaaaatttgtacaaacttatttaagtaaaatattttcaaatgtaaatttatatatagtactccctctgtcacattataagcgtagtaatgaatttacgtgtccaattttgatcgtctgtcttatttgaaaactttttgaaaataaccaaaataataagtcacgcataaagtagtcatgttttatcatctaataacaacaaaaatactaatcatgaaaaaaatttcaaataagacggataattaaaattggactcataaattcatggccgcgcttataatgggatggaggaagtattatagtattaattataatgcaactacactatataataattgtaactacagcgtagcgtaactgtatgatggctaaagccctgagcagcttgggccgaaccaacacattctggcacaacataagtgggccacatggagcttaatataatcccgtgcaggcccagcacaactagttgagacaagagagatcgtacgaccaccacctccgatcccctctcccgctctcactccatcttagcggtgctgggggggggagatatcgctaccacgaccactagtagaagcggtgatgatcgctaccacgctgattgaggattaggtgtgtatgtcgtagctcgaccacttgtagagatagtcggaggatcgtaatcacgctggtaaagaaccaggtatgtaatcatatctcgaccatttgtagaagtggtgggatcactatcacgctgatcgaggactaggtgtgtagtcgtacctcgaccactcttagagatgcttgagtcggttactaggtgtgcatcttatgtgatcagcatgacttcacatatattttttaaccaaattataagtatattggatgtccgttcacaatcatacaatcatgatggacaatcaagccgtaaacgatcgcgaggagattgttccgtgaaattacctacgtgaggaccgatggatcgatcaaccaatgcgaacttggccgaaatcaccagcatttatatatcggtgctagtgttgcatgcttagattggtcgatcgatgatccgactcggacaagaattggtttttctcctttttttttttgggagtttattaatgacaagaacttgatttatactagaaaaaatatccgtctatgcaacaagaaaaactaatgttataacaataattatagtttattttaaaaaagagaaaacatattcttcacttattggataacaacttacaaattcaaattgtttggcattttcatgtattcctaaactgtatggttgattcccactagccaacatgatttaaaccatcgaggttttggattttgtcaccctcttccgataggaaactatttctcctgattacttttagaatatttcacaaaaaaaatgaatttagaaaaagaatagatgtgaccaaattttgtttaagattttaaattaattcaaaccaaaattactgcaatttccaaaatatcgatcctatctgtgtctgagataggaataggcaaaccgatagcacgcacacaagcacacaacatcggtggtctcgtaacctaattctgtcttagctccttggatggagcatagccgatggacctacgtgtacgtgaactgatcacggtcaagtagtagtaaaaaaaaaaaaatcaaagtgagggagagacgaacatatgtgtgttctcttagcttttcacggttgcatgcaatgggccctccggtttgacagctctgagcttcgatgcgtcaatggtccatagaccatgtctatggcagcacgaaccattgcatccttaattccttatcgatctctccagtggcagagtgctccatattcacgaattcttttgagaatcaatattatccttatggaaaatcgcaaaagtaggggtcaacccggggaaaatcgcgacagtaggtccctggcgacgggtgcagttcgatagggcgcctatcgaacggccagagcgcgactggcgaggagatcggaaggctgccgttcgacaggacctgtcgaacagcccccgttcgacaggcagggctgtcgaactgcccctgttcgacaggatatccgtcgaactggcgcagttcgacagggtcgtgttctccatttattacgaacagcccccgttcgacaggcagagctgtcgaactgcccctgttcgataggatatccgccgaactggcgcagttcgacagggtcgcgttctccatttatttgtaataagttattttttttaataatatgtaatttattttagtgtgtaagaaaggaaaatatttttgtaatgttatatgtatatgatttagggttttgataatgtttggtcagaaattgtagtatttatttgttggttaaaatatttgaattatttagtttcattatttgtatatttgaatgataatttgtcatgattcattcgaagggtatgctactgagtaattatccgaagaagtttatgaaatagtactgatagtactaagttaatcgtaaagtgtttctcaaatagtacggacagaacataaatgactaaaagtttaatacaaatagataagtcaaggacgatcagtgcccttcgcacgcttgctaggtcctcccttcttcctacgcctaatctgctcagtgggatatgtcaaattatcaggggggtgcctatctctagctacctgctgtggtgtcacgtctggccctgaccggcctccgtctcctgcgtcggctgtgtgacctgaggtgctgcgtgccagtaatccatccctacttccccctggggaggatcagtggaaaagaagtcctcaatgaatgctgtgcgaggggagtaagcaggcattccgtgatgcgtcgacgccgaaccgtactcatcgtctgtttgcacaagagggagaaaccaaaaaatatggcgtagttagtaacgatacatataattagaaactaaagcgtgttattgtttaaaatgacttacatgtgtgctgtgtgtggccctgctctggcgcacgcggagtgatatgaagtccccatgctggtgtgttcaacacattgtcccccgttggcatgtaagggaagtgtgccgacccagatgctccctgcgaggggtgaacataaggcggagtttggaatacctgcggacgtggtggtgccgtgctcgacgtgggtacccctgatccggctgaccccctggtgtactccggtgctagggtgtgctgaaaggaaggacgaccgtgagatgtgtgggccgcttcgtacccgcgacgtgaagaggatggaccactccgatccacgctggaatgtcagggtagtggtggtgatggccgtcagcccgacgtctgcaccacatctgccgcgctccgacaggagacacgacgtagtagtgcggcacggaagttgcgaaggatgctcgccacgtcgtcaggcctgacgactggaggtctcgcctctcttctttgcagcagggtgtcggactccacgtgaacgtgctcaacaaattccgcctgttccacaaataatcaaggcaattaaaattatttaaccagttgcacatttattaagagtatttaacaagatgcatatttgttagaaataatgaaccagttgcacatcatttataaatactgaactagttccacatttatgtaagaaaaggaactagttgaaccaattgcacatttattagacatactgaactacttgctaactttttaaaaatattgaactagttgcttaaattccacaaataaacacataccattgagttgtaagctgatctaggctgaggggtaaaagtgtcagtaatcgctgcctggtgggggacggtgctatctccttgtggaggaaaacacctccatcgtgtaacactgcggtactaatgaaggtaagctccataataactcccatcgtctggaggtgtctgaagtgccaagttatcagctgcgtgctcccactcttgtaccgtcagctgaactgtggtcacaataactagctcgtaggaaagcccgagcccctttctggagtacctgcacaacaataaattcacacatcagaaaaaatgttgtgcagtgatttattttaaaaaatgtaggattaaacaactgtgatgtgaactaacctatgaagactatcagccaaaggacgaccatctctcggagggaagtcctgatacatgcccaactgtttgagaaccctgtggacattgtgtggctcgacgtgcacgttcaccatgaggtgacaagtcgtcatccagagttgcatatctcgcgtgcaaagatccgcgagaccgtgcggtgcacgatcattgacatcgtgctgagtgtagggagtccaccgaacacggtcaggcgtaagctgatcaaagtcagctacaaactgagtgtagacacgacgtgtcgtcccgctaacccactacggctgtaacaagtagtagttttcattagtcatataaggaaagtttgtgaactagtattcataatgataacatcaacgaatttaacgaaaaatacctcacggtgtgtccacaaggatcccatagtgggacgatcgtcgatgtcatcaacaccagacctatacatctctcgcaaactgtagtttgcgtacgagtcaagctgaggcctaccaatgtcgaagcgctcgtgcgcccacaacataagtagcaatgggcatccagggagtgaactttgcttgctgttcctcacgcaagcatcacacagtccggcatatgtcgccgcaagtaccgccgacccccaactgtactgtggaatctccgcgataggtaactctgcaatctgctccgcaaagtggatgaagtgcttgtccacggagtcagcgtgagttcccgtgaacatcacccatccaaacaaccacaacaggtaagcgactaagtgccgctgcacgatccactcctcctggtcatcagggaagacatcctgtcgaaactgattcaaccaacttttcgtaggaccgtgcccatctgtgagatcctccagtgcaacaggcagcacaccaccaaaactggccagaaggtcatccgcccatccagcattcaccattgttgggccaactgctggcccagctatcggcagccccaacaaataagacacatcctgcagagtgggcaccatctctccaactgtgaggtggaaagtgtgggtctcaggcctccatctatccacaagagcactcagaagcgccgcgtcaatgtagattcgttcggaccttgcacgtgaaggctcgaccaaccgtgcaaacgtcaacaacccagctgctctcagcctacaacatgacagggcacaagttattaatacatgaaaatataaacaccttgtattagaaaaaacaatatattttcacacaccttgaaacccaacgaggatcaatacgccaatattgatccggtccttgcatctttagcacattgcagaaagttcctgtactaagacgtcgcgatcgatggttcctatcgatctccttgtctatcagctgcccatcatattgatcagccatacctgcggatcgaaaaccatattagtacaatgcacgtatggtaacagtacagtaaatgtatgcaacataattcaagtaacaaatttgcatgccatttcaatttaaaattacagtaccagcacacatagatacagataagaacagttcagtacatttcaatttaaaattacaagcccacgacacatatattatgatattacaagtgcagtgcagttcgaaatttaaattacaattccaatacaaatacatgacgatattaaaagtgcagtgcagttcaaaatgaaaattacaaggccattacaaatagattcgggtaataaaagtgcaagaaagttcaaattaaaattacagatgcactaaacataaattgaacgataacgatcttcaaagtagggagtccaccaaggataatagcgaactaaggattatttttcttcttcgacttcccctttggaacgcgacgaacatcagcgcctgtggcatcttgccctacattgtacatgttgcaatctttacgggaatggttctccccgcaaagaatgcaagctttcttacgacgagaacgatctttcacttcagcttcatccataaggttcttgatcctgcgcgactggcgacgacccttagtatcaactaataaatttgagtcaggaacccaattggcttgccctggaggaggacgagtgaaatcgcacacggcacgccaaccacgcaattcaccacgccaagttgcctcccacgattcctttctaaagtagggagaaacaaaaatgtttccatcaacacccccttttgcggaagcagcaagaacatgggaacatggccgatgtaacaggtaaggcttgttgcaattgcatttgcaagcgtgatactctggccacaacgtgcattccaatgtgatgtcagtagtcccaatgccgacaccactcttgtcacgaagtcgtatctcaaataacaactctctattcccagcaggccacactctgtggattcctcccttcttacttttctcatccatgtactgtgtaatagcggggctatacttaacactgggtttgctgaggttcagactagccatggaataccttttacagagatacttctgtgtacccctcgtgatgccctctaggatagcaacaagtggtagaggtcgtgtattcttcataacccagttatacacttcagcaagatttgttgtcatcacaccatacctcgatccatctgtatcgtacaacaacgaccatttctcccttggctcaaattctacccactccgtgaagcacttcgtggcccttccacgcttcctgcgccgagtaatacttggtgcttcattaggaatgggttcaagttcctccggctcctcctgtctggcaactataggttttttcctaacctcttccatgtgtgtagtggtcaaacgatccagttgatcccatatggcatcaaactttctttgttgattctgcttgcataacttcttgaacaggtccatcaatctcttactcctgaattgtctataaaaattagccccaaaatgtcgcatgcaccatctgctatataaatctggccatggcacggactgtgtgacatcttcttgaagcttctgtatcgctgatagcaaaccggcgtgtcggtcatgcagaacacacacatttggtctgttttcaacaacacacattttaatgtgccgcaaaaaccatagccagcttgatgtgttctcgctttcaacaaatgcaaaaacaacaggaacgacatggctatccgcgtcgactccgatcgcggttagaattgttcctctgtacttgcctgtcatgaaagtgccatcaacacagagcaaaggaatgcaatttctaaaggcctctatcatgcacccaaatgaccagaaagcccgacgaagaacattctccccatattcattcacctcatcgagaatagccatgtgtgtgcccgggtttcttgcctgcatcacctccaatagtgggggaagattgtgataagaatcctcataagttccaaacctcatctccaatgctttctgttttgccctctgtcacgccccgaactagtcccgaccggaactagcccgtgacgctccaaattaacctgttaatcgataccagtcccaggaaacagtgctggtatcacagggagatagaatatcacagcaacagaggtctctttattatagagtagaggtacagtcatgttgggctgcggacagatcccgagctcacaactgcattacaaaagggaaacggaagcaggacatggaccaaacaacacaggcgtgacttgggaactaggcagaaaccctaaaactcatcgtagccggcttgctcctgaaagaactccgcatcagcaggatccgcttcatcttcttcagcaactggggggagaattatttatatagagcaagggtgagtacgggagtactcagcaagccatgggaattaagtgtttaatgcaggcttcaaagaaaggctgatgtttttgcaattgattttatttgaactcttttctaaaaacaactaagtgagtgcttctcaaacgacacggatgagacagtgcgtctcgtccggtcggagtttgtgcaatgtatcagtctttaggattgaagcaaggttggcacccggccaacagcttttcaaacggccacccgggcctagctgatcccatcagctgcagatttttttcaaacatcgaaccccttttcacaacagcaatttcacaatcagtagtcaaacaaaactacgctaggaatcacctcacatccgcccatgaccgtgggcacggctgttcgaacaatttgttaacctctgcagagggggtacactttacccacacgacattactaacccggatcacccagcccgtggggatcagccacgtcgggagacctccaagctttcatgacaaggcatttccaagccgacacaggtttaccatatgccgacgagaggggtcccagaccaacaacaggttaggtcccagaccatactgtgccaggaagcccaggggtcctccccgacaccaccccgacgaatccacatgtctctcggcatcaaggctcccctgataagctagttactcagccaggggtgtcccattccacccatgtggtcgtacttgtcttatgtttggatgaaattccaaggaatcggtccttaagtgcgagagcgggaaaccgtacacccggtacgtcccccggtccgcggttttggaaattcatttagttcgcaagcaccgacccaggtgtcgggttttccaagtcttttgtaaacccaagttttacccaagttgttattcagatttaagtttgaaggcgtccgtcgatactcgcacagggtgcacgaatattgagacgcaactaggtggttacaaggggacatgatgtaacaattaacaagggaaggatcaaatgcaacaaattaggtaagtccgccaatctgccttgcagacgggacaaacagattaagtgcgatcctatcaatgcataatattttgcaagcaatataattaaatttcaaatataggctcaagatgttcaaaggtggcttgccttgctcgagatctggagcttgatcctcgaaatcctcgcactgcgggtcttcgggctccgaaactacacgcgaaacgggacaactcaacaaacggtgaaaataaagccctattaatgacctctaagcgtgccattagatagtctaaagatttgaggaattt

SEQ ID NO: 16204 - DNA, 5102 bp, Oryza sativa
cctttagtagataaatttccttaaccgaatatagcaagaatccgacaactaacgacttgacaactctcatcggctaatctcaggacttcgaagccgatgctgactctaagccgatgactactccgggcttaccaaatttcactattaacacatgccctccacttttgaagtatgagaactcatgcttcaaaattatcttctttctctatcttgtaatcggctttcatgagccgatactgatgtactccaccatgctgaaactgatatgcttgccccccgagccaatattgttgttcctccattaaattcaccaccgtgaccatgatcttggaattgacttcttcttcagacatgtggatataaaattcgtggtcccaccaggcgtgctaatttgtgttgacgaaaaaatcgaacacactggcctgggagatctgcttagttcctgtgcaggtccaaatcttgatgagatgcgggcgtgccagtcagtttgatcctgcaactgacaagatatgcaaatagtagatcaaaacagccgattggctgacaagccgatggagtagttccggtcgatagccgataatagccgataccgataccagccgatagcgatagggtttaagtaatcggctatatgtccaatgtagataatgatataaaggcaatcggctgatgatgatgtaataaaataacaatataatctagtataaaccaatcgacaaataatgatatgataaataagcatcgatccgaaggttaaagcacacatcggctggaggtccgatgtcatgaaatccacaagattagattaaatagtgaaacttttgttgtcatcggctaaatccaacttatatgtatagcaatccttatgagccgatgcaacgtctagataactcaccggctgaaaccccaataaaacccttattggcaatcaagaagcaggctagagattatggttctaagcacgacttagtagatcaaacttaactgatgcagcactaagtatgaaaaaaaaacacaatatctagacaatcaagccgttgactgagttttcagggtgatagatgtctaagctaatctaatctagcaacgcgatttagccgataccggcagaaaccctaaaacgagaagcagccgatagagctaaattgatatgctaagactagattaacagagacatatgataaataggtaggcaaatatatcatccaaaccagagcaatccaagaggtcgaatgtactgttgcagccttgaacgacgccgacgtagacgatacaattgcctgggccggcgaaacattggacttatcccttcgccaaagatcgaagacgatgcagccccgcgtcaggtgccaagttccgccggaacgtaaaaacaaaagtggaagtgaaaagggtggcgatgcgccgaattgtattgatcgtgaagatagtttacaatgaccccaggtgtacatatttatacccatgggtagataatagtccttataggacaagaaagaaactttcctaaagataaaaggaaaacataaagtccttataggacactaaacacactttcctaaagataaaaagaaaactaacaaactattcctaattaatagatacaactgccttcttcggactcgatccatacatggcaatcatcatgaagcacatcaacttaatccgacaatgattccaatatcaccttgccggaatcggctacatcggcttgccttgtccgattcggtaactgctgatgcacactgtagccgatgcggttccgaagccgattcataccctgtttccgttatcgatttccttccaaatccgcttcggccttaactccaaatccgatgtaaatttaccaactttcgttgttaacactaccggagacactaaggttttttgttttttctagacaccagagacatgtttacggagtgacgcattttcttatgattaattaaatatttattattgttttaaaaaatagattagtataatttttaaagcaacttttgtattgaaaccttttaaaaaaacacaccgtttagcaatttaaaaaacatgcacacgagacacaaggcagatgagttgggaaatgtggaggaagaacacagcctaagagtaagtttaatagtatagccaactactaactccaaatcatatatagttaatttagtagctaatttatacaatagttacctatagatatatactacacaattcaaacttggtcccacacctgtcatatcttggagtccgtgctgtagctggctacaaatctacaacccgatgctatttctctcttctctggtatcttctcaaaatgtgttcaaggccggtcctaacatttcggaggcccagagcgaaataaaaatagaggccctcaatgggtataatatgtagaatatttttttcttaacgattgtagagctaatatatcttctaaatagaacatacaaatgcaatacacgctctacacacatacgcctgatagataaagatcataagaccctaaatcacatatctaacagagtaaggagaaagcatagataagaggtgtcctactaaacctgaataattgcatcctctaggttaggatgagttactttggcctagaggtggccaaacgggcggcacggcccggcccggcacgggcacggttccggcacggcccgtttcggcacggcccgttaggcacggctgatgaaacgggccgtgccgtgccggcccacgtgccgagccgccggcccaagcacggcccgtggatggccgggccgtgcccgtgccggcacggcacgcccgaggcccacgggccgttcggggcacggcggcccgtgaagcacagtgtttttttttttttaaaaaaggaaaggaaatgtataaggaaaaaaaattaaaaatggaaataaaatgtttaaaaaaaagtaatgatttactaatgttaaaaaatgaaaaaatggtatttaaaaaatggaaataaaagttttttaaaaaagtaatgatttgctaatgttaaaaaaaaagaaaaaatggtatttttttgttgtgttgaaaaatttaaaaatatagattgtgattcattattttgaaataatttaaaggtaaatccacacttgcgaaaatattgcaaaagaatttgttaaaaatagtaatgacctttattaatgtttatatcattacaggatacaatgatacatgctgcctcgttaaaaactttgtcatgtaaaaactcataggggaaaatgagaaaaccatgacaaagaaaagagtacagctcaaaggtcagaacttacttctaacaaaattctactggggttggtctggatccaggtagagttgctcgaagtgggcggccaattcttggttgtccgcagtgtattgggcatgttgtcgagcaagctcccagtctttaacgcttagtagcatttcgacgtggtcgctgcgcagagtcgtcctccggtcttcgatgattcggccgcatagactgaaggccgattcggaggacaccgtcgacacgggcaccgtcaacacatcccgtgctagttttgaaagcacaggatatgttatcttgtggtcattccaccacccgaggacgttgaaatcttgtgcttcgtggtggatggcgtcgctgtccaaataaccggacaactcttcggccacaacatgcgaagaggcgtctccacttgtagccgacgaactgccaccaccttggattgaacttgaagacgatccaccccaaatcctaccccactgtatcttcttcttacctgtagtggggataggagggggtctccgctggcgaacttcctgaaactttacttcatatcttccaaaaacctcatataatttacgtctaacctcagtataaaaagaactataatctacacctatagtatctccaacaagtgataaaatagcagacaatccccttaatttacacctaggatctaaaacaaaagcaagagcatacaacataggtatatttttccaatatttcaaatatttttgtttcatgtgaaagacaggttcagttagaacgtcatcattttcgtattctttaaataaagtagcaatttcaagaaggttgtgcaaaattatattagcagttggataataaacatgtgacaaagttagagtacaatcataaaaagtttctagaaattggtaaaatttttggacaattgcccaaacatgctcgttcagtactgaagacccgtcactgtttcttgggccaccacgtgactgaacaaaatcagaaagtaaactactataaggtaaaacaacttttaacattaaatacgttgcattccaccgatgctctgcatcggtggcaaacttacgagcttctacaccggccgcattgcaaaacctcttccatgcagcaatccgcgggttagaagcagttaaccacgcgattgcttgacgaacagcatcgatgtggtcacctaccctcttcatgccagtcttaacaatcaaattaattatatgacatgcacaacgctgatggagtagaaaagattgagcatacacacaaaataaaggttgcaatatttcaatagccctagaattagcagatgcattatctagggtgacagcaaatattttatcagcaagattaaattcattaattacttccctaattctttcagctatgttttctcctgtatgtgagacatctattaacctaagccctaaaactctcttttgtaattgccaatcatcatcaacaaaatgaacaactacgctaagataatcctctctagctctactactccatatatctgaagtaacacaaacagagaaagtacatgtactaaacagttccttaagtgcagttgcttccttgtgataaacattctctaaatctctagttgatgtttgcctactcacagctttaaacctagggttatgagattgctgaatgtaatgttcaaaagcaggggactccccaaagttcaggggtaaatcttgcctggcgattaaccggacaagagattcccgagcaaccatgggatcgtactcccaactgcgtaccgtaccgtctgggtttagcataagttgctgctgccggagttgtattccttgcttcttggcacacgactccgcatggcgct

SEQ ID NO: 16205 - DNA, 2459 bp, Oryza sativa
agcacaagatgaggagtgtgggatgaggagaaatggctggggttcatgccctatttatagggcgaaatttgagattttttggaattttttcgaattttttatgaattttttagcctcccaacggttattttcaaatttgaacggtcaaatagccgttagtgccacgtgtcgccttcccgttggaccgccgcccgccctgtcagtctgtcacgcgccgccggcgcttttcggcctgacgggccgtgccgggccgtgccgtgcgcgggccgtgccgtgccggcctgctacaggagccgtgccgtgccgtgccggcccgcgggctcggccagcggcccaagcacggcacggctacacgggccgtgccggcacggcccgttactgtagcaggccgtgccgggccgtgcctgctacaggaacggccgtgccgcgggccgcccgtttggcccggcccatttggccacctatactttggccccactcccaccatcataaaataaaccagcccaaattacgattacgatgacactacgctacgctaggtaagcttatacttattaaattattgtaattattgtagagacaacattgcaaacacaatccaatttcctattaatagttccacgactttgagaaaattgtgacagtatcaagtaattcatgctagcatttttataagaaaatgcagtgataactataattgtacgtatcaacatgtatcagtgatcgatcctgtatttagtggtggttatattaaataccatcaataatcatctcaataaagaagagagaggagaaaatgtgtggaacggtgaataaataatccagtgttaggattaatcaagactgatcgaggcccttatcacggcggggcccagggccaccgcaccactcgccctaccccagggctagcgcaaaccgaactcgagccaagcacccgaaaccgaattcgagccgcgctgcggatccatcacaaagcccatctacccaaaaacccaatcatatagcccacgcgcgggcttggcggcttgcccccgtttgcgaaacccgatcaacccccaccgtcgcatccagatcgtacggcccaaacgcaccaactcgaaaatcccctcctcttcctccctccctccggccctcccgagccctaaccctagctctctctccccatcaccaccggcggccatggcgctcgccatccgcgccgccgccgccgccgccggcgacatggcgccgtcatccgcctccgacccgaccctcgggttcctcaccaagcgggacacggaggtgaagctgccccgggcgacgcgcgtgaagaacaagaccccggcctcggtccagatcaccgcggagcagatcctgcgcgaggcccggagcggcaggagcccgaggtccgtccccccaagcagaagatcgccgactccgtcgagctctccgagtaccgcctccgccgccgcaaggagttcgaggacgccatccgccgcgcccggtggaacgtcggcgcgtgggtcaagtacgccaggtgggaggagcggcagggggacttcgcccgcgcgcgctccgtctacgagcgcgccctcgacgtcgcccaccgcgaccacacgctctggcgtggcgtggatatgccgagttcgagatgcggaatcggcatatgaaccgaatgtaatgtgtgtgatcgcgccgtctccctcctgccctgggtggaccaggaccagctctggtacaagtacatccatatggagcaagtgcttggagccgtcgccaacgcccgcaaggtgtttgagctgtggatggcatggcgtcctgacgcagctggttggaactcgtacatcaaatttgagctaagatacggtgaaattgagcgtgtgcgggccatctttgagcgttttgtggccgaacacccgcagccacatacattcatcctgtacgcaaagtttgagatgaagcgcggagaggtggagcgggcacgacgggtgtacgagcgtgcagcagacctgctggcagatgatgagcatgctgaggttttgtttgtagcctttgctgagtttgaggaaaggtgccgggaggtcgagcgcgcccgtgcagtgtacaagtatgcacttgacagggtgcccaaaggccaggctgaagagctgtacaggaagttccttgcctttgaaaaacagtttggtgaccgtgaaggaattgaggacgccattgtgggtaagaggagattccagtatgaggacgaggtgaggaaaaaccccctcaattatgattcatggtttgattacattaggcttgaggagagtgttgggaacaaggacaggatcagggaggtgtatgagagagccattgctaatatcccacctgcagaggagaagcgttactggcaacgatacatttatctatggataaattatgctttgtatgaggagcttgatgcaaaggacatggaacggaccagggaagtttacagcgagtgt

SEQ ID NO: 16206 - DNA, 2284 bp, Oryza sativa
ctttagcctttagttcctaaatcagttgaatttcatattctagtgatttgttgaattgacattgtctgagacaacacccgcacataaaaaaaacttgcttccttgtgctttcggaattgctgtggtacctaagcattccaacattcatattttataatgtttgaccatccatattccatagtccaacaatatatgtatttataatttaaaggtaccattatattcattgttgaaaatattttgattttcagtttatttatcaatacagaagttaatgagccatgcattgtaaacatcactagtaaatattttgattttcagtttatttatcattctaaggaaaaaagatgtccagaatacagaacattttgaaaatttgggccttttaggaagttttttaaatagttaggtcctattatgattgacagattctctcattaatttcactagaataattaattactgcagaaactgttataaaattatttatacaaaactgttgtacagcatcaatccttgttacaatatttgagaattcagacagccataaagtagtgatcttagaaaatctatagaccaccttaaaattttagtcagccaagagtaccttaaaatatgaaattccttttgtttgtttgctatgtatattcttaatcatttccttttttgtatcttacaggaatacttgcagtttgaaattgataaaaatgaattccacagaacttgtgaactctacgagagattgcttgatagaacaaaggatttgaaggtatggattagctatgctgagttttgaggcctcagttggtttgggtggggaagacagtcaaagtgaggagattaaaaatgaagttagttatcaacaacagcagatagagcaggttcgaaggtgccgaggtaaacagaatttggagaacaaatttactttgtccagttgagtacctctgttccttttgtcattcatagtgcaataaatctaacctcttctttattgcaattttcagctgtatttgaacgggcatttgaatacttcagaactagtgctccagagttaaaggaggaaagagcaatgctccttgaagaatggcttaataaggaggtgagctttggtcatctcggtgatgttaccttagtgcagaaaaaggcaccaaggaaagtgaagagaaagagaccagatccttcagaggatggctccactactgcgtatgtgccttactcaattatttcattcttctatagtttctctaacaagtttcattttactctgtgctatctgcccttaaaaggaggttaagaaatttggtataacaaaaggagacaataaatagttttgactcctaatctgttcgcatagcttgttttccatttaggctgcctgcaatttagggaacaaatgtgctgataaaacattttcctaaaccttagtaggtatgaggagtacatggattatattttccctgatgaggttgcgctggcaccaaacctcaagatcctcgaagcggcctataagtggaagaagcagaagacagatgatactgatgatgactgatataaacagcaaaggctgccttgatgccactgtttctgtggtcagagatgagctgatccttgtcaaaatcagatctgaaggacttccacaatgctgggtaaagttgtgaatgtgccctgccttattgctcaacttgtacaatattatgtggtttgtggccccggcattgatgaattgagtcatctgtcatgctcatactctttcattttagttttgatatgcacgatcatgtcgcttgccttaatatcttttacatctagggaggcaactatgtagcagtcatattttcctaggaatggtgcatgttgtgtatggaatctgtaaggtgctgtacataccagtccgatggattttgtgaaaacttatgtcacactggtgatatccaattttggtgaacaagataagtgaattgagggcaactcgtgcagtcacaggtgtgtcatgtctcttatttttagagttctgaagtggagctcctcgtgactcgtcgacagcaagatgggctcagatctcgttctctgcgggaataagttcacattaggtccctctatatgtcgcccagtccggctttcatcccagcaaaaccgggtatgactccgtgcaaaaaaaaggtcgctcggcagtattgtgcctggttttggatgacgtgacgcctacgtggctccctttgactaggtcctcgtccaacgtggcgcttatgtgacaaatgagtcctggaaaaaaaagggatccact

SEQ ID NO: 16207 - DNA, 2126 bp, Oryza sativa
ctttgcagtcaaccatcatagcctgctcaaagataataatccgagtgcttcaaacttttcatgccaaggcctgccgagtagtgaagacgaagactgtaaagggcgaaaagataaagaatatggtgcatcgaatagatgcacctaattaggtatagcccccaactatgtgattagtcaacaaactaaacatatagttgagaacaaaataatagcataattatgcatcatatgacaaaagcatacgcggcgcctaaagaggcattccagccgactgcttttcagccataataaaagaaatccgagtggttaacactctaaaaagttcacgaatgaacacacttgacaggcatccgaatataagactctaaagattacccaccaaatattataaaaatcatggtaatgaataagtctaatagcctaggctatgactatttaccataatgaaaacaggcatataacataccgaggaaatgactatgataaaaacaagtcattccaagttaacccagacagcttttgtagcctaaaaaagcgtacaaaaacagcataacgcctttctgtcgggcaccttttaatttgcatcgcaataattccaaagaattatatgaccgcgtaaaaaggattttatcagcattgggcaacactattgtgtacataaattgccaaagcaaagaatgcctaagtccctaaggaacacaatgggccacgctgttaaaagtattgggctgaggtactgttcaggcctaggcccattcgcacctccgatacccttaacaagaaaacccgagatccaaacgacgcttcgtcttccccgccggaactctcgccattttccccactccttgctacagtacagagctgggccggcaaactagggttcaccattccactcaaatccaccttcaaaaagtgatcaaaatccttcccgtgatccaccgcctcaattcctcacctctcccaagccatccctcgaatcaaatcagcgcattcggggaaaatcgatggcggaagagaaagaaagcttcgaaggccaatgggcgccgtccgacgtgacggaggagaacctgaaggagatggtggcgcacggcgttctccctgccaaggagatcatcgggtggcggccagcgtgcggtgaggcttttccgacccccgatacacacgaggtcgtggtcttctctcatttcttttatggtggatttgctcttccaacctcaaagttcttccgtgggatactgaatttctatggaatcagcgtacatcatttgaatccgaactccatagtccatattgcaaatttcgtccatgtctgtgaagcttttttgggcattagacctcattttgctctgttccgccgaatctttttccttaagcctcaaccgaacaaaaacaaaccatgcgtagttggtggggctggatttcaactgaggggcactctgagccagaagtatttctctatgcctttcaagacttcaaacaaaggatggcacgccaactggttttatattcaaaatcccgagcccgctcttcctgagtactcctgtcttcccccagtataccaagatacctggaactctcttcccatgggagatgaagccgcccaagccttagaactgatggaacgcatgctgaagctcaaagagcaaggcttacagggagagcaaatcactcggcatttcattaagtgtcgattatctccaatcaaagagagatcccgcacagcatttgagtttgacggcaagcatgatccaaaccgtgaagacccagactctctggactttaaaatcatgaaggagagaatgtataaaatcttctcaaatgctattgtcgtcagctactcacatcagctgccagttgtaccatataatgcattcaatccgcctccgcaggtatgtatctgaaaccttcaactcatgaccaaaacataattttatcttcatgttgagtgagctaaccgtggaagcatctcattcaggagtacgtattgatgaaatctgatcccccaattgctcaacgccgatctcctcgccagcacaccgttcagggaagtggagggccgacaatcaggtcagacccgcaacctcaaacctccaaaccggctgggcagacaggttctcgcaagagaa
